United States Patent Application Publication US 2015/0052636 A1 - sequence listing, part 7

SEQ ID NO: 21168 - DNA, 819 bp, Glycine max
  Intron number 2 from transcript Glyma02g32980.1 (locus Gly ma02g32980) derived from phytozome v7.0 (chr-ID Gm02; pos 36301522 to 36302340 reverse strand)
tctctaatttcaggtaattttttttcatttcgatcctatgcatcttcaagtcaaccggcaaggttttcagctaattgagttaattgtgtggttgtgtgtgatgggatttatttattattaaacttggcttctacaagaatacttgttcctgaattttttgtagcatactagaaactagaaactgcgaatgaaactattgggctacttagttcttcctctccttgttcagcttctgagttttcttctcttctggtccagattccttttatttgtctctttcattatattaactttgtcctatggctcgtcagatcctaaaattagttgacagaagctctataattcctagagaagatgttgtttagttttcttggcctgaagttagagttgctacattacactgaattacaccatcaagcactatcatttctcaaatgtacttgtcaactatattattttccttgccagttcaaaacattttctaaaatttgaatttatatttgtaaatttgaatttatatttctcaaatggtcactttgtctctgatttgttactttaatttggacgcttcccagtgataaaattgatattgattaataagtagttatagaaccttgtggacttagaaaaaacattttatgcaaaataattttcaaaaaattgatattattatgtcttttgttatgcctcttgctcaagagaaagctattatatgccctacctccaatgcccgttttggtgctaccatcactggaccttggttctaatctcattgtacttccaggatcattctttcataaaaaagtttgaagataaaga

SEQ ID NO: 21169 - DNA, 502 bp, Glycine max
  Intron number 4 from transcript Glyma03g22710.1 (locus Gly ma03g22710) derived from phytozome v7.0 (chr-ID Gm03; pos 29128628 to 29129129 reverse strand)
gctatctctggtacctaattttgtttttattttttttatttgagattttgagggaataaatttcttcttattcttttttattttgtgttgttttgcttctttatatgttgatgaaaagcttgaaatgagaacttgagagtaagaatctaacctcactggactcagttcagtagctggagctgcatactgatgttgttcttggcatagttctttgtgtgccctcgagtgtaagtgtattcttctgaaatttttccccttttaagtgacatgaccatgttatgtacatagcaacatctttgttcttttggtaagcacaatggtatgcatgacttggatcttctcatgtttcaggctatgaaaaaaaatatattagcatgattaattgtcaaccttatgcaattaatagtagttcatatattgccaattaatttttttaaatttattttcttcattccggtagttgatacctagtaactattttgttccaaaggaggatcctctc

SEQ ID NO: 21170 - DNA, 845 bp, Glycine max
  Intron number 2 from transcript Glyma01g22990.1 (locus Gly ma01g22990) derived from phytozome v7.0 (chr-ID Gm01; pos 29394209 to 29395053)
cacattctctagtacataaccaaccttgtcttttttttttttatttagatatttcataattctatgtcattaatatgaatatttattgaaaatttctattccaattattttcttacaactagcatattggataaaaaattgccctaaacgagtgtttcatgtgagcacacatatcaacctatatgcatttgattatgaaatctttatcataagttaatcatctaactttaactcttatcacatggttaagaaaaatgctaattattataaaattgtttttagttataatcacacatatcatgttttctctcattttatatttttcaaatttttaatcaataattatttaaaaaagttatcattccatgctacttttcgtgtatagttatttgtattaaatagcagcaccgcatggttaaacaacgtatttgtttgttagtgtggctatttagtacgaataacatgtgcatggattgcacgaaagcaacgtggaatgatattcacttttttaaataaatattgataaaaaaaatataatgagattagaaaaaaaaaaacatagttcatttgagttttttgaaaatcctttcgtaacaaatatattttttcttgttgtccttattatagtcaaatgaggaagaaaaaaacttctaggatatagtaattattaaccaaactatgcataaaaatatatcaaaaaaaatcatgaaaacaacaggttaaacatttttttatcatttttacttgaaacattatgtgaggaagtgatgagtaattgtgtgtatctcaaactctgttaactgcaaacagaggaagactctgttaggagcagagcacaagaagaa

SEQ ID NO: 21171 - DNA, 331 bp, Glycine max
  Intron number 3 from transcript Glyma02g26890.1 (locus Gly ma02g26890) derived from phytozome v7.0 (chr-ID Gm02; pos 27996035 to 27996365)
aaatcaggtggataggaataagtctatagctaaaggtatattatatatacctccaattcttaatttttctcttttaagttcatagctagaacctgttagaatgcgaggttagaagagttttgagactttctttcctgaaaaaaattttatatttttagaaaagaaactctcaaaagttcttctagcttgtatctaaacctttcaatagttaagtttgtgtgttctattttgagattttgttgccttctaattatagttgtatctgtgttaaatttaaatctgattcttgatcatgtatatttgtgatttccagagacacaacaaaagttca

SEQ ID NO: 21172 - DNA, 653 bp, Glycine max
  Intron number 2 from transcript Glyma02g14060.1 (locus Gly ma02g14060) derived from phytozome v7.0 (chr-ID Gm02; pos 12437043 to 12437695)
atgtttgacctgtggcttattcccaccagacaccagagatgggaggagataggaacattaataatgaagaaaggtttaagcacaacactcattcctcttgcaccaaaaatcctatactgcacacccagtcgggcaacttcttagcttggttcaatttagttgagaaatcaggcaacaacacagaacaccagttttttttagttaaaattaaaatagccaataccctcaaccaataccatagtcaattaaatttaaaacagaacaatcttttactcacaacaagtcaacaatttaagtacatgacaattaaatttaaaaaacttgtttgagatgatttttagaattaattattaaaaaaaagtcaacaatttaagtacatgacaatgtacatgacaattatagtagtgaattttagcatgtgaagatatgagtattggaaaatatccaagtcccacatcgtctaaaaataaagtcaaattagaatatattaatgaggagcaacagctggatatttataactagaaaagcgggttaatctattggtgtaatgatgtctttctctttattttttagttagttttttctttttaatcaatctgaagtgaatggcatttacagcaagtggccagacgattgatttttggaaagggaca

SEQ ID NO: 21173 - DNA, 813 bp, Glycine max
  Intron number 1 from transcript Glyma04g41090.1 (locus Gly ma04g41090) derived from phytozome v7.0 (chr-ID Gm04; pos 46959091 to 46959903)
ggtacagatctgtctcttctctcttagatccactcagatcttctctcattctccttgatctaaccttcctttctttcatttctcatttccattgccagcttccgtctttctttcatgcgattagtttatttatttctccttttcatttttttcgcgcctgaatgtcaattattaacgcaattaaaataaaatccaagaagccgtttgtttgttgtttctttgctgccttccttacgtgctgtttgtttgtgaaatcgacagtagcgagaaatcaaaagcgtttcaggcggatcctccttagtccattttttattatcagtgacgtgtcttaatggttctggaatctgtgatttccactcttttttgttttttggtttaatagtagatgtgcacagtgtgcactacattttacgtgtttatgttatccactgtgttttactcaactcattattattttatttaaaattttggttatactcgtctttctaagtacgctgacgtcatatttaaaaggaaagttttccttcggccaatttatgtcttcaaggggttcgattcattttatttgatgtgttaatctgattttaattacatttttcatcattgatttacgattctgaggataatgttgttgtcgaatgaatatattgggcaattaaatcagaggtagctctgtttgtctatggttgtgtatgtgatcatgctattgttgaaaatgtcaagttgggactggagttactgtttttagtatttttgaaatctaacgggttgatgtttcaatggctatagctggagattggctacaaggtccat

SEQ ID NO: 21174 - DNA, 715 bp, Glycine max
  Intron number 4 from transcript Glyma04g00510.1 (locus Gly ma04g00510) derived from phytozome v7.0 (chr-ID Gm04; pos 277290 to 278004 reverse strand)
gcttgtaccctagtcataaataagtatgcaaacatctgagtttcttgaattttttttttttttttgtgttatgatggcatgtgaaattgcaatagccatagatcacagcttttacaaatgtttttacagatgatccctttattgaatatatctgatttaaattgtaatttggcagtgtttgagtccaagtaccttaatcatgagaacacatttgaattttcactctgacagataaaacaaaagagaaagtggacaacctttagatactaatagccatagactggcactttttaagggcaaagaagaaaaagtaagatctgctagatgttgcagaatatttattgcaagtttgtaatattctctaggatgaactttagaaaatgaagtgcagtgtgggtgagtcaatagtctagatttttgtaaggcattgtcactgcaataacaatctatggatttttaagaattcacttcactaaattcacatttgcaaaacatgagcaatattagttgtaacatggatccatgtgcttgtcatgcttgttaagctgttcaataaggtgtactcattgataaaggaaatataaaatagcaccctgtacaatattgtgatatctctctaattaatactcttcctcgtaaaccatccttctgacagtatcagtgtttttcatatggtgattgatgttaaccgtttatctttgttatttcagacgtc

SEQ ID NO: 21175 - DNA, 829 bp, Glycine max
  Intron number 2 from transcript Glyma01g03020.1 (locus Gly ma01g03020) derived from phytozome v7.0 (chr-ID Gm01; pos 2498618 to 2499446 reverse strand)
gataagctcaatgtaagggtcactttaaaccaccttgcctattaagaattttctgatctctgtagtttctattcgcatatatttactatgaatttgatggttcagatttgtttgtgtttcaaatattgagttgttgtgatatgacaattcagtttattgatggcatttttggaatatgaatttggtggttccaaggcacatgttattttttccctgatggtttagatttgtttctatttcaaatatggagttgctatgatgataatccagtttatttatggcatttatagaatgcttgatgatacttcggcagtcatgtcgaacctgagcggttacctgagcaactccacacagttaccttttgtatttgtgaaatttttgatgagtttgacttatgggaagtttacttgaatatatttgttatctatttttatttttgtttgcttgaatatgctagtattacctatgaaacccacagcttcaaaagccattgtgaaaaatattttgtccgaagaaaccattaaagcatgggtgtcttcattttctttactaaagtggttggatgttacatcttaaatcaatgatgcagcatcattaaattgtttcttgtttgacttaaatttttctgatgcatcgttactgactggcgtttgtgaaactcactgcttttttccccacatactgaaagagggttgactgtaatttttgctgcctgtggtgtctgcattgcattactgatataatattaagaattaaaatgacctggttttaagccttgttttttaatctaaccttgccctcaaattttgtcttttacagtttgatacag

SEQ ID NO: 21176 - DNA, 873 bp, Glycine max
  Intron number 1 from transcript Glyma05g05580.1 (locus Gly ma05g05580) derived from phytozome v7.0 (chr-ID Gm05; pos 5016356 to 5017228)
ccaattttctgaacacgcttttgaagagggtaagtttcttttccatcttcgttattcatgcttcgatttgtgctcattttttttaaaatttatgattccatttccttcttgatttttctgtgtttcttttttcttttgagtttgacctgctttgatttagatgctcattcttttgatggggttttatgggtagagaattgggaaagtacaatgtgggttttattttgtagttgtttttccttcttttcttttgttggacaattgggtttgtggtttttttcttcttcttataattagtagtttgtttatcgatcttcttgatttgttttttttttttgcttgatttgattccgaggtaatggaaataaagttgtaaaatttagcttccgttgcgtgttgatgggattatgtgatgttgattgttctttaggttttaagtattttttttcatcttgcttgtaatggaataaatccgaattcaaggtcaattttttatcagtttcttgattactcgatatgttgtttattatttgcccttttgcttcatatggctctaacttgtttttgaaaaagtcttcgtcaataattacgtatatgatgtctctttgtgacacctgagctcatagccttcatttgttaattgtcaattattgtttttgacatacaagtgttggaattctttgaactgcaaacattattttaatttttttcctcatctttcttttagtttttttaagacaacttttagtgttttttttttttttttgttaatctaccgtgcattattggtgggttgaattgtttatttattattatatattgtggcatttcaattcaggtaagttcgagcaccggtactgtgctgtgctgcat

SEQ ID NO: 21177 - DNA, 844 bp, Glycine max
  Intron number 1 from transcript Glyma01g06720.1 (locus Gly ma01g06720) derived from phytozome v7.0 (chr-ID Gm01; pos 7129885 to 7130728 reverse strand)
gtgcgggtggaacaaggaaggaaaagaagatatcaagtttcggtatccaaattatcattcaaagattccccagatgatcagtgtttgcacgttaaagttgaagtataaacatttagcatgtgggtcacacacactagtcactattttagaatgccaacaaaaattagcaaatttcccaaatacttaaatgtgactcagataagttcaaattatctctctctctctctatatatatggttacaaggagagcctaaaaaatgtatatatcttattactttaagaaactattttttaactcataagaaaaataaataaaaaactaattttatttttttaaaattattatttacaaaattttaaatgttccaaacaaaataacagtggaacatgagaatactgatagataccaaagcaaaaaaccaaattggtagattcatagatgaaccatttctttgcatatataattgtaactccacccctgaagtagcaaatgatttaaaaaaaaattatacgatcctcagttgcatttgactggtgtaatgattgttttgcaaaagctaagtggaaacaaaagtagaaaagtatatagatgttggttaatttgcacggtgtgcttccctaagatcaacatcaatgattgaaatattggactgtatatgagatgaagtgacttccaatccatataaaaagcctttctcttagcaacaagaatcagcaaaagaaaatagctcaagttcattgacatacacttcaatagaccttgcttgctacttggaaatggcaaacttggcaacctcactctcattcatcatcttggcactgttggcactagcaaggggttcaa

SEQ ID NO: 21178 - DNA, 573 bp, Glycine max
  Intron number 1 from transcript Glyma01g02560.1 (locus Gly ma01g02560) derived from phytozome v7.0 (chr-ID Gm01; pos 2092398 to 2092970)
ttacttgagccaaaaaataaagaagacgatagagggtatatatacctatcacctacttcttattaaataaaaagttaaattttcttataattttatcattcttatatatttatattttaattcttttttactctagttcttataattttatcattcttatatgtttatattttaattcttttttattctatataatttaaaagtattttttttaatccttataatttgtatttaattatcttttagtttctatagtttaaaaataatatttttaatcccaataatttatattttaattaccttttaattcttactaaaaaaaatataaaaaaaattaaaataaaattaaaaaaatcacttttaaagactaaaaaaataagaatcgtaaaattatagaaaacaaatgagtaatttaacctaaataaaattatacatttaggtcaggattatcttcaaagtaatccggtatacgatggcaaaaaaattgaatccatataagatctgctttgattgatataatctgccttcatatttataggtacttggacgtcgtttggaacgaaccaggaaaac

SEQ ID NO: 21179 - DNA, 850 bp, Glycine max
  Intron number 1 from transcript Glyma03g32570.1 (locus Gly ma03g32570) derived from phytozome v7.0 (chr-ID Gm03; pos 40294664 to 40295513 reverse strand)
cagacgagttggttgttgttggcgagaagggtcaggtattttattttctccaaattttcaaaataaaattcttatttttatataattgttagtgggaaagaaaggactaaatgatactctctcaaatatcgtgcatgtgattttttttttttttttggtgttttgctaaaagtttgatttggatgtattggtaactgggaagtaccgtaatgtgctttcaattttcttagttttcaattccttgagcttgaactgtttggctgaaattctaatggttcttactgaacatgtgagtctggtgggtctcattttccatttttgtggatttcatttccaaactagtgggatgcatatgaatttcaagcaatgaaagaaaatgtgttttttttaaagagtgttagtgaatggattcatattctaagattgaaattggaatatctgattaagattctcggagggatgagtaaatgtttttaactctgtttggaagacagcatagccagagtggatcctctgtaatctgtacaagtatactttatgctacattgcaatgtcatggtggttacttatgattcagatgtatttaacttctgatcaagttatataacttctagaagtatgcttgagaatgcaatacttgtatttaattgcggaatttacttttcctgcgggatttttatttgcgtgcagtagaaatgctacagaatgcaatacttatttgctcattttacttttttgattttgttttctctaaactacaattttcatactttctttgcttatgattgaagatgtatctatatcattttaaatgtggaggttctttttttgtttttgacttgcagattgc

SEQ ID NO: 21180 - DNA, 601 bp, Glycine max
  Intron number 2 from transcript Glyma03g40650.1 (locus Gly ma03g40650) derived from phytozome v7.0 (chr-ID Gm03; pos 46340658 to 46341258)
ctccctggagactgaaaaaagtggtcagttagtttactcttacatgtactatacaatttaggtagttactcaggtctgatttaaatgtatgtgtttgtttgagtaattggcactgaattgtatttttcagaatagtgcattttatgtgaagaaattacttttccttactatttatggagatggtgtaaaacatattataagaataagaatgtcagacaaataacattaagtgtgtgtttgatgtaactagcagaaaaactgactgtaggttaaaagttatctaattagttaaattaggcgttaaactaactgatatataaaatgacttaaaataaagaattaagatagtgagaataaaatgaaaaaaaaaagaggctaagagcttataagctcaaatgttgcatagcacttaaaaaaacactactaaaatacaagttgctaaaataatctgatttatcaaacaagtttaatttgctcaaataagtttctcggctcaatttgttttctgttataaaatagtttggtgagctagattgaattatataattggtgttggtgggttgcaggaaattcctagaagtgtgctgaggaaaacgaatat

SEQ ID NO: 21181 - DNA, 1025 bp, Glycine max
  Intron number 1 from transcript Glyma02g15700.1 (locus Gly ma02g15700) derived from phytozome v7.0 (chr-ID Gm02; pos 14185441 to 14186465 reverse strand)
cctccgccggccccgacgaggttgaagacggcgtttgtaccctttcatactaaccctaaccctaaccctaaccctaacattttctcatttcatttcatatcccctattctctgtcttctcacggatctcccttcgcgctacgtaacccccaaaacatttccaatgaagagtttcgcacgtgattataataaaagtgttcgtgctggattttacactcttggactgtgtttggcacgcaatttacggtattctggaattgattttcatcgctaacacttgacaatctcaaaattacatcaatttgtgagttgccggatggtgcgcctcaatctcaatttcaaaactttgctagctcatattatattgggaactctttgattttaaagcatcgttcctcaacacgaagtttaggattttctactttagtgtgatgtctaaaagcaagcattggaaaaagataacttgtgcagccatacattaagctcaagcttgaatcaaaagttgtagcactttttcctgatcttttattttaatctattttctaaaaaatattagttgttaatggaagtgaaccttttctataccatgttcaagattttaaattgcagttgcagttgcattattgctgtattacttgatattgtgagaaattgcgaagaaatgcaaccaatgcagtcacaactgcggttgcattgtacccacgagtacacttcacaaaccttgactttgcggcttcacggtctgttttttaaaaccctgatactaagtgagcaatgaattaacaattgatacacatggatgttctgttatccaagaatcttacataactattatggatgttctggtgtagaatttcataactaaggtgtatgagtttgtttgaagggaacacttgcaaccatggtcttcataattggcttcctgtatatattataccataggattaaaatgctttataatgcttgaatgctgcatcgctttcttttttaccctggaccaatattgatgaggactgtcgcaggtgg

SEQ ID NO: 21182 - DNA, 229 bp, Glycine max
  Intron number 1 from transcript Glyma01g44400.1 (locus Gly ma01g44400) derived from phytozome v7.0 (chr-ID Gm01; pos 55090455 to 55090683 reverse strand)
attttgtatctttggttctcttttaggtgcgattctctcactctgctcttaaatcatgacctattctatttggctttggttgtattcgttgatgccgtggcgatttggctttcgtcttcttccgtttctcagtttgattacagcaattattaattactaattatattattaccactaccagtttcgtgtttggttatttgattttctctttttcatacttttaggatca

SEQ ID NO: 21183 - DNA, 579 bp, Glycine max
  Intron number 2 from transcript Glyma01g41260.1 (locus Gly ma01g41260) derived from phytozome v7.0 (chr-ID Gm01; pos 52822751 to 52823329)
ttgttgctatcaaatacatagaaaggggaaaaaaggttcagtgttcatgaattttaggaaatatttaatgatattcatctttccttgacatatctgaaattgacttccgcagatttctcttctgctctgcattctgaatttgatttgcgtgtcatttgtgaaaactctattcacctcaatttccagatacaatctattgccttgatcctttgctgatctcattgtgttggaaaaatatctatatactttgtcaatgactaatctctgtcaaggaactagactgattaagtaaagctgatgcctgatagatttcattttttttttgtggtaataagaaataatcagaaattttttcggttgtgttatttatcaagcttaattagcttacatcaccagatgcgcagaactattgtttaggactttattaagcttaattatcttatgccacttgatcctcctcgttatgcacaatgaagtagggcaacctcacattttattttctaataatttctttagttcttgctaattccttctcatgttccattcttctgagtgagttatgtttgtggtatcagattg

SEQ ID NO: 21184 - DNA, 870 bp, Glycine max
  Intron number 1 from transcript Glyma04g33080.1 (locus Gly ma04g33080) derived from phytozome v7.0 (chr-ID Gm04; pos 38521048 to 38521917)
aagagggtattgaagattggcgcaggaaaaagcaggtactagattctgctgaccgctttatcctatggtgaattttgctttataaagtcaatttcttcaaccctgaagcatgagtgtgtggattcaaactgaattagactggtcttctcgtcttaacattggtttgtggcttcctgttttgtttgtatttgcttacatttgccgttcaactcacagtgtctatgaaatctatgggacatataatatccaatagcttgaagaatgtcaataatttttaccaagtgttttatgaagattatattttacagtagctttattgaaattgtggaaagaaattgaatgtcatttttcatgactcactgcagactgttcattgaagattctagtttttgtgtttagatcattactatgagttgtttgaaaaaggatgaagtgccactgataagctgtttgctcacggattccagactttgctgaaagaatctctcagattcctagatagattactttcttgctggaattgaagagtattaatagtttgctatattgacagtatggtcagacttaaaattccaaaatagtatctatttatcttaattctactacaatatttcctatatttgaagttttgtgtgcttttggttagattttcattcttttccctgtgtaatgaaatgcctttatggaattgaaataatggatcaacagttctatcatctaagcttattgagaaagaaataaaagctaatggttggggggagcaagaaaaggataggtgtctaaggcaagctgtcaattcagggtatatattttagctaacggaatacttttacaggacatcgaggtgaacaatagaagagttaaattgca

SEQ ID NO: 21185 - DNA, 590 bp, Glycine max
  Intron number 1 from transcript Glyma03g24040.1 (locus Gly ma03g24040) derived from phytozome v7.0 (chr-ID Gm03; pos 30727010 to 30727599)
acctcgagggatttcagacctatacacctggctctgtaagtcataaaaaaaaaaaaaaattcacactatgttagtgcatagaacatttctcttttcattataaatttgttactgttattgttttttctggtcctggtagactctgtttgtttactttgatatggcgattgaggccttattagaaactttataatcttcttcatttgagaccatatgacttctaaaaaatggaaatgaattatcctttaaaatttccataaaattgagtttcatattttatccatttggaatttaaataccatttcattttctgaaatatacttttcactggagtcaattgtgttcgaaccaaatagataacattttaccatgtctctttgaaaactcacaaatatagcactattatttatatttgtgtataacatgtactttacaaatggggcattgagaaaattgaatatagaaatttgataattgaagacaagctttaataaaaagaaaagcttgtagtgtagtattgaaaatacaattttttagtcatagactcatgtagttactaacccttatgtaaatgcagccattaacaggat

SEQ ID NO: 21186 - DNA, 382 bp, Glycine max
  Intron number 2 from transcript Glyma01g37850.1 (locus Gly ma01g37850) derived from phytozome v7.0 (chr-ID Gm01; pos 50136443 to 50136824 reverse strand)
tcatagcagcaataaaagaagctggaaacatcaaggtacatacatgcactagtcttctataacaaaataattaacttaatcactatgcacggtacttcatttgtcaaatgtacgcatatattggtgtatagtattagtaggtaaatataaatattaagtataactctaggtgtgacttggagaataatttgacaaaatcttcagttttatttaaggatttttatcttactctcgattttttcatatttatttctcacgtgacatagccgacgaaaatcaaatttcttttctaccgagttaaaatggatgaacacttgaatcagagatataaagttgtgtttctttgatcatcagaggttcctcccgtctgaatttgggcttg

SEQ ID NO: 21187 - DNA, 621 bp, Glycine max
  Intron number 1 from transcript Glyma05g03650.1 (locus Gly ma05g03650) derived from phytozome v7.0 (chr-ID Gm05; pos 2811875 to 2812495 reverse strand)
accgacaagaacttgacaacttcgtacattttcttttcccatttctcatctcctttttgtccttactatttgtaatttttataaaattataaagtttgagactctaatttcattttttttttttaaatatgagcaaatctggtctatactctatatatttaccgatcaaattttctaaattttagaaactatttttgcatgatgattagtatactttacaaatattagactcatattttataagaaaatgaatttgaatattttttcgatttgagaatattgaatgaacatttttgaaccttgagacttactctaaattgattcacctaaattttttgtttaaaaaaacttaattgtgtataaaaaatattttatgagttaattttatataagaaatattctaagaattaaatgtgatattataaaaaaatattattacttagaatattgccaattatctctgtaggtacattttcatatttagcttcaattcttaagaatttaattagatgtatgccaataattaaaaattcgcgaattgatgtgaattttatgattagtgtgacaatttaattattttatgcaggcacagtatttgattgtgttgtgtacatttaaaga

SEQ ID NO: 21188 - DNA, 808 bp, Glycine max
  Intron number 2 from transcript Glyma03g31560.1 (locus Gly ma03g31560) derived from phytozome v7.0 (chr-ID Gm03; pos 39443430 to 39444237 reverse strand)
tcggtctctgatactgcagttaatcgtatcagcgggtattagtcatgttcttgctctttgtttatttcttttcgttttaaattggaaagtggtttttctagttgttgagcactcgagtttgcaatttgtgttagaaaaaaaattgaacaagtgattgtggtttgattcagtgacacaaaattatatataacttgaattcgtacaactttttgtatttatatctttgttctactttataaaattgtttctaattagggttcggaatgtcagatttttttacatctattgaagatgatgatttatttaatacttgctaatttggtattagtggattgattatgaaagtttatgtttgcaagtcgcgttaaggttctttcatgccttgtttttaaaaaaaaatgttaaggttctttcattatagattttggttgatcgagagaaatggcattgaaagaaataatataaaaaaactgaggttaacatgtacttgataatattttgaaaataagttagaagatttaattttgattagatggtaaaataaaattaaatttgaagtgtaaatatggatatattttatgagcctcatgcttaaaagttaaaattgtttttttttttttattgttgaaaggtttgtaaatttcatttttctcagaattcataactttggccacaaccaagctttaaacaatttgtagtagtatgcaagcttaaccagaggatgccactttttgctgattaattttgcctattctgcaacactaacaatgcagggttgagttagctagatttgttgctgataaaaaga

SEQ ID NO: 21189 - DNA, 972 bp, Glycine max
  Intron number 1 from transcript Glyma02g47260.1 (locus Gly ma02g47260) derived from phytozome v7.0 (chr-ID Gm02; pos 50908290 to 50909261 reverse strand)
agcttttgaccttcgaagcttccgatttggaaaaggtgaccatgaccctcctcccctttcacattcaagataccgactttgctctattgtgttaatggggttcagctatgtaccaccgacactttaatttcgtatctgtttggatacttcacctatggctgtgtgtatatgtccaatgcatgaatttcaagaaacattgtctctttcatgaaccaaagatggaagttattcttatatgtagacaataggataggaagtgatttatgattacaatgatttattgttggaaaagccacctaaattgtggtcacccgtagttagaggggtgtcttgaaacttgaaagtccccacatggtgggtagcttgggcaaagcagggccatgttgaagtcccacattgactaaagatagtgtcgatataaactatataagtgggaaacaatcctcatcttacaagctgtttttgtaggatttcgctttctgacatgtatcagagtctatcctagacccacttttgtgcttgtcacgcacaagcagatactcttgagtgcgagggagggtgttggaaaagccacctaaaatgtggtggtgagtaaacgtgggtaaaaggggacatgttgaagttccacattaagtaaagatagactatataaatagggagcaatcttcacctttcaagctagtttttgtagggttgagttaggctcatcactcactttttgacactcataattttattttgtttttagtagtatatgagaagtatgtttgtaatttggatttgaagaattgcaactatatatttattaggttttatgaatttttatacatatctatacatgtatcgtacacgtattgtatcttgtatatgtataattgtatcatattggatacatgtatcatatatgcacatcataggggttgagtgttttttgtaggggggttcatcgagcaaagttgtggactgcattct

SEQ ID NO: 21190 - DNA, 593 bp, Glycine max
  Intron number 1 from transcript Glyma02g28010.1 (locus Gly ma02g28010) derived from phytozome v7.0 (chr-ID Gm02; pos 29407590 to 29408182 reverse strand)
gggtttttcaagagtgcttgggttgaaattttttggtaacatccttctaatttcttccttgccattttatattaccttgttcatgctattttttttattgaggctgaaccattgcaaaaattaggtctttaatttcttattaaaaaaaacagaaacttattttaaaaaaattatttgggctgaatggttcatgctataatagctttcaaaaattcttgaaggtaatataattggttgttaaaaggtttgaattaccaaattatgaagtttaattccttcaaaaaaaatctcattgtgtagttgctggaatttttcgtccttgttctaagcttttgttagcctaaccctaagccttttccttgtcacaaattggtggttgaactttgtgtaaactttatcttgaattgcttcagaactcaaggagaattctagagtggaaaaaggcaagagtgtacaatttttttttaaaaaaaaaaactatatttgagagatacacttgagtgtggtgaggttctattttccttataactactattatttttattttgaatatgtcaggtggtggtgaacatcaattggaaggggcataaaga

SEQ ID NO: 21191 - DNA, 786 bp, Glycine max
  Intron number 1 from transcript Glyma01g37120.1 (locus Gly ma01g37120) derived from phytozome v7.0 (chr-ID Gm01; pos 49515022 to 49515807 reverse strand)
agaagggaggtttcttagtctccagccaccttcaagtaaattatttcccaaaccctatattatgcacatgtgatcgatgtttctacataacataactttactttctttaatttgatttcatccacaaggttttttttttaaaatgaatcaaattttaatcactaacgatgataaagacaaaacctaggtataaaaaatagagtttcatctatgataaaattcgatttgtaactcatgggatctgaattcccacctactgaccctgctcgttgtgcatagagaaactctaattttaacatggaaataagatcaaaagtacttactataatactgaatttaagttttgtctcaatgaaaattaatgttctcaaggtattaattaagaaaaaataaataaaaaatagtattgaatatttattcttttaaagtagttaaaaatattcaataaagcatattaaatactcattaataaataatgacgtaagcaacatcttcattaaataacgcaaatatcatatactaaatataattattttcatataagattttttatgaagtgtaaaagaattattaaaaagacgatacgatagagagaatatctctatatataattattcctcctttatattatcataccttaaaaaacatagacacgtgaattgtatgactgatatataggcaacaaaagaaagagaaagaattgaattcattttattttcctgagaacaagcttaatttgcatggcatgcagggagaagcggtgcaggattggagagagatagtgat

SEQ ID NO: 21192 - DNA, 673 bp, Glycine max
  Intron number 1 from transcript Glyma02g11350.1 (locus Gly ma02g11350) derived from phytozome v7.0 (chr-ID Gm02; pos 9560581 to 9561253)
tctatccagatccttgtggttggactcctattcaggtactttttgacccttctgaatgactagacagtagaatcatcatattgtaaaatttccaagaaactacctttatattgtgctatggataatgcttggatattttaaattatttctgatttaagttatgaaaccatccttgcttgagaacatttcaaattattattattttttgccttaaagattccagggtaatcaattagtcattattattatcattatggaagtaaatgaggctttgaaaattttataaattaattgttagatgaactttagcttctgtgcattctgcagcaagccaaaggaaaagaaaatcatttggcttaattttgccaaatctacagttaaaaaattattcttgtttaaagcttcttttacacaatgatgaatgatactttccaaaagtatgagtatcagttattttatctttttttccccataaatgaaactggtccttgaaaaatgttgcatgcattaagttaagtagccattgtatttgttgcatattaagccatgtaatcaaaatctttactattaaaccaagaattataaaatttccaaaacagtttgatcttaaaatattgttaaattcgtatttattattgttttctgctgcagggggtgtcttgtgatctgttta

SEQ ID NO: 21193 - DNA, 621 bp, Glycine max
  Intron number 1 from transcript Glyma01g32920.1 (locus Gly ma01g32920) derived from phytozome v7.0 (chr-ID Gm01; pos 44563122 to 44563742)
tggaagatatgtaagtgatattctccctcttttggttctcttattgttttgttcatgtgggattgatataaattttgaagaaataacaatcaaaattaatagcaaattctctgcagaagaattcctaaagatataaaattctataagttattacttatttttaagaaaaaaatctaaggcaccctcaaaatttaagttttgatactgaaattgaaaaaatctactttggtgtgtccaatttcattcaactattatcccaaaaatagttataccagagcctttaaatttctctataatacagcaattctctttaagaacatcaattctaacatattttcttgataataatttggtaaggggtttgttaaattgagacaaagtttgttcttttcaatctcaatcagtgagagtactactggctaacagtcaaggaagtggacattttgttaggaaacctagtttaggtggatgttgttgttaatgtaagctaatttgtctttttattcaaccattttttaaaaaattgtttggattgaaaacagggcattatgtgatgatactaaagtggcttcttcttatttgacaggaatttcaggaattcatactttgcaagagttggtg

SEQ ID NO: 21194 - DNA, 467 bp, Glycine max
  Intron number 2 from transcript Glyma02g44980.2 (locus Gly ma02g44980) derived from phytozome v7.0 (chr-ID Gm02; pos 49394943 to 49395409 reverse strand)
atcacaagtaagctttaaatactgtttaattttgcttctatgcttttagtattgtcatttttgtttttttttttttttgggtgtagaatctagattttcttgtaccttaatgggttttgttttgtctcaataattgcttttgattttatccattcattgtatggatttaattggattttattcttaatagaatttttgaatcccgtaagttggctagaattaatttcgttctgcattgtatagtggaacctggatttgatgtttcagaggctttacttatttgctagatttctttattatacacacgcacatggtagataagttgtactgcagttgaaggttaattaaaatatgcgaattttagtttatcatggtcattttttctttatctgatttcttgcagaattcttttctgtatggtttattgttcagtgattgtaggagaggttgcaaacttcgttgcatat

SEQ ID NO: 21195 - DNA, 384 bp, Glycine max
  Intron number 3 from transcript Glyma04g27100.1 (locus Gly ma04g27100) derived from phytozome v7.0 (chr-ID Gm04; pos 31032875 to 31033258)
tggccgctaataccagtggccatcttcgccaggcaagtcaacgctgaacaaaatttagatacagttgcttaggtatattggtatttttcttcaatagaattgaagttttacctcgttaatctatgttgacttttaatgaaaacttttacaagttgattaacgaaatgaaacttttaacttcaattttgattggaaataataccaaaagtacttatgaattgtaagtttcgtcctatagaattttattttgttatttacactagctatggcatttgaagagaaagaagtcaatgagtgaaatgcttaaggggaactattgctgatctaattagtgtttggttaattttttgcagctattggtagggttggttagctcatttaggt

SEQ ID NO: 21196 - DNA, 930 bp, Glycine max
  Intron number 1 from transcript Glyma03g39860.1 (locus Gly ma03g39860) derived from phytozome v7.0 (chr-ID Gm03; pos 45800331 to 45801260 reverse strand)
tttcctagtcttttctaatccagtgctgtgtagtggtactttctctgcacatcacctccttccctcacacatgcactctcatctgtttaattctttgatttctttccatattctgtatctcttttgttaaaaaaagagaattctttgacttacttgaagtatattagttacgcatgaaaaatttaatcgaactgcatgaatagcttaagggctttgattacatgcatactgtataaacttgtgatttgcttgatgaaacttttccctggatcttctattacaactaaaatgcaattcatgaattttctttggggttccgtactagttttcattaattattaatagggttaacggggttcttggttcttataaaattgccaaatgttggtttttgccttttaacttttaacttctaaaactctttactttttgctctgcattttctaaataccatttttcttgtctcagtctaatttttataaattacaatatagttatttggtgatctttctaaccggcattctagtgatggaacacacgaattttgcctctcttgttagataaatcaagtaactgtactccaacacaacagagttagattgatgaaagtttaggtatttataaaatgtagtgatgaaaaatgagagttgaaaaggacatggaagaaaaccaaaaaattatcaaatttatggaacaaaaacaccattaacccttattagtacatgtttggaaatcaggaggaaaagtagcaaaagtaatttgccaaatgatcaaaactcttgcttttgctttcattttgtttttattcgttcaatttgcatgacaggtgcacaacatttctaacttcatgcacttaatataatgatcttatatattcatggtttgttttgattagataaggaggacagtgtattcaagggaatcaacagc

SEQ ID NO: 21197 - DNA, 837 bp, Glycine max
  Intron number 2 from transcript Glyma03g40200.1 (locus Gly ma03g40200) derived from phytozome v7.0 (chr-ID Gm03; pos 46005102 to 46005938)
attactgctgcgatcgtcccaatcctcttctgcaggtattataatatattattatttcgatccattgctccaacttgtgctatcaattttaatgtactgaaactcttcttcctatttcgatgctttaacttatcagcgctcagcattgtcttttgtgaattgtgacctgcaactagcatgacaatggaatctataagcaaatttcattagataaattgcttcgtctaattcattacggaaataacctttttatgttatttaggtcacgatttggttatttctgacatctgaatactgcatgtggcctttttttttttgtgtaatactattaatgaataggtagggtgcgagtgccttcagttgggacatttttttttgtgaaaggataatgataataatatccttgtctggcattatattgcaaaggttaaactgttcactggtcctcatagttgtcccttttttaagttttagttcctacatgagaaaactgaaagtttcagtttctacacatgcatacaagattaagtttaggtccctattgataatatcagaaaactttaggtgtaactttgctacaaaaactttctggtggtgatcaactgctacaaaaaattgtgtaaggactaaaacttatataattttcttgtataacggggacagctataggaatcaaatgaataatttgacttattgcaaatcgtcctaggtatgtgatgatacttttttttctctcgggaagttttgacttctgttgttatgttctccattggtttgatggttaaaattctgtttattgcagattatatatattgtgataattggtgtaacatatta

SEQ ID NO: 21198 - DNA, 859 bp, Glycine max
  Intron number 2 from transcript Glyma01g16360.1 (locus Gly ma01g16360) derived from phytozome v7.0 (chr-ID Gm01; pos 20234058 to 20234916 reverse strand)
tatccaaagcttggattttctttgtctctgatcaggtttgattcttttggtttaccctttgttccattcataaaacagggaaacaagcattaaatttagagacctcaacctacaatgcttttttttttttaaaaaaaaaaagaaaatttatctgaaggaattgaaacaagtactttattaaatcatgctctactaactgagttagacactcttattttcaagagcttatttccaattctctttattttttttttgtttttttttagtttatatacaccatgggttatatctaatgaaaatttgctttatcctcacattatataaaacgataacgttacaaattggtcaatttttcttatgtctggtgtagtatacaaattaaacttccccccttttcaagtattgctacttattaattttttgtgataaaatataattttattaatgatgactatctcaccaagacaacatatatttcatgttttgagttataaagtatgaaaataataagaatctacaaacccatatggatactgcaacttattgattagcatgttgaaatcgataatattcaaacatttctccttaaggatactaaggagaaaaaaattgatgatgaattggtttgatttttgttgtatttttctcataaagaagctcctaggctgttttgggcttgttatttcttttactaaaatagaaaaaattataccgagtatcaattctttagttcttctatatggctattttattagcttttttagattttagcttttaggatctgtaggcttattaacgcatctaagaattgatccttctcacagattgtggcatatttagcgatcacatcagttgctgc

SEQ ID NO: 21199 - DNA, 617 bp, Glycine max
  Intron number 3 from transcript Glyma03g35010.1 (locus Gly ma03g35010) derived from phytozome v7.0 (chr-ID Gm03; pos 42330659 to 42331275)
ccatcaccctctccaacattaccaaccttctgcttgtaactctctctctctctctctctccaatatctttattattatcttctatattcttcactgtcatacaccattttccatatattacatcattttctcgtgttttgtgactattcagcgtcccccaaaacttactcttttttttttataaataattttgattaaagaaaaaacaacggcccccaaagtttacatttttgacaagacatacttgttggtttcatagccgatctgatctgtggaataaggaaactggttagtgtgtttggaaaacgttgttttctttttggtatgcacgatacatgtttagaggagatgattactatctgctaaccatgccactacatattttaaatctgcaggcttttgatcaaatatggatcacttaagataaaaaaagacttataacatcgtgaaatgcatgtggtaaatagaaaccttatatactggaataaggtttttttgatgttatatgttgttgcatgctattggtgccatatagaaggtaaaagggtagattttgtataatcatggtcttgtttgttggatcagtgttgcaatcagggtattggggtagaggagcg

SEQ ID NO: 21200 - DNA, 359 bp, Glycine max; identical to SEQ ID NO: 16163
  Intron number 1 from transcript Glyma02g36210.2 (locus Gly ma02g36210) derived from phytozome v7.0 (chr-ID Gm02; pos 41593981 to 41594339 reverse strand)

SEQ ID NO: 21201 - DNA, 1009 bp, Glycine max
  Intron number 3 from transcript Glyma02g12160.1 (locus Gly ma02g12160) derived from phytozome v7.0 (chr-ID Gm02; pos 10409732 to 10410740 reverse strand)
gattgcctacttcaaattttgagtttatacaagctgtatgcatgttattctcactagtttgaatcctcactttagaatgggaatagaaattatgccatggagaagtaatggtctaaatgatgattcattacttgttattcaaatcaaaacctttaattagtatagaatattgattaggttaagttactcagttggtcgattaaaaccaccataaactaatcccagggacctatttttttagtatatggacccaattcaaaaaacttagtttaggaacctacttgtaaaattcccaaatagtatagggactagttgaataatttaacctatagattacaaagcaacatgtttatagatgctttcaatgatcgtggtgattggagcctatcaggtaaaagctaaatgtggatgatgtattatcattattctgtgtcagaataatgaaatttgaatagcctagtacaagatagaaatatagaagccttatctcatgatgaactagaattggaagctatcctctttatggataatgctcaagaagggaatgagattgatactctatacttgtttgtagggattatacagtaatttatgatgagattgatttataatttttatttttttagcaatgttaaaggagtatatgttcttaatttggattgaagaattgtaattatatatttatgatgttctatgaatttttttacaaatatgtatcattcacgtattgcatcctatatattttcagaatggacgtatctctgtattgtatctgtgcatcactggcctagtataataatcagtataacatgtattttgccaatcgattttgaagttattcttattttctgaaacagacatttgtgtagagaggtttcttttagaagaaccatctttcactagatttttgttttattcaatttaatgttgtctgtttgtggttgtgttaattgatcttcaaattttgaagttctctctgtttaggttggcgaggctataccattaagtg

SEQ ID NO: 21202 - DNA, 487 bp, Glycine max
  Intron number 2 from transcript Glyma04g38710.1 (locus Gly ma04g38710) derived from phytozome v7.0 (chr-ID Gm04; pos 45065605 to 45066091 reverse strand)
ctcatccttcccggtttgtctcttctcacaaaattgatttgtacaacttgtttgtagtggcagcacttccaggctttgttaattatagaatgtcgtaacatttttattgttaaagatattctgaattgttgtgctattctgaatttgtttcaatcttgaaaaaagaaaatatgcgtttttaattataaaatatagagtcattaatagccgttttgaccaatgggagttgggtctagtagaaggggttagtttgttgtaatatggcgaaccaaggttcaaagcttaactggaaaaggtgtctataatttagtgtccaacaatgttttttataggactgactttgaaataggatatctgtgaaggggaaaaaacattttgcatagaggaaaatggacatcataaaagtacttgattatgcagaactaactttgacttccaattcaatctaacagacgactggttctctgtacttttgggctgcccattt

SEQ ID NO: 21203 - DNA, 610 bp, Glycine max
  Intron number 1 from transcript Glyma01g36720.1 (locus Gly ma01g36720) derived from phytozome v7.0 (chr-ID Gm01; pos 49165149 to 49165758)
aagctgcagctagactccgtgcacgcactctcacggtaatttaggtttaataaatactcacgtacaattttgatgcaactctttttctattaatggaaatccaagactgtgtgtaggagatttataataactcgcctactaatttaactctttaaataccgttgaccttagtctctaattcaaattgaaacttcacttcaataattcgcataataaagattttcgttatgaagatcaaattctgattctaagtataaaaggtattatatttaagctcatgcttgatgattattttgatcagtgaatcgtatcacgtagttagtgtatatttttcatgatgcgaaactgattaagtgcgtgtttgggtattcgttgggaggctcccaaacggactttcaatcaaaagcttcaaattctcaagtctcacggaacacaaacacagcctaagtgtttgttatgtgtataataatatgcgttctgaatgaatattattgtgattcttcctcccccatcttaattattaagttgtttgccatgtacattatttgttaagttggcacgttgatgtcttacaggagcaagagtacgagaggttcgagttgtccctgaa

SEQ ID NO: 21204 - DNA, 407 bp, Glycine max
  Intron number 3 from transcript Glyma04g39170.1 (locus Gly ma04g39170) derived from phytozome v7.0 (chr-ID Gm04; pos 45410309 to 45410715)
aggaaaaaaacaagaatttttctgtgcagagaagggaatttttgaagttgtggaatttaacaattttgataattgatatgttgtatgtgtgctagtcattttctttttttttatgtaagtcttccaatatttttttctctcaaaaagcattgcatgcagttacgaaaatgtatgccaagtggttgtttgcttacatatttaagagtatcagtttttattcttggaatggtatcagcgagttttgttggttctagtatattattaactagcactctgtcagttcaggctttgcttttctttttttctcccttgttcacactcaataactgctccatattgttgcatattgctacaggtgccagagttacctgtgcactataagcaactttgggatactctgttcaatc

SEQ ID NO: 21205 - DNA, 1019 bp, Glycine max
  Intron number 2 from transcript Glyma05g04230.1 (locus Gly ma05g04230) derived from phytozome v7.0 (chr-ID Gm05; pos 3335198 to 3336216)
ctggtgttcctaaggtgatttttgttaactctctaacgtatatatcaacatttatttctaacgtatagtgtaaatactattttaaaaacaaattaagctcatctagccccagcctaatagtagttcttattaaattagtcagagttgatcttataaaacaaaaataaaaacttaagaagtataatattaagataaggttgtctataaaacataatgaagtaactaaacattaccttctttatgtcctttttaatgactcaaatttataaactgtaattcttttatacttttttaatgacttaatgtaactaaaatcattagtaatggaagaataaatatctttaaacagtatttagaactataataaaatcttattggagtcaaataaaaatataaaatttgaaattctattttatatcatggactcacggtcggcatcagcatggactcatggtcggcctgtgggctgtagcatcttgtaagttgaaattcttttatatggaaaggtacgttgatattatatacttgacccgggaataaactttttcaagaaggaaaaaaaaaaaaaagctgcctttgaaattgttgttgctggcaattgaattaattagagtaattgtggtctatatccatcataatcgagtaacttaaaatctaatttatttgactagataaaagttagaagagaacattggttaacgcaattattgcattgtggatagacattagcgggatgagacgtcttcacaaataaaataaatgtgtaaagtttgtgtttcctattgatgatattttccaaatagtaataacttaatggtcaattcataagctagcactagctacattgtctaaacagattagtcacaaattatcatagttccaaatagaaaaaaaaagaggttgttcgatgttacctattataagatagttgcttcttttgtgctgagctgttctgttcattaaatttgtccctttgatgggatgttatttatttatcttttaggattacaccggtgaga

SEQ ID NO: 21206 - DNA, 1025 bp, Glycine max
  Intron number 1 from transcript Glyma02g43610.1 (locus Gly ma02g43610) derived from phytozome v7.0 (chr-ID Gm02; pos 48373481 to 48374505)
accgatcaccaaccaacgtggcttcttctcctcaggttctctctcttgcttcgatcattctttgatcttctttctataccctttcgcttcttataatttttttcttcttctttatattacactgattgtttttattttatttgttgattttaatttcgtttgttgagtgtgcaacttgttatgactgtgggttgtttagggatctgatgcgtttgtttgactccgatccatttttcgcttttttcgattagcttaaattactcatgtttctaatcgttttgatcacattatacttttgtttttgttttttcggatcgttgagattcttcacgaatcttaccccagaaaatggaacaaaccaattagtaataagtaataactgtactgtactaccaggtggcctaactctaaagcttgttttgggtttccgagaattgggtaattaggttgctcctcacttttggtgacaaaatgaatttcgtgtgaattcaaattgagacgcacatagtttctgtgctgacaaaggtggatttgtaattgtgaaatatgcctttattatgttcgtaggtaaatggaaaattggtgaagcgggctattttgtataaattggaggaaatgttttaattttgtttctcaagttcagcttcttgctgtacaagtaatagactattattagacttgccagaaatcaccaactgggttgctctttctaaccaggtatgctgagggtcggattcttttttcttttcaagcaagaaagctgtttatgtgcaggaattctaagattaatagaatgttatatgcatatagtatacaattttcatttcattttttaagcaggttatatgttggcaaactgacttttatttgaatatctgattacagaacatggtactgtgtatatcctgtgttatactttatcttggataaactgttttagctgttagtcgttgttcttttgtttatgggcaaaatacattgtttctgcaggttctctaagtcaactttctgtttttgattgttga

SEQ ID NO: 21207 - DNA, 763 bp, Glycine max
  Intron number 1 from transcript Glyma01g42500.1 (locus Gly ma01g42500) derived from phytozome v7.0 (chr-ID Gm01; pos 53760518 to 53761280 reverse strand)
tctcctccaccctgtgcaagaggtagggactggaatgacgtggacatatttgatgatgatgaaatctcactgtggaacttctcaatttgacgcgtacgtcattaagagtatgactgtatgcatgtttgatgataagcgaaaacacctttttgtgtgtatgcgattttctatatttttagggacctgttgtgtgtagataaattaagtagcactcgattgattaagttgagtggagttaaacatattgtagttgtatgtatgatttgtttcgtgattaaattttaatgacaagtacagttggcaaattcaacggttcccatcccattagtaccaagagggcagcactactacgcacttggatcctctgctgctatactgcctctacaattaaaaaaaaaaaaaaaaaacttacaatttgaccggaaagtttcgtgatccgtataagaaatataattaattaggaaaatgttaaaaattatacgtctaataaataatgtgatgaaaacaaaaattagtaatcaattataacatatcttgtgtgtatactttctcctctttaacctcacactcaatgttttctatttttaagttttatttttatttttatcgtgttaattgttaattttattgtagtggaagatatttaaatttagaatttttttttcttatttttatccttttgctacaagatttgttgttgattttttatggtttgatttttgggttaggctacaataacaacggcggtcctgaaggtgacggt

SEQ ID NO: 21208 - DNA, 920 bp, Glycine max
  Intron number 2 from transcript Glyma04g01360.1 (locus Gly ma04g01360) derived from phytozome v7.0 (chr-ID Gm04; pos 864685 to 865604)
cccttcattcgccgcctccccgagttcaagttctggtaatttccatttctattccttaattttaagttctgttcattcagtattcttttgcatgactgcaattataataattactatagtcttgtttggataaaccttttcataagcatttacaagaagataagataaaatgattcagtctctgattgataaactgttaaaatgatctgagtttctcttaagttggtttatagaaattctctcatataggccttgattaatttttaatatttaatcatgttaatatgtaaaaaatagaaaaacgtgtattaaatggtgagatttttaaattgcacgctctctagtttttctcaagtggagactgaggatccgtgctccttatttagcttctctaaaagctgattttaacttttgcataatctaattctaactaataggagtgtaaacacttgtatgtaggagaagaaaataggaaggcaaaatgaattgagcttctcctatgaattaaaatcaacttatgcatctcagcttgtggagaaattaaatgcaagagtttctatataagctaaatgtgtataagttgattttaacttgtgagaaaaactcaaatcgtttctatataagctaagtgtataagttgatttaaacaagtgtttataagtttattcaaatatggcttaattcattttaccctttgttttctcctcttataagtgtttgttaagatttttagtcaaataggaccttaagcttctcctataaattaaaatcatcctatgtaatgagtagtgattttcagtggtgtgagtttcacttgtatgtgcaatttatttatttaaagtggctgctgctattaatgtgcgtgaattcttgtaatgggcgcaggtattctttcacgaaggctctctgcatagcatttg

SEQ ID NO: 21209 - DNA, 511 bp, Glycine max
  Intron number 1 from transcript Glyma01g45270.1 (locus Gly ma01g45270) derived from phytozome v7.0 (chr-ID Gm01; pos 55640728 to 55641238)
tggtgaaggtaacttcaaaactattcttttgcttttcaaaactcacttagaattccacactcttctgagagagcaataataataataacccttcaacataacatagccattgcctctttttctgacttgaaggtgattctaaagagcaagtttcccttgcgccttcttgattttgatttaagttatatgaaatttcaatccaatggttttggagactagagaatggtgttcatgttccttaggtcgattcagaagagaacctatgaatggcgagaagataaggttcatgtgttggttatgaaaatgtttaaggttaaaaagcagacccgacatcaagagatttgataacagttggtgattttggaaaatttcattaggctagctgagaatgtaagagcaatattttggttttgggtattgtcattatccttaatgtcttggtgtattgtggatatattaatggtaatgaaccctttgtttatgacttgcttcttgtttcaggcaccaacac

SEQ ID NO: 21210 - DNA, 653 bp, Glycine max
  Intron number 1 from transcript Glyma02g43330.1 (locus Gly ma02g43330) derived from phytozome v7.0 (chr-ID Gm02; pos 48107319 to 48107971 reverse strand)
cagggatttcaaagagggtgagctatacatcgttttgccttatatatgtattttgatcatgaatattttaaagtaatggaatattattatacttcagttatatcttttttctatttcatctcatcctcaaacacttttatcgttttcttttccttccatcccctttatcatatatataattgtgtaggagtttattagtagagtcatacgttttctccctatataaaggcacgaatcatgatacataagtttttggaaatttaaatttaaaggatgtttacataaacacgaggggtttcttaagtaatcctattcattcgatcataaagagctacatccttgccagacattttaatgagaaatatcaaatctcttatcgtctaaaaataaaatcaaattaaaatatataagtaaagaacaacctttattctttcagttaagtctctcacataattcattttaaaacattttgtattttttttccgatttattatgatataaccttttcatacttaaattttgatgttcactttatctttttcctatcgctatttttctttctgatctcatcttcaattgcatttaccattttctttgttttgtaaatggttcatgtgttaattaagagctaggtgaggttgtcaaagagacta

SEQ ID NO: 21211 - DNA, 880 bp, Glycine max
  Intron number 3 from transcript Glyma03g23260.1 (locus Gly ma03g23260) derived from phytozome v7.0 (chr-ID Gm03; pos 29833633 to 29834512 reverse strand)
tgtgtgtgtgtgtgtgtgtttttttttgtctagtttaatctgtaatgggggtttttttctgcttattttttttggtctaatggggtcatgtagcctacctctcatagtctttgttttttcttctttggtgattgagggttatgttttttccttgatttgtgttttgtctgtgtttttttttttaattgtaatggggattttttttctagttatttttttgcttcaatggggggtgcccagttgccgaatgacgttgtgtcattcatgtagccaacctccccataggccttttgttgtttttctttttctttggtgattgagggttatgtttttttccttgttgtgttgtgtctgtatttttattttaaaattattttatctgtaatggggatattttttttcgagttatgtttttggtctagttttatctgtaatagagattttttttcctagtattttttttttgctgctgtgggggtaccctgtttctgaatgacgttgtgtgattcatgtaattgatatctgattgtgggatctttttgctgatgttcttcttccttggcctgacttgttttttgttttttgggttctcctttatgacaatgtggatttcaaatgttgcaaataacagggtcaggtgcaatacttaatcaaatggtgagtaaccccttttgctcatttgtcttttgttcttattttctggactgggttgtgatgaaaaataaggatgtgacaattggtgtggtgaaagataaggatgtgacaatgggttggaagagagtgtgaatgtatggatatcattactcaaagggtaaagggcctagtgtgaaaactatatgtgtatttttgctgatttgtttgtttgtttatcactgaagga

SEQ ID NO: 21212 - DNA, 522 bp, Glycine max
  Intron number 2 from transcript Glyma01g44430.1 (locus Gly ma01g44430) derived from phytozome v7.0 (chr-ID Gm01; pos 55102334 to 55102855 reverse strand)
gtcttgcttctcacagagaacacagagctattcaggtaaaagcttagttactaataattaattaattctctttgggggatctatgcataactcaatttgatgcaattctgtgggcattcgaacccccaaaaagccaaaactcaaggatttggatgcctgtaatctgattgtgtaactttcctacattattactttgttaggatccaaccctttttgattgatcctaaagttatttgtctcttgtgttggtacgtgtctttctataccgaattatcaattccgaagtcaactatggatggtcagttaaagttttgcactttgaattttcttccactgaataattgattattgtccaatttaaataaatgtctattggttcatcctatcagatagattgtttattattttaattaacattttggtactttattttaactaaataatgttgatataatctctgatgggttcatgtattctttcaattctttattaatttttcaaagattaggagatcttcatacc

SEQ ID NO: 21213 - DNA, 879 bp, Glycine max
  Intron number 1 from transcript Glyma03g28760.1 (locus Gly ma03g28760) derived from phytozome v7.0 (chr-ID Gm03; pos 36707991 to 36708869)
cgctggtggataacgaaatttcttaggtaattctctcttctctctctatctgatctcttcacgattatgaggttttgcttcgatcaagttcaatttcgtttttcttcttcttttcgtttgtgttttgaagaaattgaagggaaacaaattccgaaaaatgaaaaatctcgagcgatcgtttttctttgctggtttttgttttgtaattctgcgaaattggtgatttgttgaatgatttgcttgattgatgcttgggaactcatggatttggttctttcttgtttgaatttctaggtttttgaaatttcaatcaggcaacgctttattttctcgttctttttctttttcttcttttgttgtttgaatatttcattacgtaagacggatcttttactcaaaggagtcaacagagagacggttttgaatttcttgtttgagatctgacctttttctttcaattttcattttcttttttatgtatgatcgatttatgttgttccatggggaaaaaagtgttgcgaaaattacgattcataaacaaaacatagccacgatttccagatatttagtggatcgcgatcaccacattttattttcacaccgtccataatttcaccgaaaaagaaaaatatcttgcatattttgagaagttgatggaatcaatcatgatgatttctctctatatagaatatcgaaattttagaactgaagtgttgaatcgatgtagttttggtgaagatccatgtttatatactcgaaaagcgttaatttgatgtttgaaaggttgttcataatttttgtttcttgttaacagttgttttttgttgatttggttgtggtgcagacaaaaaacaaggatcagaaccgttgaatcaagtt

SEQ ID NO: 21214 - DNA, 596 bp, Glycine max
  Intron number 1 from transcript Glyma03g03560.1 (locus Gly ma03g03560) derived from phytozome v7.0 (chr-ID Gm03; pos 3345328 to 3345923)
acctcactattgatcacatcaaagcggtgttcgtttgaatctctcttctatacttttcattcaatttatcaattgaaataacaaaatcacatttgaaagaaaaaagcacgtcttactcagggaagacaaaaaaatatacttatccatgattcatctagttcctccaaataaaattcaatccaatctatgtacttgttttttttttttttaaaaaaaaaacttattaactattatttttatatataacactcagttaaagaattaaaaggtttatttatttattggaatacatttaacactcacaataaaacaatttttcacattcaattaaaaaaatattttattccttaacaagtttcatgagacattgattaatatttatcttacgaaaaatatttggattagattagatgagtcatataatcaaattgatggatatcaattcaaccgggcaaaatggcatgcctcatgcatttcatatggtcgatctcatctaataaaataaaaaaattgttattgtgcttagttgttgatgtactaacgacttattcccttctacaggacttgcttatagcagcaacggatcccactgcagc

SEQ ID NO: 21215 - DNA, 606 bp, Glycine max
  Intron number 4 from transcript Glyma04g02010.1 (locus Gly ma04g02010) derived from phytozome v7.0 (chr-ID Gm04; pos 1382324 to 1382929)
caacaagtggaggcttgaatcaacaaagaactggggtaattctctagactcttgagattattatagtcaaacaaggatttgatgctgccttccgtttctactagtaaaaaattgtgtttctgagtctgatttttttatttataaacctatggtatataaaaatgtgaaataaactcaaaaagtgaagaaaaaaaaatgcttctgctgcctcaattggattctgccatagattgatgttattgttgtcaaatggaatcaacttgttcttgcagtagtaagtaatgtggcatttaatgagtaaggagaatattgtttgcttctctctctctctcctcaaatcttcttgacaatcatattgtttgcatccatggaagaaatacatcccttgtctttttagatgtgcttggctttggaaaacaaaattgtcaatttaaattgtttgatgcaaagcctggagtatggaaacccagtaaatccgtttgtttagttacaatgcaaatcaagatagaacactgcagtatatgataactgtcgttgaattgcaaactatctgcatactcggctattaatgccaatctttctgtttctgcatttggcagattacgg

SEQ ID NO: 21216 - DNA, 563 bp, Glycine max
  Intron number 1 from transcript Glyma02g17400.1 (locus Gly ma02g17400) derived from phytozome v7.0 (chr-ID Gm02; pos 15663951 to 15664513)
ttggtagtgttttgtgcaagttgagccacatagaggtagtgtttcctcataaattttttgaaacttaaaatgatcagctaaataactataggtccatcttattttagctttgttataactgagaaatcatttgccaagtaaaaaacaaatctattttagatgttttgtgaaagatattaatgaaaagtgttggaaaagccacctaaattgcggtcattcttagatagagagggtgtgttgaaagtcccacatgacgggtaaccatgggcaaaaggggggacatgttgaagtctcacattgactaaagatagtgccgagataaattataaaagtggggaacaatcctcaccttacaagtaggttttgtagggttgagttaggctcaaattcactttctgacaaaaagaatgaaattttatcccaatattgtagatgcttcccaaaatattcccaaccgaagaaaattgctgttaagaatttctgtttttttagattattgaccacagttatcatttgaactctgcacagcgtggaagttcatcgggtgcattactggaaatcac

SEQ ID NO: 21217 - DNA, 518 bp, Glycine max
  Intron number 1 from transcript Glyma02g43950.1 (locus Gly ma02g43950) derived from phytozome v7.0 (chr-ID Gm02; pos 48633016 to 48633533)
atgtgagttttattatccctatttagtgcaatgtgtgtgggaatttgactgcatttgtgaggactattgttgttatggttttagcttatttgcttaaggtttaaatatcggtcacggtcgccgttgcattggacaaatgcggctgatgctgtcccaattggagggtcgcgctgcggtcgtggacagttaaaaaaccttgattttgcagcgcgaaccgttttttaaaaccaatgcttttgttgccagggattgtcaatgttaatatagaagcttctcttgtttgatttgtttgttttggtggttgattggttgtgtatttacctatggtttaggatatgataaatgtgggtgatacgttttgtgttctctgctgctgtttttatgatggtgacttgacatgaagattatcagtgttgtgtgtttattaatgatcctgaaaatcggtagatgtacggaaataaattcctatgataacttgactgattagattgttggtatcttcgtatttctgttccaga

SEQ ID NO: 21218 - DNA, 626 bp, Glycine max
  Intron number 1 from transcript Glyma02g36660.2 (locus Gly ma02g36660) derived from phytozome v7.0 (chr-ID Gm02; pos 42107748 to 42108373)
tgttctgatcgttctctcgccctcgtcgcccaaaggttccaactttctcccaaattccaatacccttttgtttttccttcgctaatcgatggtggccccaattgggtctcaaaactttggtcctttaagtgtgtgtttgggttatcatttgcaaaactgattttgcaaatttaattttggttaaaattgattttgaagtaaagtgatatatgtttgaatatttttattctaaaagcatgttagtatcaaaaagttgtttcaactcaaaatcaattttggacgagaatcaattcttcaacttggaactaaatgttacctatacctaaaattacattagctgatattttcatgtaatattgaatcatttaaggtgaatccaaacatgccataattcgttctgattgcttttgagatttcaagagtatgctatgatttttcttttatattaggactttgattctgaaattccaatattttaatttgtctgttaaatgcggggtttgtgccttccattgtgaataaaacatagcattggagcatttagcttctttttgtaaacttgtctctgcatttcagttgcccaaaccttgaggtgttgtttatcagaagctgtcctcgtgttaccg

SEQ ID NO: 21219 - DNA, 322 bp, Glycine max
  Intron number 2 from transcript Glyma04g06440.1 (locus Gly ma04g06440) derived from phytozome v7.0 (chr-ID Gm04; pos 4921396 to 4921717 reverse strand)
gaggttattttatcgttaagggtgcagagaaggttcgtctcttcagcttgttgtatttcaatttgtagtattcttgggttttgatttttgtaggtcttcagaaaatagtatatatactgatactgttaagtctgtaaaggtttttcagtgttaatccgtcagaaataaccatgtatgataaatttgttgagttttacaataactacttttaaggttatatttaacatagtttctgatttattgtgtgctaatgatatgaatttgttttgtgcgaaaaattgttgcagacttttattgcacaggagcaactgtatttaaagag

SEQ ID NO: 21220 - DNA, 968 bp, Glycine max
  Intron number 1 from transcript Glyma03g00640.1 (locus Gly ma03g00640) derived from phytozome v7.0 (chr-ID Gm03; pos 366049 to 367016)
gcggtatgtttcaatttttttttaacggcaaattttagttgttaatatgttagtttttttttgttagttgtaccattcgaatctctatcacatctttttttgttttttttttcttattttcctttgcatatttatttcattaccatcatcattttagttataattagttcctttcctccctagatctcttttcttttttataaaataaatttattgttgttatttttggctagcttctgttttgttatgtttttttggttcaagttaccagaacaaaacagagagaaaaggatacatatgaatttatagtgcttctgtttcaaaagaaaagattaaaggaaacaatttattaattttgcttttgtttttgctttctttttggtttcacatcccaacattaataccccaagtataacatgattgcaagctgaaagaactctaggtcttgctgatgcctatgattcatattatattaaaacattgtattctttttatagattttttttatcatgaagattttaattgttaagttgttatttgtgaaaaaaaaaaatctcatttttttaaatatttaacaagattttaattatgagatattttaaagaacgaaataatcagagcatgtagatcaattggtaaggttgtttgacttcgagtcttaaatatgcaactaataaagattatcttccgtgaaatatactagcaatctttaccaaagaaacaaaataagatttttctttcttattcttttttaatccaagggaagaagggatcagaaaattcagaatcaaaactaatttggaagatttttatgcagattgcagaagcaattgaaacttgtggcatctattcctatgaatatgattaatacttgtaagcatgtgctaaattgtgaggttctgtttgatgtgtacttggtgtgtgacctgattgtaggttgcatcacaacaaaggagcttgggactgtt

SEQ ID NO: 21221 - DNA, 472 bp, Glycine max
  Intron number 2 from transcript Glyma02g39970.1 (locus Gly ma02g39970) derived from phytozome v7.0 (chr-ID Gm02; pos 45181698 to 45182169 reverse strand)
aacacagattatccagtaagaacatttttctctgttatattgtttgttgattatggtagaaagtgacctgttagaatttcagttttgtttaaaatgatgaagatggatatttagccttgtttatttttacttctgggaaatgcacaattcattttattttatagtgttcccctttatccaaacaggactttagttctatacgaatgttggctaatgttttggtttggaatttggattcatgtggtgttatgatctgataagtattgtcgtgaaattctaatttgtgtttgttatgcgaacttattatgttttgtttccaaataaacaaagtttgatactttaatgtaaacactgactgctggcatacacttaaatcagcttagcccgtgttaatcaatcgagtgttgctaaagcattagaattttgacatgatgtagctgttgagaaagaactggaaactgcaatctttacg

SEQ ID NO: 21222 - DNA, 794 bp, Glycine max
  Intron number 2 from transcript Glyma02g08350.1 (locus Gly ma02g08350) derived from phytozome v7.0 (chr-ID Gm02; pos 6566060 to 6566853)
aagacttggtaagataccaatttatttacttatgatccttcatgtatgcttttgtttggaatttagctcctctaaagcaagaagacgtgtaaaatagtaaagacagaaagaatatatccattgttaatttaaagagtgttatatacaattcaaatgaattgtagatacatctttactttcttattttacacatctcaatttagaaaagcctaatcctttagtggtgcaacaacatatggattttgatgaagttcttttaaattcattttgtttgaaggatgcgtagataatagttgaatggactataactaaacaatgaggatctttcaatgtctaatccttttgcagctgtccttacccctttccctccttcgttcttcttattaccatagtgcatacaaatattgaacttccagtcatactagtatgataaaagacattgaaatttgaagctaatttttcttccgaattttcctcatgagcttagttgtctgcttagactgttggttatgtggttatgtacatctagttgtaatttcttggggctctttgttgccacagggaaagggaagccccttttttaatttattattaagaacctacttgtccatttatgtgtcaatatattttttgtttgatgttgaactgctacctggatttggtttatgtttgattaaatgaaatgattttgatattatcctcatcattgacacatttcttgtcatcttgtgtgtgctgcctgatatataggtttattttacgagtttaatttgcatggtttctgtaggtctgtg

SEQ ID NO: 21223 - DNA, 958 bp, Glycine max
  Intron number 1 from transcript Glyma03g04620.1 (locus Gly ma03g04620) derived from phytozome v7.0 (chr-ID Gm03; pos 4799861 to 4800818 reverse strand)
acggtcttagtaacaagcattttgctgctcctgaggtaacccattttgtgtttttttttttctctttaaaagctttttgatttgtacagtgacggcattgcacgagtgaaaaggttggagctttctggttttgaaaattttaaaaataaaataaattaataaataaaaattgggtgtctgtgttgtttttacttatgggaactctttgttgtatgtggtgtgatgagaggaaatgggattttatttatttatttttattgttgttctttttgttaatttgtgtaatggtgttttgtcgctctggagttcaaggtttcgattttgtttttatattatttggttgtttctattctgctgagtacttgggtggcttggatctgaaaaacgataatcatttatttgtagcttcaaaataataataatttgtttgtttgtttgtttgtttgttttctggtgctatgctaactgctaaaaaccctttgcggtgataatgaaggtcatatatatgatatcttcgctgggtttatttttgcagtctaatacttttgtaggaattttctttttagataaggacaaaacttaaaggcagttctttaagtgatttttgtgttgttctcttgttggaattgaagtttcatctcgataatctgcctaattaatgtttgcattaacgttcaatacaagttctcaaagtgaaactctaattttgattggagaacactaaaaaatctaagaaattgtatctgagttttgtcctctagatcattttctaatgcatggctaagagagtgaaatttggtattgacttataatagatactatagtgccgcatttttgtgtgaatgtttactttcagttctttttaagcatttgttttgagttatcttcacagttcacagtaaaactttttctcttcttttcagccgcatcacgcagaagagcttgaccctgaaaaact

SEQ ID NO: 21224 - DNA, 716 bp, Glycine max
  Intron number 1 from transcript Glyma01g03260.2 (locus Gly ma01g03260) derived from phytozome v7.0 (chr-ID Gm01; pos 2791300 to 2792015 reverse strand)
ttcgcttcacaaaagcttcgaatccaattcctcaggtaacaaacatttctcaactgcactcgatctatatgaatacagcaccaaatgacccacttgcagtaaaatactaaaaatcgaatcttttgcctttcgtgtcaactgggtttgtgtcagattcttgtctctctctcttaaaaaaatgatttttggtcgcaaaattgaagggattttttcaggaatctggccttttttttttgttttatattttctttttcatcgtatcattgcggaattttgactaggggtgagcacagattcctgagggcacagtgcacacgcttttgctttttatactgttattgtttaattttgttatctctattattttgcaaactggttggtattgcatttgttaagccatatgttatgttcctttaagtattctgttatgttcctttaagtattctaagtctgcatatcagtatttacttcactagttagcttgaattctgttattgaagaaatctaagttccttaacgaaaacacttcacatgtagtagagtagggtaattttgtggtgctttgtttcacgaggcatggctacgtgacagttctcatttttttttccttttccctcattgaactgttctggttggcaattgatttagtttgttggtttttttttttttttctctttcttattcagtaacatctgcaagaagtcttctccttcacc

SEQ ID NO: 21225 - DNA, 324 bp, Glycine max
  Intron number 1 from transcript Glyma04g33880.1 (locus Gly ma04g33880) derived from phytozome v7.0 (chr-ID Gm04; pos 39657549 to 39657872)
ttctcgctgggtatgtgttttattttttctacttttctaactaagcactttcctttcttcaaaacacacacaaaacaaaaaagcactttccttttgttgcttttacgtaccccctgtgaaacacactactctctaacttggaaattatttctagaatgaattttgattacgtgcacagggcttcacaatcgtaccccaatgactaaattaaccatatttttcatgttcagtgtgttttttctttgtgtattaactgatgatacctttggcttttgggtttctcttgcaggcctttgcttagtcttgcctatcctctgtaagtgc

SEQ ID NO: 21226 - DNA, 1045 bp, Glycine max
  Intron number 1 from transcript Glyma03g29400.1 (locus Gly ma03g29400) derived from phytozome v7.0 (chr-ID Gm03; pos 37399938 to 37400982 reverse strand)
cgatcgctgtaatcaggtttcttttcaattttctctctttccttttgattaattatagtgtagctatttgtttatgccattgcattctattccatgtgcattgctcttgccttccacgttatcttcgttatattttccacctttttcccaacacaaacgttattgtattgaaaatccctagtaaaattaggcagcgtctttctctctctcgtttttttttccccctcaggcagggtgattgttccataaaagaaaaaaaggtgtttttttctacaaaagagaacacgtgaaggtgttggagaattcacattaactaactagctaataaaataatatatataagtgaataacaatctccgtcctaagtttttgggttgattagacacaagctcaaattctaagacaatagcagaacttatttttgtaattgttatcaaacaacttgtaatgtttgagatgttcacacgtaagaaatgcgttagaaatctcacatgactagtgatatgactaaattgttgattagtgatataactagaattgtagatataagtaagataatccttaaggctcagttaggttcaaactcaatttataagaaaaggaattataaagtttgaacaaacatggatattgaagttgtatgctaaaaactgatagtttcttctcaggtgtgatattgaataacagaactatgtttggtaaggggaaaatagaggggaggaggagggaaatagagaaaaatagtgtgagtttcacttaggccttacacctcttattttgttattttaattcaaatatttctcttttaatttcatcatctctgccaagcagagcataaaggtaaactaatgaactactttgataagcattttgacttctcgtgtttactgcatttcaaatcttgagtactgattttgtcccagtatggaactgtggaatactattctcgttttcaatttatgagctcttggattgatctaatctaactttatctgctcaatttattgcagatatattgtttggagcaccgaggttatattaaaca

SEQ ID NO: 21227 - DNA, 320 bp, Glycine max
  Intron number 1 from transcript Glyma03g36970.1 (locus Gly ma03g36970) derived from phytozome v7.0 (chr-ID Gm03; pos 43772063 to 43772382)
aactcaccggcgtcaatcctctctctcaggaagtgcgctccttttgttttcgtttagctctctttataacctcattatttagttctggttaatgaaacaagtgaagagcctcttagttgcgtttcgttttgagattatacttctgtacttggaatcgcttgaaacgttttgtagaattacttgtaaacttattctagctgtaatttttctcttgtatgtaattagtccttttaaggcatcgtttgagtgtctgattttgtctatttttcgtttttctttgtgcaggcagctggtgctttgtcaataaaaattggtaagat

SEQ ID NO: 21228 - DNA, 704 bp, Glycine max
  Intron number 1 from transcript Glyma05g02490.1 (locus Gly ma05g02490) derived from phytozome v7.0 (chr-ID Gm05; pos 1845373 to 1846076 reverse strand)
cttgctcccttcaaatctaaccgctctcatcactggtaagttaccctataataataatatcatgaacaaggttacatatcatggtttcagttccattgatattgttgtgtatcaaatcaacagcattaccctctgatcttccagaagctgatcagcacgagtgtggtgttatccatcacttaattttgaatattcttttgaagagtttcttcttttcactttctttgtgatatacagtcataaactgtcacaggcatcttcatttgtacttgctcaatctccatttgttttgtctgtgtcagaaatcgctatccctttttttctaccgtggattttattaaatatgatagtgatttaccagctaagctttcacctgtggttttaaaactcattaatcttgtggcattggggaagttcgagtttcaaagagtttttactctgtaggctttcacacgtgagaacaccacctgtgatggtgtttcttttgtacattgttcttttattggttcatacacacgtgagaagaccaccacttgatgactctccaagaatattgtgaacacactatacactctataaagtatttgataattagtgagtgaaatataatgtgggattggcataattaactaatgaagttgtaattagttgttgaatttttaattgaaggtgcgacttctggtattggagctgaaacagctaga

SEQ ID NO: 21229 - DNA, 274 bp, Glycine max
  Intron number 1 from transcript Glyma04g35080.2 (locus Gly ma04g35080) derived from phytozome v7.0 (chr-ID Gm04; pos 41371772 to 41372045 reverse strand)
ttcattgcctaaagagagtccccagctcagctcaggtcaactctctagttgtttgttgcatttttcattttctaggcttagtcattgtaagagagctcccactttttctttgtgtttcttttatcctcttctgggtctttttctttgtggcattgggggatctgggttggtgttagatttgatttttttttttttgtagatttattaatttattggttgttgttgttgtttattcattgttcagagatagaaagagaaggaaaaaagggctatt

SEQ ID NO: 21230 - DNA, 448 bp, Glycine max
  Intron number 1 from transcript Glyma02g42200.1 (locus Gly ma02g42200) derived from phytozome v7.0 (chr-ID Gm02; pos 47279366 to 47279813 reverse strand)
caccttctacacaaagtaagtaatatatatcttcgttccaatatactttttcataactatttacaataaataataataataataaaatgaattaaacttctcatataatttaacatccgtttatacgattcaagtcttaattgtttttgagaatttttttatattgaacatatagagttttttctaataaaaaaacttctcaaaaacacttttagtcttgacaaaaagttggaccagagaatttctattataaaagttaagtataatagttgattttaagcttaccagagaagactatatcattttttctttttattttcttatcttataaatgcttagaaagaagtttatctacgtaggaattaggaagagcaacattgttaactagcttttgagtatctatggaatatgttttttgatacttttccttatcgcaggtcttgctgag

SEQ ID NO: 21231 - DNA, 448 bp, Glycine max
  Intron number 2 from transcript Glyma04g14250.1 (locus Gly ma04g14250) derived from phytozome v7.0 (chr-ID Gm04; pos 14133104 to 14133551)
gctcagtgtttaaacgccttcaagttagtaatccaaaaactgctctaaattatgatccatagcaatataaatgtttattctcacaaagaaaaaagtcataaatagttgtgcgttaatccataccatttaattagagtcattctagttaagtaagacaactttcacattctcaacaatcactaaagaagaaaataaaagaaatattgcatcatatttcacattcccaacagtcaactttcacattctagttaagttagttttaatttaaaggagtttgattcatcatattaatgttacctccttggttgaattttttagttttaacttttaagtacatagtcaaataaagaagaacaagagccacttggataaatttttcaacaaatttttttttttttttatatttgttgtaggtttggaggcttatcacaaatttcttctttcttgg

SEQ ID NO: 21232 - DNA, 847 bp, Glycine max
  Intron number 1 from transcript Glyma01g22510.1 (locus Gly ma01g22510) derived from phytozome v7.0 (chr-ID Gm01; pos 28240765 to 28241611 reverse strand)
gctgggtatgtacccttctcgtgcttaccatgtttgattattgaactctatttttcacttggattttccttctggaacatcatagtacaaattttttttgcaacaatattgttgttgaaggaaccccattttctttaatatgatctaaattgggttacctagtttcatgtgaaaaatgatgtcttttgtgtgttctggatgggttggttcatctctgctatgttctttgttctatgattgaaagaaaagtggaagttagtacatggggttatctagttttatgcgaaaaatgttagctttttgtgtcttggtggagtttctggttggtggggttatctctgcgacgttcattgttctgcaattgaaagaaaattggaaggtcttacatggggttatgtgaagaattttttattttttttaaaatattttggttgaatttgtgttgggttcattgctacctaccatgttgatagttcttatgattgaaaggaaaatgaaagattatgaaagcaattaaaagtttgagctttctattttggtttctttttacccttttgatgatacattgaatgcagagtgcactgttaatagtgaattaatggttttaacttttaaaatcgaccttattatttggtttaacttaatcgatttggaagttggaataccgagatcatcaactagtgtttgtttgtttttatccaagtttaaaggaaatgccagtccactgcatgatgtttgttgagttttgatattgattaagtgcctaaatctacacactggacttatgctgtcacggccaagtcatatattttttgtcttgatgatgcttttgcttatgcagaacatc

SEQ ID NO: 21233 - DNA, 816 bp, Glycine max
  Intron number 1 from transcript Glyma04g41440.1 (locus Gly ma04g41440) derived from phytozome v7.0 (chr-ID Gm04; pos 47279996 to 47280811)
gcagatcctacccgtctttcattcaggttagattctaatcatcgtgatactcaacaaaagctgggttagctttaattaacgttagtcaatcaaaaaattgtcttttattttttttggttttctgggttcagtcccatacacagcttgcgatcggatccggttacagtggattgacttataaggttttaatggttctgccatcattagtggtcataagggactttgaaaaaggttctggtttattataatctattatgagatgaagtgaaaaccaaataaactaaaaattcgcattcttttctttgatttgttacttactcaatcttctatcttgcttgggttccaaggttttcttcgtttatttttagtcatgctgcattaatttaatatatacgtagaagcttaaacttaaaaccagtttcaagttattcgtgcctgtcaatatcagggtaaccttttaccttcttttgtccctttttatttatgtttctggtctcctttactttgttgttctccacctgaataatattctcaagtttttaccttctaatgattttatgtcctctcttataaaataaaacttctgttattttggtctttcgagcacattcagtcaggctcaatggcagaggaattattcgtaattaagcattgaagagtcctttaattcctctctgttaattttcattgtaattgaatcttggtgtaaatgttgttaaactattaatacgcttgctattgtctttgtagtaaaattgttatttttattgctggcataattacccatgctcttttgcagttcaatctcatacctgt

SEQ ID NO: 21234 - DNA, 652 bp, Glycine max
  Intron number 2 from transcript Glyma02g39270.1 (locus Gly ma02g39270) derived from phytozome v7.0 (chr-ID Gm02; pos 44521010 to 44521661)
gtctacatcaatttctgctcttcctgctcatacaagtaattttcctcactttcatcttattgttagtattatcgtcctgctgtttttgaaattgttgatggcatttgattagatagagggaaaaaatgatgaaaaaggaatggtttttgagcttaactatctcacttagtttgtgggtaatgggggaattgacccaaaatatttatgtatggcattaaggttttggttaatgcatccagaatgtggaatcttatctgggttgtatatcatatcatgtgcttaatttccattgtcagtggttagatagagaatgtaatgtattgttctagttcattgcctttttttgttgctttgtgtttcttagcactctgttttggtacagaagaatgaacatgacagaaagacaaaaatttaaattgaatagaaaatggaaggaaagattttgaactttttgttcctaaaagtcatttttcctaacgtcaaaccaaaaaaattcattgttattcgctatttctcttcggtctattttcttcctttcctcccatccaaagatatggtaaagttggtacattgcatgcacatggttgtgattaggatggggaagttgatgtaaatggatgacttgcttgtgtgtaggggaacagcagtgaca

SEQ ID NO: 21235 - DNA, 607 bp, Glycine max
  Intron number 1 from transcript Glyma04g38310.1 (locus Gly ma04g38310) derived from phytozome v7.0 (chr-ID Gm04; pos 44701983 to 44702589)
ttcaagcggcattcaaatcacccactttcctcaaggttcttttcttccctttctccttttttcaacattgtaaagcttttgaccgttccgttattctaattgctagcttctcacacttttttttttcttctgttggctaactaagatttggtggagtcgaagcttacggagtaaagtgtgatttttttttatttttttatgaataaccacaggaagcataccagtgagacacttatgtgtgtttggtttctatttttaaaatctggttttagtttttaaaatgtaactactcaatgttgttcagtcagctggttgaggacgtataaggcgcacacaatagagtgtgaaaaacatctcccggttatttctctctcttttttttatatagtatttgttttggaaacaattttcaaaacctgatagatttgaattgattgttgagtaaggtgtaattgttttagaaaacagtttttaatatgaaaaaaggcaagggaatattttttcgttttagggtttagttcacataaaagattaaggataagtgttgatttaaaaggtaatgaataaaagtagttttgtaaatgtgtttggctaggagtaagaccaa

SEQ ID NO: 21236 - DNA, 807 bp, Glycine max
  Intron number 2 from transcript Glyma02g12820.1 (locus Gly ma02g12820) derived from phytozome v7.0 (chr-ID Gm02; pos 11068358 to 11069164 reverse strand)
gttgttgataccgagaaggatttgagccgggtatgagaatccggtctcatttgtatgttcaactttttttgttcaaagtttaggttattgtaaggttggttgggtggtaaaagaagaagggtgagaaaaaaaggttgtgggtttgattttcttgctaaaaaaactaataattaataattaatatttaccagaaaaaaaggcagataatcaaaattgaagtttcacctcgaatagccaatactaattataatatacaaactttttattacatgcattactaaggtaaaacaccaattatgattggagtataacaccaaaaacacctaaaaaaaactgcatctaactttgtcctttttatttatttatactatgtattaaaactatgcagccttgtgtcccttctgtggtattttgaatatacttttgctaataacgatgaacatcttaaatagatattggcttcccaggtagagcataggttactttgcttgataatagtatacacctatgatgccaccaaggttttgtattatggttacagttgttgttttgatatggaccaatacagtttgtgattacaatctatcatggttgcgaattgagattcatgctatactgagctatctgaatgaattgagacccccttcaagaaggaacaagactagaaaaaaaaaaactaaaaatgaaatgtagatgagaatgaataatgctatgatttcatttgtgtttctttccaacgatatttataattccaaaaatttacattctgatcaacagggtgaaaaactcctaaacaatcttggtggc

SEQ ID NO: 21237 - DNA, 583 bp, Glycine max
  Intron number 2 from transcript Glyma02g18670.1 (locus Gly ma02g18670) derived from phytozome v7.0 (chr-ID Gm02; pos 17519451 to 17520033 reverse strand)
taatagaggtatgttcaacaaataggaggttatttttttaatatctatagttttttttatcacattatttctggagttaattttgatcgagacataaatacaaacacttatcctattgaagactcaaactataatttacaatattatgggatactaatctcttctattagatccaaatccggttggtcatgtccttaattttttaaataagaaaaggcttgtatgatctcataaatgtttagatggtaaaattgatattatatttacctattttaattccctgagaaatggaatttatagttgaaaacattaatatctatatttgaaataaattaagaattaagatgtagtattgtaattctaaactaaattagacttctgtttgataattaataataatataaaagacttattgaattcttaactgactttattagtttttttttttcaaacatgtagatgaacatgcttaacataaaatggttcagccttctttccaaaaacataaatattagtgaatgatcttacatcctttttgttgtaaacagggagctctcggctatatcaagcttttgccacacaa

SEQ ID NO: 21238 - DNA, 1034 bp, Glycine max
  Intron number 2 from transcript Glyma04g39120.1 (locus Gly ma04g39120) derived from phytozome v7.0 (chr-ID Gm04; pos 45356613 to 45357646)
agtttaagacgctgttgctgcagcgattggagagggtacgtaacaaactctctctctttcgtctcgcatgtctccaacgagatttggctcacgtgaaaaatggcatatcacacacacacgtgaaaaaaaacattttaagtataatttttaaagtatttattatgaatatagtttaatcgaattcatagtaaattgctaaacttaatgcttaaaatcatgattaaatatatgtatgcgtataattaatagttaattaatgaatatttattttctaaagtgaatcaaataataataagttgattcttcttttaattttgtttgttaatattttctcagaacattaaaacgtggattgacatcaaatgaaaattattactcttatttttttatatatataaaagtaaacgaatatattttttaatcctaattttaagaaaaccaatgtcttaaaattaaaaaaaaattataaaaaatcgtatgaggagcgcatttaaaaattatagtgaaatacatttttaagcatatttccctttagcatttgccttataagaaacgtggaaaattcaccaaaaacaaatgtggacttatctttatatgtataattactttttttttatttactataatttactgtgaacttttttaataagacacatattcattccttaataaatacatttatttacttatcaacaatatcaatcacacctcattagtagaaaaaataatgtttcatcaattacaactggatcttttttaaaaaatacaattagtgtcgttaattaaattctagaatacttctcgaactgtttaaatcactccgcctagcaaatcacaccgtatatatggacaggcacacaatctcgatatccttttcagcgccgatacaccaaatttttattttgttagttaccctgaccgaccaactgtaatggactccggaaaacacctaaacactgtagttagggaagagttgcactttgattcatcctacttgaacttcttaattacatgatttctggaactttaggaca

SEQ ID NO: 21239 - DNA, 869 bp, Glycine max
  Intron number 1 from transcript Glyma04g43360.1 (locus Gly ma04g43360) derived from phytozome v7.0 (chr-ID Gm04; pos 48954890 to 48955758)
gctcatatcagtggtcttgtagcggctaaggtgatttgatttttctgtcttttctcttgtttctgtttgaattatgttatcgattttatggttgtttatgcatctgatttagttttctttggagtgtagaggcagttgtattgtatgctttagaactagtaaagatggagttgatagaacaatttaggtgcctgtactatgaaccaacatcttcagacttattcctgtcttatcgtgtgttcgaggaaagtgaaaataatttaacctttagctatagaaaatactagtaatggatttaggcctttggatatttttctcctataagtgtttatggagaagcttacccaaacagggccttagtacaattttttttttaccaataatgggtttgactcttctatagcgagggagtgtagtttagaagataaagagcagttgtaagtgttgtttagaaaatcaacaattgagattgtgataaaatgcatgctaatataatgactatgatgctgttaaaatctcggtcgttggaatttttaattaaacaattgtaatcttgctttatcatttagagtgcatcatcctcactttacagggagctaaatccactagtaatgtgatctatggagacaaggatacagatttctgtttagttgtagggattaggaaacaccaaaagcaaaattaaacgattgtaatcttgctttatcatttagaaatgaaggaatgccaaaactgtactgtcccctttatctgtttggccctttgcaaaaaggtttcgattttcctttgactgtataaatatgcttttaactatattaacggtggtttttacaggaagtagctagtccatttgattactgtgatattgt

SEQ ID NO: 21240 - DNA, 361 bp, Glycine max
  Intron number 1 from transcript Glyma02g41540.1 (locus Gly ma02g41540) derived from phytozome v7.0 (chr-ID Gm02; pos 46630405 to 46630765)
caaagcaaaaggcctgcataacgctgatatctttggtatatattaacaactacattacttatatcaaagaccaatttgttgttcttatttttcttttccttaaaaactcaaatgaatggataaaaagtttagtatatgtttgattcaacttaattgtaagaaacaaatgtttatattttcagttttctaaaagagttcttaacaatagacgattatatatttctttagaattaagctgaacttcatgttattaataatttgtccaaatggtactgtcttatttaacttttacttacctattctaagtttctaacaaggtttcgggttattaatttattcttttaccttgatgataggtgaa

SEQ ID NO: 21241 - DNA, 681 bp, Glycine max
  Intron number 3 from transcript Glyma05g02440.1 (locus Gly ma05g02440) derived from phytozome v7.0 (chr-ID Gm05; pos 1789179 to 1789859 reverse strand)
tgaacttgagtgattccaaagtgtcacatctgaacgttagcaaaaattgtcaagctagttcattttctggtattggtaagggtataatcatttgtttgcattgtaggtttttattttttttattcatgccttacttgtttttaatatttttttctgtagaatatatatgtgaattgaaaattataataatttcagcaaagcaaatgttggatgtatcacttatcactggcttaagtaaaaaatgtgcagttttgtttttgccaagtggctatatgaagttactttcatcttctcaacctctcacctgttctccaaaactcacccttgtaaaatcatcaacataaaaaatagatcaagcagtaaggaaacttcaccccatcccatctttaatcatatcaaaaagttcattcctaaaatgttgataatgtgactacaattggcttgcgtccactttttctttaccatacatgtgcaccgccctatctcctagatagcttaaggaacatggaagaggaaggtgttgttataggttctgtttattatgggctgctaggaacttactctatttcattgtgtaccttgcaggaactggtatacttaatttaacagctgttgcacacccaatcaagtttcatgctttatctagcttcttttttgtctacaacaagtacgggtgagtaa

SEQ ID NO: 21242 - DNA, 495 bp, Glycine max
  Intron number 1 from transcript Glyma0248s00200.1 (locus G lyma0248s00200) derived from phytozome v7.0 (chr-ID scaffo ld_248; pos 1600 to 2094 reverse strand)
ttgacttctctacctgaagctccttgtttcgcatagtatgtgcataaattaatatacaagttaatttgaggaatacaatatatttatatgttatgtaaatgtgactttcttattattagattttgatctttaaaaaaattaattttgtttattttgatcttcaacaaaattattatatttcaaatagtgtctatagttacttgatgatgatgttaaatgcatttagttataccctgttacatgtcacaacaaaatggttggtggtgcgatatgagtagctgcatgacattttataaccaagcgcattatatgaagtttttttcaacaattgtagagataaaaacaaaagaaaaaagaatcaaaatcaaacaagccatgtttagagtttaaaaacatgcccattcttaaatagtgtataggaatattatggccatattacttgtcacattaactaattttacagtaatactcattaatgacagggaggtagttgaa

SEQ ID NO: 21243 - DNA, 622 bp, Glycine max
  Intron number 1 from transcript Glyma02g45370.1 (locus Gly ma02g45370) derived from phytozome v7.0 (chr-ID Gm02; pos 49664766 to 49665387)
ggatcttccaagtaagatcaccttcctcttgtaatctatatataattactgaaagtgaaaactactttttaatttgtttttgctgcagcagataaatttcatgaattttgttatgattcttttcttcatatatatttcaataattaaggactagagtgtttgatatatataaattgaaccaaacagcaagctaggataattaagcttagttaaagaaagcatatattgtgttggagaatatataaacttaattaattagcaattttaattattaaatggataacaaaagagtaattaaatggtttaattgatacttaacattttgcaaagttttcatgtgaagatgtggaaactcaagcttcaataatgtgtaattggataaaatataaattgaaaagaagatagggatttggtgtatatactcatgatatgtaatgtgattttcaattctagctaggctagctagctaggtgtgcaagtagccacacgcccacaccattttgattttatgattttatagatttattgtatggattaactcatgatcaatttctaatctcaagtccttttttgtatgctggtaattaatgtatgaagaagtgagttcagtgggggagaagga

SEQ ID NO: 21244 - DNA, 845 bp, Glycine max
  Intron number 1 from transcript Glyma03g35650.1 (locus Gly ma03g35650) derived from phytozome v7.0 (chr-ID Gm03; pos 42787827 to 42788671)
tcgccggggaattgcttacaagctttttgttggaggtatgtactctctctttctctttcttttccacacactgaagaaaccactttatgttttgttcctccacaaagtgtaattaatttgtcctgttcaatttgcttttcttcttgttgtcgaaatcatataacttagttgcttactgtgtatattcgcttcctgctgtgaatgaaaagctagcttcttgacactaggtgagcaatagataaacttaattaagactcatacaaaaagagaataattagttaaaataattaaaaattaacttatgcataagcttatttttaaaagctctcgtctaccttctttgaatttttatttttatttgtctgccaaagaccttccttgaaagttgattttaacttatgcctaagctaattgtatctcacagcagaaactcattttacccttctttttttttttgcttctgttataattgtttattgaaaagttatccaaatagaaaatttcgttatttacggtcatcggaaaacaaaattcgaacctgaaaattgaaaaatggaagaagtttttttttttttttttcttgtttcctgaactgagcatgacctatggtcgagtgctgtgtcttgcataatcttttatgcctataaatgggaaatcacatttgtccaatcattatttaagttattaacttatgaaaagtatgcccgttgctgctgtttcaaattcttattaatttgaaagcatgaatccgtattaagtaattattagcctttggaaaggggttatttatccatggagctgtgttcatcattgtttttcaggattgtccttctacaccacagaga

SEQ ID NO: 21245 - DNA, 807 bp, Glycine max
  Intron number 2 from transcript Glyma02g07350.1 (locus Gly ma02g07350) derived from phytozome v7.0 (chr-ID Gm02; pos 5848024 to 5848830 reverse strand)
aattttacagtgactgacagaggagagacaatcacgtatgttactgtctcattcttaaattgttattattcttgcttgctttagatttttcttggtacctttctttcaatccatagttaggaagaaaaacgtatcgtttaaccgttcatgaaaagaaggggggagatggactttgtgaaccaaaaccaaatcacatatggaaattgctgttttttttttttttttatcaaagcttctcacgtgaattgtgagtatgcttatcagtgtaattttttaaagtgaagcctcaaatgtgtattagagaaacttaagcagccatgttagttcctaataatagaaagagtttaatttcttgcacggtagagatttttgtgtatattgttattataaacgtgaacaaatttatcacactagttgtgtgacaaatgtaattgagacagtctcagtacattttaatataattccaagtagtaatagtttaatcatcttaacataagttgttgcaaaaagccactgacaattgtggtaattagaaactatggtgaaattttgtcattttgaaggatcagttatcaaatctttgtaaagacaaatgtggagatacagtttttctctattttttttcagatttcccaacatttttttgtatgagaaattgagaatactcactggggtgccaagtacatgtcttctaacaaatgcttccttgtgagcaagttaaaacgttaaacctctcttcccctttttatgttttcatcacctatttagttgaaactaatagctattttcccttgcaggtttgaagga

SEQ ID NO: 21246 - DNA, 515 bp, Glycine max
  Intron number 1 from transcript Glyma02g07350.1 (locus Gly ma02g07350) derived from phytozome v7.0 (chr-ID Gm02; pos 5848883 to 5849397 reverse strand)
tctggtctctcatcaaacgttctgtcaaatccaaggtgattctcatgttgattttttttttgtttttgtttgagaaatgcagcactctttggccccactttatatttcatgttttccgctcgatattttgtaactttaactaataataagaagtgtgatagagattgtgttgctagcactacttgtttttgtttttgttttcatggtggcttttttctgttttgctagtttttgtttgagaaatgcgagaaaaaaaaaacacattctttggacacatgctctttgattattaattgaaattattagaaaaaaaataattttgaaaaattgatttttgtggtgctaacacagaaccaaacatacacacccaattaagttttaactaatagtgaagaatgtgttagagatggtgttggttgttctccttttgttgctgggtttttgttttgttgttgactattttggtggatggggaaatagattgtgcagaagacgtttataggtgaaggtgaaaa

SEQ ID NO: 21247 - DNA, 935 bp, Glycine max
  Intron number 1 from transcript Glyma02g18380.3 (locus Gly ma02g18380) derived from phytozome v7.0 (chr-ID Gm02; pos 17173216 to 17174150 reverse strand)
tggctataccgttcgagccaccgtactcgacccaggtctgattcttaatttcatcaacttaatttcttcttattctctaaattcacctgtttaaattatcaagataatatacatcaggagtgctctttgctctttattacgaaaatatttagtatgaatttgcacatgaataaattataagatttgatttagtgattgaaaagataatttaagagtttaagagagagtcatagaagaagaagattctaagttcgaatttatccactaacacaatcaagtttctttacgaaatccgaattcgtactattcagtgtctttgaatatataatataacgtgttatatgtagtttatagcaatgaaatgataattatacgggagatgtgggaaattagttttatatataattagttatattatgaaggtggatgaaaggaataaaattaattgtatattagaataatttaggaataaaaaatatatataataaaatggataattgttataaatgaatacttatttttcttttagttatatgcatacaattgaatatatgcgaaattattaagggtaaaataggcaaaaataacatgaaatcaaatggggttataagattattgattttattataagtatagaagcgtaaattattaataatatacatgattagtatagaactatagaatattacagagtcaatcaccaattttgaaaatataataaccagtcatcaagttggttcttaaaattaatatagtggaaaaatggtctttaaaattatatattattaatcaatttagtttttgagattgtaataaacagtcaaattggtgtctaaaatataataaaattaaaaaataattcctaaagttgtaaattattatttgtatagattattacattacattaatgcttatgcatgtgccctgcagctgat

SEQ ID NO: 21248 - DNA, 877 bp, Glycine max
  Intron number 1 from transcript Glyma04g38830.2 (locus Gly ma04g38830) derived from phytozome v7.0 (chr-ID Gm04; pos 45156949 to 45157825 reverse strand)
aaagctttcctctccacgctaaacaaatccacaaggtcaactttgattgccatcgattctcacttttctctttacctgcttcttcttcttcttcttcttcttcttcttctatttaataataataacttgtacgtaactgatacataaccgtgatcctcgctgattcacgttaatcggattcttccgccattatggtgtcgttttgagtttgtgatcattgatattgtcgattggatgcaattgtggttgtagaattctcgatccttgcatttttctctttgcttcaccgaaagtcatcgtaattttagcttcgatcttaggagcaaatcaagtgggacgcgaaacaccttttgcttgtgtttgtagttattgtagtcattgttgacgtgtgaatgatggactagctatgtatgcttgattagagagaagaggtgtgtaactttgcgtttcgatttcagttatcaaatggttaggtattacaagtggatgcaataaagtgtttatagtggtgttggactcattactggtgatttacccggcaattagtgctgtatgtgactgctgtgattgctcgaatgttgtgatttaaccagagtttggctttgccttgggaataattagatggaagttgtgataaatttgattttgaacaaaacataatgaaaatgttaaattgttgacacaagttactgaataatgccaccagagtacatgctcgtgatatttgttttcccaagatattttactattggcaatgaactgttatcgcttctggtgctgtgattttcgttttaattcattttaaccttatcgctttacctctattgtctattatttatttaattatcctgttattgatggaggcaggcctgtaatt

SEQ ID NO: 21249 - DNA, 759 bp, Glycine max
  Intron number 1 from transcript Glyma04g38370.1 (locus Gly ma04g38370) derived from phytozome v7.0 (chr-ID Gm04; pos 44771916 to 44772674 reverse strand)
ccgaggactccttgccgaacaagcctaggtcaaaggttaaaccgtttctctgttgaatataaataaatatactaaaatgaaagatgatggtgtatgagtatgtttgaagcgttgttgatgattttgtttgcgattctttctcgcacgtagggctgtttagttcatagaggcgaggctggaaattcgtgaactgcagcttgtttgatctaaagatgaatgaagatgtgatttgagtagataatattagtaactcttgtcataacttggaaataaggcttgtaattgggatatggggtttgttttttagtgattaggatttaggagtgttagatttgtgttgtttatcttttttgtggttgtatttgtgtacttgaggcttgagattaggttgtttgtggctttttggtagtaaggaaaattatccaaccaataggctttatatcaaacatagacaactagacaagtcataggattctagttaatagtttaagcttttaggggagttggtccttgatgtggtatcaaagcttctattatcaagtggttaggtccattctgcatgcttgaaatgaattgtagcacaaggtagatgggcttgtgcattttccatgcattgaggccaaagggcttttgagttttgggcaagggggattgtatgaaaccatgcatatgcttctgtgtgaatagaaaaatgaaaatatctgctgagctcattttgtttcaggtctcagaggtgagtttacgcttgggcaaagctgg

SEQ ID NO: 21250 - DNA, 433 bp, Glycine max
  Intron number 2 from transcript Glyma04g34120.1 (locus Gly ma04g34120) derived from phytozome v7.0 (chr-ID Gm04; pos 40097423 to 40097855 reverse strand)
acattgagcaatacaaggtatgatcaaaagttcaattcttttgcgattcaatcaactaattcagacaaaaaatcataggttaatttctttgattttattctccccggctgtccctcttactttgttttttttatctatttaattcggtatgttttgtttgtttattctgaagggtggttagctttatatagggtaacccaaataatatgaattgacgaagaaacacaagcattgatcaaatttatcccaaaattatctttttgttttccatcacattcgttgacttgtgtccaactaatgatttattgaataaaatgacactacgatgaaatttttttccccttatggtggtgtataaggaacattaacaatctacttttcagtaacaaattgaccaattaatgttctttttcaccttgaaacgttttgcaga

SEQ ID NO: 21251 - DNA, 591 bp, Glycine max
  Intron number 2 from transcript Glyma02g47160.1 (locus Gly ma02g47160) derived from phytozome v7.0 (chr-ID Gm02; pos 50839816 to 50840406)
aggtgagaaggagacgtgaccgaaagaaggaggtaagattctcccctcactacttacttgaaagttgagttgctgaatcggattaatttcttaccttaccatttggtacttcttctgccattgaggggatcaattgtagtggatggatcttttatctatctgtttatcctctatattgaagtctatttattattttgattgttgtgagctgctaggaaagcatcatgagttgccattctgttatcttatgagcactatcattggcagactccatgttgagattctataagaatccttgctttttatgaatgtttgatcagttgtggttgttataggtttctacttcctgcctatgacgaagtgtgagtgtgagattgtgcgatattatttactgagagtaaaagacttgggtcttgttttataattgcttgtatatgtttttcttttatctgtgtgttttgtaattgtgtatatgtccagttataagtaaatgttcttgtattaccccatctttctctccttgatatttttagtagcctgagtaatttgtgttatttttattgttgcagggattgagcagcagggcttctg

SEQ ID NO: 21252 - DNA, 945 bp, Glycine max
  Intron number 1 from transcript Glyma03g00930.1 (locus Gly ma03g00930) derived from phytozome v7.0 (chr-ID Gm03; pos 639945 to 640889 reverse strand)
taagcttcattttgttgagaaggagcctttgttaggtagggtagctctactagtttggttactattatatcaaaactagatactattctatatgttctttcagtagttttctcctaaattggagtttcacctcaataatgtgtttaagtaagagtttattttttcttattttcaaaaaaaataaagggcatttgacaaaaatagaactaagataatttttaactcaatttaaaaatattcttacattcattttcaaaaaaaaattataaatttgaattttagttttaaaaaaacacttttttcctacatttgacaattaccatttccaatgacactatcactaacacgggcaataacaccatcatcgctagcattgctctgtcaccatcatcattgacattgacttgttgtcattatcactattattgacactacaacagtcattaacactattatcaccattattattattttgctatcattattatcatcattactatcttcaccaaccgtaaccactaaaatcaccaccatagacatcattgagattgacactgtcattgtgtgttatcaccacaaaaacatatccttaattaaaaactttcaaaatgaatttatttagaactaaaaattagagaaaaaactacaactaaattttaataacttgtttgtaaaatatttaaaactaaaactaaaaattgattgttagttttcaaaatcttggaaacctagaactaaaagccacaccaaagggaccttaaagttttcattaaatgtcaacccgatttctgatatgaaattccaattttaatcagagaactaccaaaaatacctacaagacagtgtcaaagttttgtcctaccattacttgatgatccttttcatggttctatgttttttctatgtgactgattttggttgttgattggtttttgacagccactt

SEQ ID NO: 21253 - DNA, 961 bp, Glycine max
  Intron number 1 from transcript Glyma04g13520.1 (locus Gly ma04g13520) derived from phytozome v7.0 (chr-ID Gm04; pos 13169799 to 13170759)
tcaatattttattggatcatactttgcttggccaggttacaaagaagcaggcactactaaaaaaaaggctttctacatcgcttaattaacattggttattgcaaaaaccgatgttaacgaaagcgcggtgacatttttgtaaataattggagttgcttaacatgggttttataaaaaccgatgttaactacttaatgttaacatcggttatttaaataaccgatgttaacatgatgttaagatgaatatgttaacatcggttttgtcgaaaccgatgttaacttcataatgttaacatcggttttgacaaaaccgatgttaaggagttgaagtgaacatcggttttttgagaaaccgatgttaccttgttgatgttaacatcggtttttagaaaaccgatgttaacatattcatcttaacatcggttatccttaaaaaaccaatgttgttatgttaataagttaaaacgtgttgaaatttcacaactcgcgcgctcgaaaaccctgttgcactttctcttctctttctcctcccacctcaaatctgctgaaaatcgctcagtcgacacccacattgccccacattgatttcaatactgtcggaaaccgctcgctggaacccacagaaccccctatcgaagaaaagtcgaagaaaagcctacactgttgttggaactgtgggtcaaagaaaaccctacactgctcttggaatagtcgtgggtgctcaaaggtcaaagctttctacgctgccagttaacaaggtatgagctctacgttagtttgttgctcttcttagtaagttcttaatcagtgtggtgggattgtccgaaggttcttatcaaattattgggtcattttgtccacttggctaaccatataaaagtatcaataagaattgtaatgtggggtttcattttgttgtggcagttgattgtgctttacgtcgttttcaagcttgacga

SEQ ID NO: 21254 - DNA, 742 bp, Glycine max
  Intron number 2 from transcript Glyma03g28370.1 (locus Gly ma03g28370) derived from phytozome v7.0 (chr-ID Gm03; pos 36264348 to 36265089 reverse strand)
accgacttattgtatcagtaagttagtttgtgtttgattttgatgtattttggttgaacaatcacctttttcctcctaaaagttttgttattaagatcttggttatatttgaatggaaaataaactaatacaaacacccttattaagatctttatttaaattgaatcaaaatgttgcagttcttgttaatcggcaaaatgaagtgttgattggactttcttttcccttaaaattttgaaagcctcaatgttattttgatcaatttcctcctttctaattcaaggatttgattttgtggatcttaaattctatttgactcatgctatatgttcgttctaattcttcaacatgttcctagatggtataggttcattcatgtctttgatctttctgttttacttcttaaggccctaacaaaatctatcataacaagatttttttctctatttattgttgtttcatataaattattaaaagtatgagtgagaaagaatggggacatataagttataatgttctaatccatacacacaatggtacttttattaattaatctttgctgacattatttattttttatctttgtggcagatcattttgtacactgcattgcatccatacacacacatttgtttcctttaacaactaatcttcttctcattctgcaccaaatgtatatatatgagatctctttttcatgaatgcagtcatattgtgtggagtttatcatcttggaaggaga

SEQ ID NO: 21255 - DNA, 499 bp, Glycine max
  Intron number 1 from transcript Glyma03g28370.1 (locus Gly ma03g28370) derived from phytozome v7.0 (chr-ID Gm03; pos 36265282 to 36265780 reverse strand)
gtgtacttcatgaatggataatccttgaacgttttattttgttatttcaagtaagtcagtaacatctgttgccatatatacttgaatattttatgtaagtgtgcccaataaacatcaaagtttaattgctaggaagaaaaatttcctccaactagataatggagtgcatgctcatatacttttttgcttatttaaatgcgcgacgaggtcctgtgagtggctgacaaagtggtcttgctaccacaaatcaacccacgtcactttgattcataattaaaataaataaataaatctgcttatgcttactacttaacaataaacttgagggattgaaaggttgattttaggattgaagttttcttgacacatgattcatccccagcctctccaaactccaaagtgttattttgcttataaatatccaagtcctattcctttatttatatttctaactggtcattttatgagataattaacactttacctgggcaggggatta

SEQ ID NO: 21256 - DNA, 1006 bp, Glycine max
  Intron number 1 from transcript Glyma04g06760.1 (locus Gly ma04g06760) derived from phytozome v7.0 (chr-ID Gm04; pos 5213585 to 5214590)
gctgaggataaggtactttccgggaaaaaaagttcattttttttcctgaccttgttgttttggttggtgagaaagatgagtgacccacatattggagagttaaaaatgtctttgtggtttttgttgttgatgttaggagggtgaagctagagttgtctgagatgtgtaatttttggttctctactttattttttgctcagttaacaaaggggagatttgggtttgttattttggagaaattcggttttcttgctgaaaatctggtcttttagcttacaccagatgacccatttggtttattttcgtattgatctatgggtttctgtgaggttttatcgttattttttttttctggagaggttctgaactgggttgaagatttgtatgttgccgacacttatcgtaatctgatgacgcttgttatgatcttatgttgatgttggaatttcaaatgtcgtcgatttggtttttttgtttgtcatgaacttgtgatcgtttgccagttattcatcagatttgttttatttttattttgtttttggtttctgattctgattaagatatttttatccagttttttgtactctgctgctagctgttgctttgttttaatttattttagcatgcagctcgtcgtgttcatttagttcttactttcgacatagtgctgctatttttcttgtttccctgtcttccctttttttagcaacttatttccactactggatttccgtgatatcatccttaagttgctaacctgatttcttccccatgtttatatcttttaggaaacttcattttttgagttatttgatgtgctgttgaaatgtgatgctttaattttgtattgatcattgtactctttagttagtgttttttatatgcatgccaaatggttaaatgtattcttccaacttttatcttcctagtgaaacctaaccattttaaattactacttattttgtgaaatgttaaattctaatatcaacccttgtttaaacaggag

SEQ ID NO: 21257 - DNA, 833 bp, Glycine max
  Intron number 3 from transcript Glyma02g40730.1 (locus Gly ma02g40730) derived from phytozome v7.0 (chr-ID Gm02; pos 45959812 to 45960644)
taacatttaaggcttgggtttgggctgctgcaacggttagttgttttttagaaacctagcctttgagagatggtagacctgtgcatgctaaaagtagttcatttataaacattcaattttgtttttctacaccatctttaattttctttattttaattttggttaatacttgataataccaacataactctcccttgtctgaacctgtactcacatctaagaaattgaaagacttattttgactaatctattttaagttgtcctgcttaagttaaattatttcaactataagaaaaaccaacaagttttattgaatattgattaatttatatagattgatacatcagtttctgccttcatgtatattacatgccttcaatgccttcattttatcatttggtcacatttgaactttaaaaaatgtagatatcttctcagacgatgcatataccgtgggatgaagctgggtgtttatgccttgtgggtgacttgtttaattatgatgcacctggaatggagccatctggcattgaggatttagagcattttctatctaactcttccatccatgatactagcttattaaatggagataataatataatggtagatgcagaccaccttgattctcactcagagattaacagatggttggtttgaggaagatgttaatgcatattgcttttattctagggcacattacaagaaaggagatcaggtattacattatttctagaaatttaaaatggcatgtatattacatgccttcaatgccttcattttatcatttggtcacatttgaactttaaaaaatgtagatatcttctcagacg

SEQ ID NO: 21258 - DNA, 450 bp, Glycine max
  Intron number 2 from transcript Glyma04g09610.1 (locus Gly ma04g09610) derived from phytozome v7.0 (chr-ID Gm04; pos 7890723 to 7891172)
ttgttcgccttcacgaggcatgagataattgctttctattttttgtaattaagggcatgtttggcttcttttctaagttgtcatccaatttcgaatcatgattttcagtgtagtatggaatatgctgttatgttaagtaggggtttagaagtgtttttgggaagtgcaagcaaaaccagaattatagaatttcttttttattttgattgtttggacttttggagtgagggattgttctggaaatcatattttgatatttgagaatcttccttgattaaatgaaaaaaggttttaaaagaagagccgtgccgactcaatatttgctgataagtgagaagtaattattaatgtttctcttgttagctgttgccactcacaagcgcttgtttctgttgtgaaacgttgttttcttcaggttcttgcaagccgtaccaagatttatatcatatt

SEQ ID NO: 21259 - DNA, 664 bp, Glycine max
  Intron number 2 from transcript Glyma02g17340.1 (locus Gly ma02g17340) derived from phytozome v7.0 (chr-ID Gm02; pos 15632390 to 15633053)
gagatttgaagctctttggtacgacatatacattattacaaatatacattcatccatattaagagtaatattaacaacacactcttttaacaagttcataacacatttttttattattattgattaaagctgattgtaaggtatattatcatgagtgtgatttactaattaaataaatgccaagtttggttcttaagcatgctaataggaaaaattttattgagagagaaaaaatttactttggtgatttttatttaatctcatcatttctgacaattaggatatcttgttttcaagaagaagaaaaaaaagtgaaactcaaaaattcttttgtttcccaggagctccttagttacagactggaactccctttttacaaattttcttaagttctatccatggatttggtcttatccctcatgtgggttgtatttctttttcatcattaatgtattcagagttgggtttgtttggagttgttaggattagagtgttaagatagttgggatgtaaatctctacttcaggtccatctccctcttttgctaaaagaaaataaattaaaatttagtaatacctttggctaaatctgtattggtaagaacattgaactaacaatttgaaacacagaatcaagagcaataactcagtacatcgttcacgag

SEQ ID NO: 21260 - DNA, 1015 bp, Glycine max
  Intron number 1 from transcript Glyma04g06420.1 (locus Gly ma04g06420) derived from phytozome v7.0 (chr-ID Gm04; pos 4897122 to 4898136 reverse strand)
acctccccggcgtcgctccacaggatttccagaaggtaacccttcaatttgaccctaacccgtcaattggttattttctcgttcctcgatccgtgtttgaatctgaagaagtgagatctgagttggattggatcgatactaggtttttctttttcattatgaagttgtttctattttgttgaagactcgatagaggagctggaaatggtgggttatatggagtgttgagttttagttttattagatctctttgatgaagaaacgttcacttcgtaaggccgaaagagttggtgcttttttcgtacgtttgtttgtttctgtttgtgtatctattgcttcctgagagatttcgaagtcaaattttttatttatattacctgtcttgcgttttatcggtcacagtttggttaacattgcactgtttatttttattgatgaattaatcctatgatggatgctttaatttaaaggatgttagagaattggacttctttgtagaggcgtgtagctgtagtacctttattgcacttatttgtattgacaaattgatgtaatcggttaaagctttacagaaaaaaatactaacttttgtctcttgagttttgtcttctatctttctagtatatgtaatctgttttcatttcacctttgtttactaccacgttatttttataactttaatcttcccctcctttctgttgtttctaataataaaggatatgtcatcagattattttgcacagttgaatttcttgcatagtatcactttgaaattttgttagcaactacaatggcgcttataaaggatggaaaaatctatttgactactgttgtgtatccccttctaaagaattgcctgtacccctacctgtctttttgtcaattgtacccttgtaagctggacaaagtgaggaatattctgaattaatgatctacttcgcaagtccttaactgactttttacttatttctttgctgcagggagattcattgcaagtgaaagtaaataaattaac

SEQ ID NO: 21261 - DNA, 1054 bp, Glycine max
  Intron number 3 from transcript Glyma02g17130.1 (locus Gly ma02g17130) derived from phytozome v7.0 (chr-ID Gm02; pos 15441620 to 15442673)
aagttaagtttgaggttgcaggttcgattcccgtggtaacaaaaactactaaactaacaattaacatttgccgataaaaaaaaaacatggtatccaaatttaatcactattttgtgttgtggaaacataaaggcttgattttgtggttgtgctgctgttatgaatagtaactaggtagctatgctaaactacactaacaagtatttcataattcttctccttcatttccattcacttagtgcttatttatacatataattgtttgtctactagtgagaatatttgcctaacagaattgcactattgcatactgggtaactaattctgttatgacctgctgaaatggcctgtgttctgttgctgaattgctatcagctgcatacctgataattgagttgaaaatatgaatgtgctggggaatgagagttggctcgactggtgggactcaacaccattgacaaataggtcttgaatttgattgctggttgcatgcttcctgagtcccaacctgggaatggggaaatttccactggtgtgtgttagtcattggtatattgtaattacaaaacccaaatggttgttttggttaaaatatgttggatgttgatcaatttagtaaacatttgctggaatggtgatgtcctataccaagaatccctcctctggaatttgccttctctttacttttagttttaggattttggccattaaagagtaatttcccattttaggcatagaatgccaccctgtaactgtggcggggaaatgaggggatggatataatgtcagaagaggcatttaaaacaaatattagagaaggacatattctatgaaagtggcagttcttttttctggtggtatttaagagatacttgagccaaagtgattatttctccttgcatgattctcctaacttcaaataattatatgatttcaggttgaacagagtattttacaagattcggctttccttaatgcagttgtgaaggtgaagttcaactcttatatttgcggttaagaattatttttattttgtctcaaaccattgtatttg

SEQ ID NO: 21262 - DNA, 632 bp, Glycine max
  Intron number 2 from transcript Glyma01g35030.1 (locus Gly ma01g35030) derived from phytozome v7.0 (chr-ID Gm01; pos 47606333 to 47606964)
ctttccctgctgattactctgagcttctggaacaagtaagtgtttcattgtcctccctttgcaccaatcttttgttcattgcaacattcaactttgatattgatggaccgatgtagtggtggttttgttaatttgttatatgtcaatcctgtgttgatcgacagagcaggtaaattttactgaataaaaaaggtttgattttcgaacctacaaatatgcaatttttgtagtcataatctaggaaatattcaaatatttcatcagtctcctttacataaacatttatttggttccatctaatgttgctatgtaagcaatttgtaacgtggcattcctatgtggcaacacttcgaaggcatttttttgtaacagaagaataaaaacagaaagtttcgacattattgggattataaacaaaagaaagaaaattacaaagattaaaagtgaaaaaaagtagtatatttacaagaatggaaaaggtatttaaaccaccctaaacaatattaagaaaaaatggttggatttgtatcatgtacactcagacacatgctaattgaacactaagattggtgtctttgttattgaatcaaccaacaggccagagtagctgcagatttggctataaaggataa

SEQ ID NO: 21263 - DNA, 430 bp, Glycine max
  Intron number 3 from transcript Glyma03g36110.1 (locus Gly ma03g36110) derived from phytozome v7.0 (chr-ID Gm03; pos 43122013 to 43122442)
aactttcgtcgagtaagttacattcactgtgtgtatttgttttcgtgttttttatgttcatatacatgcctttacatggtaaaataattggttattagttataatagtttaatttatatatggatgagtctacagctatacaatatacatcttctaactaataatctaatacttattttgaattgcttggggttggagttgagctgagctcaggcactgagctttttttagcattgattaaactttaattgaacaagacaagcttgagcagatattagtgctctgctaggcaccacttgtttacagtgctgaaatgtgttgtaaaagtgtgatgtcgaggtagtttagttctgtcattgtctaagacttggtttaattgacgaatacttttgtaggttccgaataccaacatacaccatcctggtttcgg

SEQ ID NO: 21264 - DNA, 367 bp, Glycine max
  Intron number 2 from transcript Glyma02g45610.1 (locus Gly ma02g45610) derived from phytozome v7.0 (chr-ID Gm02; pos 49806041 to 49806407)
gcaacggtaagaatatcaccaaacccatgcttccaatgagtgttgaatgaccttcttaattttaattttaaggattaaatatatttttagggtgatgtttgtttttttgtccctctaaaaaaatcgaatcattttagttcattgtttatagaaatgtgttaggtgttttccttgttcttcacaaaaatgtctcttttttggtcattcgtttatggaaataggaaccacacatgacacactttcatatgtgatagaccaaaatgagatgattatttttttagggattaaaagtgagcatcatttcatttgcaggtctagaaacaaagtttatttttagttttaaattttttgtggggattatttgtag

SEQ ID NO: 21265 - DNA, 713 bp, Glycine max
  Intron number 1 from transcript Glyma03g25200.1 (locus Gly ma03g25200) derived from phytozome v7.0 (chr-ID Gm03; pos 32241436 to 32242148)
tacaggtattagctcaattttaattcacttcaggtcactcaaaccactttcatctgtttatgagccacctagtgataccccagatgctgattcttgttgatttgatcaactttttatgttaaaaaaaaaataaattacactgaattttcatatggggcataagaagttttgtttcctttttctatgttctagaccttagtcttttcagatctagaataaagttacgataattatttgattagtttgagaattttgttgatttttttttctctactattgtctggattaatttttttaacattttattggtatttgattcgtacaagtatttatctgttttggtagatgattaatctttgttggagaatttaactgaccatttttaatgagattttttcttttcaataacgtttttttatccataactcaaatttaaaaccttatttaagaaaatcggattaagtttcacctcaactaacaaccaacctattggtattgtcctgattaaccttgtgggattcatgtagttggttttatttattcattgtctgatccatgtaatatacttctattaatgaaaaagaaagattatcattatattctggattaattgaaaacttgatctaattgtttagatttctaatttctaataagtattttggaattgttgctatgcagagggaacacaccattttgtagcaaagagtgcagac

SEQ ID NO: 21266 - DNA, 630 bp, Glycine max
  Intron number 1 from transcript Glyma01g06810.1 (locus Gly ma01g06810) derived from phytozome v7.0 (chr-ID Gm01; pos 7214962 to 7215591 reverse strand)
aggttagtgcttctaaattttcactggctaaaatgttttgatatttcatgccagtcatatatctgactgaactaaactcttgataaggagacttttatttgaatatttaaagttcgtagggttggcgcagtggtgtaaggttccattgcgttcaaatgtggaaaaacgatccatttagcaggagaatccgtattcaattttctccttgtgcaaaattttcttaggccagcagcagtcatgcaccgcgagcgggattagtcttgagactttaacccaaggggtttggggtcacctgtggtctttgacccaagaacaaaataaaaaaccgattacatgtcaagtaaaaattagccaataccatagaaacaagtataggttcaaaaccatatagtaatttctcctttatcaacatgatcattttacgtaaaatttcgtttctttgcagtctcccttctagctgatagtagttggatgcatgctcataataatagctgcataaagtagtttttcattcaactaatatattttcacatattgtataaaaccacgattaaggtgctcataattattatccgtttatatgaacacttaccagggattcgaaaataccaattcagaagactcaatctt

SEQ ID NO: 21267 - DNA, 951 bp, Glycine max
  Intron number 3 from transcript Glyma02g37050.1 (locus Gly ma02g37050) derived from phytozome v7.0 (chr-ID Gm02; pos 42380584 to 42381534)
atgtgagccttgatagaggcttttctttctacactcaacatatttcttcatacacctaatagtgagagaaaaaaaactgaaaatacccttacgatccattaggtctcaaacctataaccttcaagtggttagcatgacattttaaccaactgagctaatagactagttatgttaaaaaataattaatgtctctatatataacactaaaaattctaatgtatatttaattcacatataagtttacgtaatgaattttataacaattaattttgatctaataatatatattttacatatataaattttaaataaaaatcataggtttaataaaaatttatatatgtaaaaaaatacattattagatcaaaattaattgttaaaaaaattattatgtaaacttataagtgtattaaatatacattagaaactttagtgttatatataacgacattaattattttataacacaataactttgatgcaagatatctacaaactaaagagataacccaccaattgatatcaatattcggcgttctgatacacaagatcctcctaagaggcgagtatagagcatactagttgttgagagtttcaaatgataaccattatatgaatcagagtttcagagaaaagagaacttttagaagagagacattttagtaagaagagagtattattggattcagtgtgtcttaacatacagactcatcctctttatataggagaggattcgaaactaacatccaaaatcttatccatgaaaggataaaagtgtcgtgctaataacacaaaggtcacgggtttgagacctgcatgggccaatctatatggggctatacagattgtcaatctgtatgggctatacgtaaggacaatgttggaattaataaaaagttgaatgatgtatatgagatttgaatggtgtaggaagaaaaaattcttgacagg

SEQ ID NO: 21268 - DNA, 90 bp, Glycine max
  Intron number 1 from transcript Glyma03g22440.1 (locus Gly ma03g22440) derived from phytozome v7.0 (chr-ID Gm03; pos 28713402 to 28713491)
atattgtaaacattgtcaatgattacatgtttacattgattcttggggaggaaaaaacttatttaagttttgattctcttctattagttc

SEQ ID NO: 21269 - DNA, 1070 bp, Glycine max
  Intron number 1 from transcript Glyma02g37670.1 (locus Gly ma02g37670) derived from phytozome v7.0 (chr-ID Gm02; pos 43023333 to 43024402)
acgcgctgcgcaaggtgcaaagcggttcattactggtacgcttttgatttcaatttcttctatatgcgcttaggttttcttttttctttgccatatagtgttgcgtaatttttttctttctgtcgggtgaacttggcgctagttaagccattaggaatttatgaggtgatagattcaaatttaggtgcctctaatgtagaaaaataaaattgcaaaggaaaaaaagatgaaaactagtctctttttgcttttaaatactttctttattgctgtgtgctggataaagatatttcattttaggtgtttattttttgtttttgtgctgtaatttgttaactgtatggtgtttgcaattgatttcttggttttaagtgttgtttttgtggagtgggttttgtgttgtgtatgtggccacgatatgcgaagtttacttgtaagccgcggagaaagaacatgcaaaatctgtcttggtttgaggttggaatttgccagttggtccattcttgagtaggatcaacgtttgcaagatcagttggttgtttttttctacaaaaaaaaaaaatgatggggtattgtgggtggaaataaaaattatgtaagttttggtatgagcataaaacagaacttggagaagagtgtgtgtttggagtgcaatatgagacatatgtatagcacgtcacatccctgtccaaaggagaaactaccctttaaagctttcagagatcacgtataaaacacaagttccccttggcaaatgcaaactcaaatatacgcttaatgattttcttctcatgtttggaggacaaaatatgatagctggaaattttgcgatcatggtctctcttttttaaagactatttaggtgtttggattttgtgttcttgcagtttgtttagtgatatagcagacaagacggtccaatccatattacttagtttttaattcattgttattttctgcatatttatgtcttttgtatttttttaagaaagttatcatgttaatattgcttacctttgttttcatgtgttccagttctggaaagtgccaaattgttcattggcgtcaag

SEQ ID NO: 21270 - DNA, 567 bp, Glycine max
  Intron number 3 from transcript Glyma05g01860.1 (locus Gly ma05g01860) derived from phytozome v7.0 (chr-ID Gm05; pos 1322786 to 1323352)
agaatcattcattgtcagggatcacagaggagaatgtgagtgtatatatatatatatataacccttatctgcttagatgtatcaagctaatgtttcatatgctatcaaaatttacttttagactaattttgaaccctaaacggctgatgttgtttatgatatgaaataaaaagaatgatgaaatgttgaacagcacaaaatacatgcaatttacatgaatgtgatgggtttgcataacatctttctatgtggataagatagtaacaaaatccaggatacatgcatgctgtttactagtcttgatttattttattttttattccatatccatgtgattttcttttggtgtaaataaattaattatttaacttgcattctgtattttgttttttgaaaagaattgaacgtgtaaaaaactgagtccctatatcacagtaaatttatataatagaacatatttgagcttttcaagtcacttgtcaaaacaagagagggatttgaacttagtttgaatgtctatttttggctgcagtgtacaagaagcaccatcctcctagtctgtctgat

SEQ ID NO: 21271 - DNA, 507 bp, Glycine max
  Intron number 1 from transcript Glyma01g19820.1 (locus Gly ma01g19820) derived from phytozome v7.0 (chr-ID Gm01; pos 24221421 to 24221927)
cagcagcagctggatcattgcttgttcaaggttcgttcagtttttataatggttacgggaatgtttcaatttgttcaagttttgatgtttatgttttgtttttaacattttagtattgagttattatattatttggtatttaaaagtggctacttttattgccttgatccctgaaattttcatttgtataacagagcaacattgcctcaaaaaaaaaaaaaaaaaaaaaaagaaaaaagaaaaaaacaaagcaacataagttgtcacatgatgccaagcttttaaattgtgattgcagttttgttgcaatcctcaatgttacaaacagggacattgtggctgtaattgcggttgcgaagccttatttaaaatcttgcttcatagaacgaagtttataaaaaccttgctttatggaaccaagttatatataaactcctttaattttcctgggtagtactttgttcgaagattaggtgactgactgatgttttcacctctcgtgctaga

SEQ ID NO: 21272 - DNA, 586 bp, Glycine max
  Intron number 1 from transcript Glyma02g47730.1 (locus Gly ma02g47730) derived from phytozome v7.0 (chr-ID Gm02; pos 51231029 to 51231614 reverse strand)
ttgtcttgtgttttcttggatcagattcagttcaggtatgtttcccctttctctctccgtatcaattcaagttttgtgtcacttcgcctccttccatttcttatgcccgttaagcaatgcccactactttgcgtttcaactgtttgatcaaaatcgccaatgatttcttttccttttttttttatttttttattttttatcgttttacatatttttggcttcatctttagcagattattgcccccatgatcgtctcctacctttgcctcaccactcctccaatagttcacacataactcatcttccagtttttgggttgctccagctgtttttgaatattcttaagtaattttgcatttttacatgatacatataaccagtggaagaatgttgaaagggggaaacgtttatatttagttgatattttgaattttgcatttaccaatgaaatgcttcatgcttggcttctggtttgataatacagttttccaatgtgaatgggagtttgataatttttttgagatagttgttggtttcttgagttatatacttgtattaacaaggattatattgcaagacagataat

SEQ ID NO: 21273 - DNA, 315 bp, Glycine max
  Intron number 4 from transcript Glyma04g05710.1 (locus Gly ma04g05710) derived from phytozome v7.0 (chr-ID Gm04; pos 4360900 to 4361214)
agttaaacagttgattgctctgcatcaagttcctggtcagtttcatatgaaagacgatatcttccctttttttatatatttcattagatgttattgctctgtggattttgcactctttacggttgatacataggaatgttctggtttccaagcagattatttacaaatcaaatttgttacattttcaatgggttctcttttggaagctctcggttttgttcatgggagttgtcacttgctgctctattcagtctattgtgataatgccttgaagttgttcaaacttttcttatgcagatatttctgtacctcgat

SEQ ID NO: 21274 - DNA, 772 bp, Glycine max
  Intron number 3 from transcript Glyma02g36480.1 (locus Gly ma02g36480) derived from phytozome v7.0 (chr-ID Gm02; pos 41959907 to 41960678)
atcattgtaggccacgttgctggattttgtgctctgtgtgcaatacagaatcatgttagtcgtgcactgcaatcgactgggagaatattatccccagaggatttggttgggaatctacgatgtatccttatgtttggtgtttgatgtatggttgaacaaatatttttcatttcctatatctcattttagacatttgataagaattaagccaccgtccaaaataatctgcttcatttttgcatcttcctgtgttttgtgcttgtattcctttgagctgaggagaatggttggcatggaagtttgtttacattgagcatgtacttctctaatccattaagtttctaacgaacttcacatctttccatatgaatatatcagaaaatacctgcttattgaaatttgtttaccaacttatagttttgcccttatgcatcttcttaggaacttctccgttgctggtttacccttttcatcttttgaatggaaaaggaatgcatacataatttattattcttacagctgataaggtgacaaggctaggcaaattgttgtttactctgtctaaaagctgagtatgatgccaataacaagatttcatgtgtttgattctgttagacgaggtataatactgtttttcaagttaactagagagtttattacttggttttattatccatgaacaataagcactattccctgtccctttcctcttttatttgcttgaaatttgtaattcctgacatgagatcaggcatatcaagaaatttccgaa

SEQ ID NO: 21275 - DNA, 617 bp, Glycine max
  Intron number 2 from transcript Glyma02g04440.1 (locus Gly ma02g04440) derived from phytozome v7.0 (chr-ID Gm02; pos 3597996 to 3598612)
ctaattgctcttcctgagtccattgctctttgcaggtgtgtttcttgcttgttctaaaatcaaagtttattctgtataacaatataaaatcatttgtgtatcttcatctagtagtttaagtttttgggcataattagttcttagataaatgatcaacacattctttaagacactctttttaacatactcactattattgattaaaatttattgaaaactaaaatgtcatgagtgaagattattaaacagggagcaagacctacagagttttgtgttttcaataaatttcagccaattatagagtgtgttactaacatttcacttagttcataacatgagcctcttttaccaagtggtctagtgtttgattttttgctgcctccattgtaatgaaaaagcatctatacacaagcacaaggtaggtgagcttgtgtattgtcatcactgcaagcccaaaaggctcttgtgtgagggggcttgttggaaatataatataaaatcattcatatattttctcctaatagctaacttttgaaatggttcagttcatgacacttctattttgtgcttctgtgaagtttttctttaatgcaactgtaggtcactagttgaactgg

SEQ ID NO: 21276 - DNA, 479 bp, Glycine max
  Intron number 1 from transcript Glyma01g34270.1 (locus Gly ma01g34270) derived from phytozome v7.0 (chr-ID Gm01; pos 46582500 to 46582978 reverse strand)
ttgccttggcagtgttgattttgtttcatagcttggtgagcttctagagctgttttttttttatcttgaattttgtgatttttgaggttctttgagttttttgatttgttttataggaaattcagtgtaagaaggaaagatgcttatcaatttgtttgactttagcttgttaattaaaagtagctgcaaatagttgttagttaatagttggggatcatgatccgttttttggtttatgtgatgagctagagtgtgatgcattaatgatgatactgaagagtgagttttctgagaaacatttgagcttggtgttcgaaatgtgtatgtaggaattcattttgacttcagccttttgtcggatgctggagcgtggtttaaagttatatagttggtttgatggattgatgaggtgtggttttttggtgtgtgagtggagtggtattgtaatttggaattttctcttgattttgcagttggtt

SEQ ID NO: 21277 - DNA, 991 bp, Glycine max
  Intron number 1 from transcript Glyma03g40260.2 (locus Gly ma03g40260) derived from phytozome v7.0 (chr-ID Gm03; pos 46060182 to 46061172 reverse strand)
ttactctgctcaatctcgcttggtgctttctccaggttcgttttcgttcttgtataattactcggtttagttcactaccattgaagtaaattgctcatttctgtgccatttgccatcaaactttttcataggaagcgagtattttttttttctttactatttattgctcttattctgtagcaggatcttgcttgaataaacttttcaataaacatttacatgaagagagagagagagagagagtgaattaagctttaaaattagcttatatataagttaaactccaacttttggagaagccaccttatttgtgtataagctaattttaatttatgaaaacgtttgattcattttaacttttttttctctatctggtaagtgctctttaaaaatttggcttaattattcatttgttttctatactagcaccatctttatgctttggaattagtacctagaatacctactttagtccttacagattcacttttgatagttttaataggtaagtgtcttaattttgtaaggtaaaattgccataaaatggaaattggctgtgtaaaaccaccataaacattttggcggttagtaaacagccacaaattggtctcataaattaaaaaaatgcttaaaatttgtggcgattttatccgccagatagtttatggcagttttacgccgtcaatttccattttgtggtgttttaccatacacacttgacaaagggacttaaacgctataaaaaatgcatgtaggggctacaacggataatttttaggtataggaaccaaaacgtaaaaatagtgtaaatataggaaacaaataagtaattagaccggaaaagtttattcaaataggacctagtttatgtatgcattgcattttgattttttctaatgctcgtatctagtttactaggattttctataccttgacttgagctagagtggtgagtgaatatatgctttatttgatttttggtgactcaggc

SEQ ID NO: 21278 - DNA, 956 bp, Glycine max
  Intron number 1 from transcript Glyma04g38750.1 (locus Gly ma04g38750) derived from phytozome v7.0 (chr-ID Gm04; pos 45087599 to 45088554)
cccagagacgcaaactcgcccaatatcaacagaaggttaccctcttttcccccaaatcaatttatgcctttgtgaattgtgactgtgaattctattgttataagacaatagggttttcatagggaaaatatgatcaggacgagttctgcctctaatattagttaagatataaataaatgaatttgggtcttttggaattctttctttgttatagttagaatgaataaatgttgggctttctgaagaaatggttgtatagtatttgtatcctatccttaaaattaggcatattctgctccaagctaatatgccatagaacttcaaacactgcacgcttatattataaccttcttaagagcatcccacatttagtgtccaatcatgtcttgaacaggattgtttgtttccgaaggaggatacatgtggaaaaccaaaaaaagaaaaaaaaaaaaaaagaattgctgcaagctcagtggacagatcctgcccttataatatgttccattcaaattaatctggtaaccgcctgcaaagtaaagaataaatgagctgaactgtacaagctagaccaacacatttttttaatcattagcatgctctgtatttttgtttgtatggagcatgcttctaattgaaattgtatggtggtatgtgagcgtacatgttaactgcattcttttcatgcatatgtcttttgttgtgaagtgtagtttttcaactgtttccctttaggttccttgttcaaattggctggcaaataaacttcaataaaatgctattaagtatgttaattgtaagactagtcagttgagaatgtcaatgatgcttacactttttttgttgttgtcaacgatgatagagcattttatttagaatataagttctgccgtaccctataggatatgttgccttacttcagttttatttttcttttttatttcttgttttccagctag

SEQ ID NO: 21279 - DNA, 875 bp, Glycine max
  Intron number 4 from transcript Glyma02g11600.1 (locus Gly ma02g11600) derived from phytozome v7.0 (chr-ID Gm02; pos 9788008 to 9788882)
acttattggctattgattcgatatcaggtaaaaattcgaaatacctaaaggtagtaaagtttctgttaactaccattctaccaagtcaaatcaatgttcatgtaggttgatgggaatgattatggattaattttttttcttctgatgtttgtgctgtaattgacttgttgttgagagattgaagataccatatgttttatgcccttgcttttgttagagagacagtagtttttgttttggtaggtgaggaatgaggccaatggtacttcaaattatgtggagctttgggagttttggtttggtttggtttattttaaaatattttttactttagaaaatcaagaaaaaattaattcttttgcccaatagctcccttacttattggtatcttatctaaatatttaattaagaggagagttagcaatacactcctaacatattctctaatattgattaaaatatattggaagctacaagatcatgagagactcgttaaataagaagtgagacctataaaaagtttatttccaaaaattttggccaatagtaaaatgtgttgctagcattcctctttaattaattagcaactatgcaatggttagggtattttagtcaatgaagactattttatcatagtaagtggtgcaactaataattttcttatgatgcgtgcatttttttttttttgatcagcttatgatgcgtgcattaaccttaattgacaaataatttcaaatgaagagagtgtttaactttattgccaagtcatactgaaattccattgatgtgcttaatcaattgaaacaagttctctacatgctgctgctaagattttactaattgttatgcttcgcttttaggaggtcctcaaagtg

SEQ ID NO: 21280 - DNA, 583 bp, Glycine max
  Intron number 3 from transcript Glyma01g29670.1 (locus Gly ma01g29670) derived from phytozome v7.0 (chr-ID Gm01; pos 39990005 to 39990587)
gagctgattttctaggtatgttttctcaacttaatccctttttattattgtttttatttgtttcaaatatacttttttggtagtggttgaattggaattgaatatttgttgcaatgccattgtcactgatttgttatcaaactcttgctccctcataaaatgggttgtttggtctaactgaacaatttgctttattttattttgattttgatttttataaataatgctgaaaatatcacctttccttttctactttaaaaaaagaacaaagtttacatgtagtctcgtgtttttggggctcttctcttgtcagaattagagttgcacatctttaatctatgttgacttttaatataaatttttattatgcggattactaaaatgaaattctaattttaattgaagaacaacaccaaaaatatatatatggaactgcatctaagttttaatcagatttcattttgtttagatttgtacaacaaacaggtcctttaaagtggctacactatgcattattcacatgctattgtagctactttttaattttaattttatctaccttaatatatgattatgattgcag

SEQ ID NO: 21281 - DNA, 851 bp, Glycine max
  Intron number 2 from transcript Glyma04g41350.1 (locus Gly ma04g41350) derived from phytozome v7.0 (chr-ID Gm04; pos 47203942 to 47204792 reverse strand)
aagatatcagcaccacgaatctcaaatacattctggttcgtatgtttgagtttagttacttttacttttaattaacgccattattttatataatcaaggaaaatgaataccaccatgaacctatttaggtcgtgtttggaagagttaaataggtgtttttacttcatagcaatagagccatcgttggagaaattatttttaactcggacactccatcaaaacatgtcatgtcgtgtcgtgtgaggcagtaatgtgcagttaggttaagtttatgatgcttttagagtgaaacttgaaccataactgtttcatgctgaaaatctgttatcaacaaaatccaaactggaggaaaatggttagtgaagattctttcaatatggtaattgaaacttgaactaactttacgtgtgcctataggggctttatttcaatttcttgttgaatggtttggattgccatgctcagctgctattcagcttcttgaaagatttagtggtgggtttactaatggaatgagtttcattacgggaatgcttgtttttatgctgttcccccctgagcaacagaaaaggaatgtgcaacaattagtaccaacaaatccaatcatcactatgcatttcttcccctgatttgttgaaccaagtataaggatatgtataaatgtggtaaggctagacatatgcaccacccatgggatatttgcttcatctgttttaacttctaacttgtacagattggtaaagataactgagtagttaatacttaacaatgatagccttttactattttactaatttcatgtcataattacctcaggtgccattttatcttgcggagttgacagaaaaaat

SEQ ID NO: 21282 - DNA, 857 bp, Glycine max
  Intron number 2 from transcript Glyma01g29280.1 (locus Gly ma01g29280) derived from phytozome v7.0 (chr-ID Gm01; pos 39356444 to 39357300 reverse strand)
cccttctagagtggcttttctttcggtatcttgtttttctttgtctctagaagtctgtttatctgtttggtatttgagcaagtttttcttttggaaaataagataatggaaactggaattgctaggtcttagactcgagtaattttcttttgtgcaaccattgtgacatgatgtgggattacttactgtgcttgtggttgtgggttgatgtacattcttaaacaaatttcgggaaattgtatgccttttatttgaatccattcattcagaggtcaaaataggaggttgagagaagggtgggtagaaaatttggaaccaaaataggagggtaagccctggtgcaagtgtgcaacagtaaagttgtgtcttggttacttgttggtcattgattcaaatcctgaaatagtctctttgcatatgttagattccgtacagtgaccctccttcatacctttgcaatgtgaggagcctttggcactggggtatgttagttttcttgttgctataatattcgaaggacttaaaatgaaaagaaacacaataaccccttctattgcttgaaagttttcactgatttgccagccattcccaccatatatatacctagcaccaaccaagtgaaaaaatcaaaacctttccacatttgcatagcactatttctgtttggtatcctctttgtatcatgcataaccctagcaatgtcctctttcacagtttctgacattgtcttgttttagccacgtgcagcactactaacacttttttgatgtattccagtccatgttaagaagcaatgatctttaatacttgtacttgtaacaggcttttaggtgataagtcacccttttctcaacaaa

SEQ ID NO: 21283 - DNA, 474 bp, Glycine max
  Intron number 1 from transcript Glyma01g29280.1 (locus Gly ma01g29280) derived from phytozome v7.0 (chr-ID Gm01; pos 39357465 to 39357938 reverse strand)
gcacgaaacctgagacgaacaactccatttctcaggtaaccgctcgatcctttaccgattcgcatttgacttttcacctcgaattccttccacgtatattgtagtttccgtgaatagatatgcgtctcacagtcaggcttgactcaataccgtcgccggcattgtaattgcgagtgcggtagatccgttttgtgcatttgccaatatcaaatttcagatttctcatttctgaattgttccagaatttgattttgtttcggattcttctggaaatacggactgcatttgaaatgtgtttaaaattgtgattcactttgtggttttattaattttcagatctatggactggtgtgattgatggtgttcgttgagtttgtttttgaaattatcctaatattgtctcgtttaatgttagtgtattttccttttctcttttcagttatttgcttatattttgagaggagcacaaggaac

SEQ ID NO: 21284 - DNA, 175 bp, Glycine max
  Intron number 2 from transcript Glyma02g45960.1 (locus Gly ma02g45960) derived from phytozome v7.0 (chr-ID Gm02; pos 50059318 to 50059492)
cttcaaacgctcgagtacttgatacgtagacacaagtgagctgtttatttgatttcaataattcaacaatgttgttttcttcctaggggtgttgtgttgataatcacattttggctctgcctcttttacctttttttgtgatttttgatggggtttgttttgagtttcaggattc

SEQ ID NO: 21285 - DNA, 509 bp, Glycine max
  Intron number 1 from transcript Glyma03g38290.1 (locus Gly ma03g38290) derived from phytozome v7.0 (chr-ID Gm03; pos 44641160 to 44641668)
catccaccccctcgtgcaaattcaggtatcatgttacaaatttcatgaacataaatagctgaagtttaaaaattttccattccataaacatagtgcttacaagcataaccgaccaatcaaatgtttaaaaataatcatacttaactattttaatacatttttttcattagtaatttagtactatatattgtagccccattagaaaaaatgataaaatataaaataattgaatatgaagaaacattgatgtaaaccctgattgagaaaaaaataattacattgaaagaaaaccaataaacacaatgaaaagagtagatcatatagtttctaatcctcctctaactaatagggaataagggagaccaagaaggagcatgagagaagttgttaagagaattgttaatgcaattagtattgttatcatcgagtgtacatgtgagtcaattaaatatggaatattgattttcctctcaggtgacagaatttggttgcgggggttctgtgatagg

SEQ ID NO: 21286 - DNA, 768 bp, Glycine max
  Intron number 2 from transcript Glyma03g38290.1 (locus Gly ma03g38290) derived from phytozome v7.0 (chr-ID Gm03; pos 44641730 to 44642497)
ggggaacaatcaaggggtctgagagtcttgggtaatcagcactctttgaaacaaaattatttatatccataaaagacataaaagactatgagaatagaataaagattacataaaaaaaataacaactaacccagtgacttgatacatcttgtctatgtctaaaaaatcatctaaaaaagtatttcatcatcatcaaaataattataaaattataacaagaataccttactcaataattacaaaaaatgataacatttttataaagatatttttttcgaataaaatacctttgttttacaatttttcttttctcatactctctctttatatgtgtctttttcactaattatcttctttatttacaataaaaattatcatcaacaataataaataacttttcttgaaagttgaaacaaaaataatattcattcaaataaattttatttaataaaatataatcttttactttttatttaaccttaatgataaaaattcaatttttattatatattaaatatatcttatctttttatttgaaactctaccttaagaaacctagcattgagccagtgtgacacagagacttgtttccatctcctcaaacaatcacaccccaagaaactgcattattgtcacctcaaatgccaaactataaactagagcgtgctaaaatagacatgcccatggatcaaatcaaccgtgtgaagcaagaatttgaataagcaacattggattcatttgctcagcctttgagattctagccgcaac

SEQ ID NO: 21287 - DNA, 366 bp, Glycine max
  Intron number 1 from transcript Glyma02g09710.1 (locus Gly ma02g09710) derived from phytozome v7.0 (chr-ID Gm02; pos 7673694 to 7674059 reverse strand)
aactggttttgatctttggtctcctaggtattgattagacttataagttattgtacaactctcattccaaccgtttgacagcatcattttaaactttgatgtcatcatgaaaataattcatatttattttgtctgtttcattccaactgacctagcaaaaatgataggtatccatctttgatttgtaacttttccatacagtctcattaaggttttttatcacacaattgagtgtaatgcatggaacaacagtaacttccaattttacctgctgcttctattttttcaaatttattctttttttgtcttgatccctcactgatgctctctgttctcttcctttctataggtaacattgtgtcattc

SEQ ID NO: 21288 - DNA, 462 bp, Glycine max
  Intron number 1 from transcript Glyma01g02400.1 (locus Gly ma01g02400) derived from phytozome v7.0 (chr-ID Gm01; pos 1974876 to 1975337 reverse strand)
gcctctgcctctctgcctcagtttctgtgtaactggtaatcccaaatggccttttcattaattttattctctttctgtaatgttgatacaatgtaattgtgtattggtgtatgttgtggatgatcatatgatgtttgtttgtttttgttacatgagtttagttgaaagatttaatggtttccttccttttatctcttgaaattttctcgttgaccaacctgtagataatatttgttcttttatattagttattgtagacccttctttaaatattacacctttttttttttctttaagattactgtggagaacatgaaataggggaaacaaattttgtggatcatgttttatcgctccatcttctattttgactgcgaagtttagacaaatatgtttcagaggcactttaatttacaccaaaatgtttctgggagattgctgtttttcagtttaaattgagag

SEQ ID NO: 21289 - DNA, 473 bp, Glycine max
  Intron number 1 from transcript Glyma01g32120.1 (locus Gly ma01g32120) derived from phytozome v7.0 (chr-ID Gm01; pos 43503553 to 43504025 reverse strand)
gaaagcttggtctccatcaggtcagctcctttacttcctacactaccatggtttgcattttcaatgcgagaaagaactcataaatatttggatattgtagacgtgtcccaagaaagttgaaaagatatcatagatatctgataaattcttctcttccaacattcctaattttcacttgtggcattcctttttttttgttttttatataaaatggaaaggacatttgttgaacattttggttgaaatcttgatatgatatttggttgttctagtcagtgtggtgattgtcacattggtgtatctgcagattgctgagtactgaagcattaagctactgtcttatgcttctggcataaatgaatgctgttttatcgagtatctaatgtctcatccatttattttgttagccattctttgataacatggacaaactctcatgcttctatcatgaaactactcggtgcaggataacg

SEQ ID NO: 21290 - DNA, 600 bp, Glycine max
  Intron number 2 from transcript Glyma01g44730.1 (locus Gly ma01g44730) derived from phytozome v7.0 (chr-ID Gm01; pos 55289730 to 55290329)
tacaggtaattgcttttttctgtatccatccccataaacaccattggtattcaattattaatactactatttttggtaatattctaggcacgaatgcatgtcaagttcagccagttgattttggaacgcaaatctagtcagcatgtaggatttagatatgaattaacaaaaaattaacctgtttgtggagtacaaattttaatctctgcataaaatttaatgtgatatcataattcaaaactgtattaaattattgatcacttgatgggcgaagttttaacttttaaattgcctgcctcctcttttgccttggcttcggaccgcatggcagagttaaattttctataataatggacgtataatttttctcgttcttccatctttggtctatgtctcaatagcattagcatgtcaaaagacattgtatttatccatcgactattaactgatgacaaaatattgtattttgccagcgtgattgtttttggataaaaagactgatcatgaatgaaattaagtgaaaatatgttgactaattagtctaaacagcttatgagtgtgattataattcaggggtgagagggcattttgcagccgtga

SEQ ID NO: 21291 - DNA, 506 bp, Glycine max
  Intron number 2 from transcript Glyma01g03420.1 (locus Gly ma01g03420) derived from phytozome v7.0 (chr-ID Gm01; pos 2915781 to 2916286)
gaaacaaagatacattcaaaagaaacgaagaggtaattgtcttatctaataacctaactcttagcttatgagatttagatacctagaatatctccttcattccccccatagtaaaaatcagaaaccaatgatgtctaccagcaaatttttagtttgatcgaaaagccaatctgagtcaaaacaatgcaatttgagccaagtgaacttacttgagacaaggctttgtcagtgcttattttcttcattcaaaaaattcaaaccttaaaaccttgctttactgagtaccttgccacttagaccaccaaacattggttgtttctgttgcatatttatatgatagtccctgtcctcagaatcataaatattgtatatgaactcttttatcttttgaagagcttcaccttgtcctttaaagaaattgaggaaccatcacgagatacagcacaacaacattaaggatatactgatatactgatctaaatcttcattctggttttcaggttcaa

SEQ ID NO: 21292 - DNA, 934 bp, Glycine max
  Intron number 1 from transcript Glyma02g02340.1 (locus Gly ma02g02340) derived from phytozome v7.0 (chr-ID Gm02; pos 1714823 to 1715756)
cagctcagagctccagatccacttctggttggtcttagatcattaccctcgttctgatttttcttctttttgtatttttttaaggcttgtgattgttatcggaactgggtttcatagttatgtgttgatgatgttgcaaggatgtaaattttttaatctcttgatcacatgggttggataaaatttgacatttttctcaaactagtataatatatggaatttttgtgtgtggagggggtgttatgtctttttttttttttgttaattttagtgtttgtacatttcagcttgaaatattactatcagggtttggattattcgaaatatcatccttttctacttttatgattatgggttttttatttttccttcttcaatttttacgtggatttaaacgttaccgtatagtctgactttagacatgtattgttttgagaattgaagtttggttggtttttataagttgtctgggaatcgtgtgaaataagaagttgagtacgttcccatatttatatctgaagttttataactttatgctttttttttttatgttgaaaataagcgttacatcagaatggtgaagcaaacttttaatttaattataagcaatttaaattttaaatggaggagtttggagttcataaagtaattaaagtggaagatttggttttgtttttctgtgattatgtgaattgcgtgttgaaatcatgaaattgagttataactaaagaaatttgctgttgtgatgcacaaagtatgaattacttgttcagaaatgggttctactttctagtattgttgaatgttgatggttaaatttgaaacctgtttttttttggctacttgcttttgtttgtgtagtgacactatggattaaccttgtttcccttttcttttagcatcaggaatctcaaaaactactccttccagttta

SEQ ID NO: 21293 - DNA, 490 bp, Glycine max
  Intron number 2 from transcript Glyma02g35400.1 (locus Gly ma02g35400) derived from phytozome v7.0 (chr-ID Gm02; pos 40199420 to 40199909)
tctgttcttgcttggataatataacttgcttgaaggtttgaaatacaaaattattttgttcctagacaaacgaaagcaataagttctcagactaattctttactattaagagaaattcatgtgagacccctttaaattttgtgggccccacttactatttaatgggagccagcgccacatgaatttcattcaattcaatagtagagaatgtgttgttacttgttagtattcttcatattccaattaggaatatgacaggctttgaattttaaattacacttggagccattttttgtacaatattcaagtctgtgcttagcatttagtacttcatatgtaaggtgtaaaattattgaataaactcaagtttatagatgagtttatttaaattagtaactatagccatttaaaatgaattgcgtttatttgttttcaatcattagttatttagatgtctaagaaacaattgaatggacaggctgttgttaca

SEQ ID NO: 21294 - DNA, 926 bp, Glycine max
  Intron number 2 from transcript Glyma01g01590.1 (locus Gly ma01g01590) derived from phytozome v7.0 (chr-ID Gm01; pos 1198447 to 1199372 reverse strand)
aaccccctggcagtatttttcatttttcagttaaggtattttttcttgattttaatatcttttaagttttacctaagactcaaatgtgtgaatttgatgttttttttatttggatccactgctttgttacatgaaggttgaaaattttacttcactgttacggttctgattttgaatctgctcagaatagaagatgtgtatcttttaataaatcaacagtgtattggtattttgtaatttgtatggaaagttggaaacctaatcgataatcttcctagattgtctgcatcatgcatcacatcatgatggttctcagtcaaaaaagctttggtcaaacagtttggccccgttgggagttttaaaaactgattccatgtaagttctgaactgtgttatttataactagtttggaaccgaactgattcggaaccggttctagaactgctttcttgaccaagctggttctgaaccgattcattgaaatcctaaccggtttatgaaccattaaaaatagtttggttatgaaactgaatcacattatcagttcggttttccatcctgaactgaaccatgccccaccacaacttcctcacatcagaggttgaactgcactagaaaagctttgcaccaagaaacttaaagagttaaaaacagactttttttcatgatttattcactttgtgcttgctttactgaaagaatgcttgcaataatggaaatggaaaatgagcagtggtttggttcagtttggttttctataccagacctaactgtgatgaaatgtacatgtaatcatattatttttaattctcatgattagttttataatttatttttatgaatgcaacatagaaaagtctcgtatataactttgaggttccttccttccaggctccagctatcatatttgggttggttttttaata

SEQ ID NO: 21295 - DNA, 545 bp, Glycine max
  Intron number 2 from transcript Glyma03g05430.2 (locus Gly ma03g05430) derived from phytozome v7.0 (chr-ID Gm03; pos 5687522 to 5688066)
gttgacttgactccagatattccaagtgtgttttggtattacctattcttagtttccaaatcttacaacccttttgagtttatttggttaaattgtctaattaagccatattcattaagaacttattagatgagagcttcttccaggacttgtttgggtaagtttatccaaaaccacttatgcacatactagtttgtaaaagctctctcatcttttagagaaactatacaagagagtttctacaatttagcttatggagaaactcatttcatttctttttcttattttttttctcctaaaagtgcttccagattagtttatccaaacagaccctaaaagcttgattgtataacttagtaaataagctaaccaaacttattttgataaccttctttttgaaatttaattgaaataagctaaaaatattctactgaatggccatatgctacttctacaagtccaaataagttttatgaaattcttcctaatgtcccttggtctgtgtctaactagcttttcttcctcaatgtcactcaggagaagct

SEQ ID NO: 21296 - DNA, 844 bp, Glycine max
  Intron number 4 from transcript Glyma04g16170.1 (locus Gly ma04g16170) derived from phytozome v7.0 (chr-ID Gm04; pos 17170489 to 17171332 reverse strand)
ttgttggttttaatgtgattctcttactattcatatgatcaattgttttagtttaattttatgatctgttttgatcataggtgaaacaaggagggacattataataataaaaagtaaagaaatagaacgaacagaagtgaaagagagatataatagatggattgaattgggaattaggaattaggaagcaagaagtggaaacatttctgagtttgtttgatatagggaaaacgagagtagaaagaatgaatgaaataaatatcctaattaaaattaaaattaaatgaaaattaacacaaaattagacgttttaatatcactaatttttgaatttaattgaaattcacctagtgggataaggctttgttggtaattggaattcacttactgtgtgaaatatcatccaatcacatattgtcaagtcatatatgacaaatttgttggtttttataataactactttggaagtcatgcctatgttttttgattaactgtcagcttaaaaatctttacactgatgatgtgtgaacattaaacttgtattttttttcttagtttataggtataagagggatctcatgatgaataacagtgcggtaactttggtcttttagcatgctgtatgacgtgtgttatccatgtagctggtcttacctagtgggataaggctttgttgtaatgttttgttatatactaaaatgaaaacaaaaaaaaagtagatcaatttgtcccatttcatacctgtatgggataagttttctcctccttgtggaaatttgatatttcttatcttcctgttttccatttcttcgtatacaatgtttaacatttttgtgcttcaggt

SEQ ID NO: 21297 - DNA, 623 bp, Glycine max
  Intron number 1 from transcript Glyma03g35200.1 (locus Gly ma03g35200) derived from phytozome v7.0 (chr-ID Gm03; pos 42500435 to 42501057)
accatcccaacttcctatcaaatttgcagtagttggtaagcgctcattaattatctgattaaaccctgcaaggttacaaccatgttatgttcattttgcacactaattcgtgtgatactaatccacattcctttgcaatttaacttgggtaccttagcaggataaaatacaagaaaacaatttttgcagtgagaaatttgtgagttgtaagaatttgcaatttaaggagtgatgacaacatattcgctaacatttttttattagttggaaatttatgtaaatcaaaaaactattttgataatgaagaatattacatactcttttcgtccctaaattaaataagtatcatttgagaaaaaatttattctaaaataagtgtcacataattttttaatagaatattttttttttcaataatatctctaataagtatcatttagttttgtaatgtaacattagttctataaaatcactacttacttttatttatttatttattaacttttcttaatttatgcaaaacaaacaaatacgattttctactatttctcttaatttgcaacttatgctttagaataatgtacataggagatcttggacaaacggattggaccagatcaacc

SEQ ID NO: 21298 - DNA, 829 bp, Glycine max
  Intron number 2 from transcript Glyma02g11110.1 (locus Gly ma02g11110) derived from phytozome v7.0 (chr-ID Gm02; pos 9322285 to 9323113)
atagagtgtcactggccaacaaaccctcttcaaaggtattattttatattgtatttggaagctcctgaagaaatatttgaaaatttccacttgttcttttggacttgctgattcttgtttgcattttttatgaactacttcacatgcacacaagttaatttcaagataagcattaattttcaataatgaagcaaagacagttctccccacttgaggtgtcatggtgttgtgacatgtttctgacactcacacactcatatgacacatatcaacaagtgtcttattaaaaaaattgtttttgttggctcaaattgttgagctgacaccagtataggctagacatttaaaggacactggtaatttaataagacattcaattttttttttatcatccacaacagtcagattgagacataatataatacaaagtatcaaaagctaatgtctcttggtatttattttttttgtgaaactcataatcatatggaggtgaacatacagatcttgattgtcaatttaaatcttttgtcctgttgatatttaatttcttttgtcatgcggtgttctagaatacgaacattaatcatattggggtgcccttgtccatgtcatgtctggtgtttgtctgtgttagtgttattttcacttttgattgctttgagtctcatggtttgaggaaacaaaatgaggaacccacaagttgatatggcttatgtgcttgtgagatttcactgtcttagacagcttgacctgtataattatgacttatggttctttttggttctcactggaaggaaggtgacttagtcttgaagaaagcaactgaata

SEQ ID NO: 21299 - DNA, 898 bp, Glycine max
  Intron number 2 from transcript Glyma04g08130.1 (locus Gly ma04g08130) derived from phytozome v7.0 (chr-ID Gm04; pos 6371369 to 6372266)
tctcaggttaatcaacctcaaattcatctttttgtttttcatttttttttttcaataaacgctttcgacgctgcatttccctatcgaatttgtgcatcggtgacgaattgcatttgcgttgcgttgttccatttcgttataagaagaaaatagggcttgcgaatgaaatgaaaaaaaaaaaacatacaattcacgtaattagggtatccgtgtcgtttttatttgtttccgatttctcagcaaaacttatttgaggccatttccacaattcacagccttgtataatacaattgatttccctagtgttactgtttccttactctcttttacagtaataattactcattatcgttttgtttgcatcaactttgttggtgcatatccatatagttttcttttttcatcaaggaaattgatgctgctgcggtttattgttgtcatttaaggtctcgtgaattgtcaatttgatgtaattgttgcttctattactgactagtgtattatttgtgtttgtgatttgcaattatttttggtcccaaacttttaggtcattgatatgccaatagaaggaacctaatgattgccaaaatgtctttacccggtcaaagtctactaagatatgtcaagaatttttaacctgtggacccataaagcatagatagttgtctcattcaatggatgaactgttagaaaattgtttttgacgactatgaaatatgccctatttttttttatgcaattggttgattatgagaaatagctcagtcttatactgtttctaaatattataaattcttttctctctttgattctatttaaggtttctttctatagttgcttggaccttctttccttttctccattttttttattctttgttgttttgaaaattttgcag

SEQ ID NO: 21300 - DNA, 390 bp, Glycine max
  Intron number 3 from transcript Glyma04g06930.1 (locus Gly ma04g06930) derived from phytozome v7.0 (chr-ID Gm04; pos 5360339 to 5360728 reverse strand)
gattttacattgcacctatctggtttataacagaggtaactgcagagtaatatatgttgttattttcttttgtccttcaagaaaaaagaagaagcttgattatctgtcctaaaaagttgccatgagtctatgagttgacaaggtttgaaattatattagattttatcagttaaactcatagatagatgtctccttccacaataactgtcatggtagctggtttctttttcttacaaattgaatgcttttaactgttgcaaaattaatattttttcttcaagttgttatacacatcatttattttgattttgctttcagaagtggttctttattaattttcttccgttgctttcagtatctatcaaacgctgcccttgcacgaacaagtgt

SEQ ID NO: 21301 - DNA, 877 bp, Glycine max
  Intron number 3 from transcript Glyma03g38870.1 (locus Gly ma03g38870) derived from phytozome v7.0 (chr-ID Gm03; pos 45148841 to 45149717)
tgtttgccctctactacagtggctttcttcccgaggtacaacatcttttattgcattatcgcacctgtttttcaacttaaaagttctcgtacatgcatttcaaaagcctcagttcatatcttgagactcaaaattcttagaatttcgatttgggcataactcatcccgatagctcataaagtgaggattactggccacttatatacactattttgaccgtattattagttagaggatctctggcacaccttcctcatgccaaagactgaacatcttgaatgtgaggtttgcaggattggacatatgcgagtggtccgataacgagtagctcgacaggcttaataacaacactagcataagttctaataccatattagattttgggtttggatttaactcaatcccaaaagttagtttataaaattttactagccttccactcatatacactatttttgccatttcatttgctgctagtcaatgttggatcttcaacacaaattcaaatataataaaattgcattggattcaatcatccacctaacgagcaacaaaaacaacagcacaccattgtctgtctggattgaatcaacctagagtctaacagaatcctccttctttagctgggctcaaatctggctatgagaccataagcaagttcatcatccatctaatgagtcttttatgtaaattaatttgtagctttgttctttttctacctcgaattcctttgttgtgaatacataatctgttggattttggcatgatattttattccaatatttttttactatgataaagaaattggaacatatcaagagtacttgtttctagtgaatcttatcttttccaattgttacattgccatgtctgcaga

SEQ ID NO: 21302 - DNA, 800 bp, Glycine max
  Intron number 1 from transcript Glyma01g04930.1 (locus Gly ma01g04930) derived from phytozome v7.0 (chr-ID Gm01; pos 4617842 to 4618641)
ctcagtcagtgccagtggcatcagtactcattgtaaattcatcactatttccttgcaagacttattgttgttcatgtgatgatgtgcttgcttgcttggagttggatgttccatctttggtaaatgtgtttgtgcataaaatgttccttttttgtttttagtagtttgtttgtcttagcttttgagaattcctcccttgagcacctattgatttggttgaaagttactgtgctaagcaatgtgaaatgtatacacaactgataatgccaaaagaacaagggtgtctgattacgagtgctgtaggtggtgtttgcagggctgcagcaaaactatgttgaaatataattttgagtttttttttctcttcttgtttattcagaactggagtgagttacttagttaatcccaaaatatatgccaattcatattaagcttcatcactagaatgtttcctttacctccctatggtcttccatgtttatagagtgagaaacccgtgaaaatttagattttaaattgggtagaaaagtaaggaaatacacaaaacttgagactttagttaacctaattattatcagatatgggtgggagtaaatattagaaaggaagcttatctcagttactgtttggacataacttaatttcaaacacatgctaaaaaggaaaattacttgaggtgatgcttatttccttatctattctaaaacccataatgcatgatgctatttttactgcttatcctaatactttttattttctctctcttggtggcttcccattagctgaaagtaaatcaacta

SEQ ID NO: 21303 - DNA, 468 bp, Glycine max
  Intron number 1 from transcript Glyma04g02770.1 (locus Gly ma04g02770) derived from phytozome v7.0 (chr-ID Gm04; pos 1991851 to 1992318 reverse strand)
cttctaacaaccaggtatatttgtttgttggcattttcacaccagaaaatatctgcagaatttttgtgccttgaaaattttcccaccttcttgagttgttttatttttgtgtctggtttaccaatttttaatgtctatagtttgttgctacttagctaaagatcctctcattgttaatatttttatttttattattgattttgattcacatcttctgcgagtttcccattcttagcaggcttttaagcattttacactttctgtacattattcaatagtcctctctctctctctctcgtgtgtatgtgtgtgtgaaggactaaaagatggattgagtattttacacgattagtacactcttgttcttggcttcgttggttcaacaatgtgatttaagttgatagttttttttttctattttgttttgcattcacttacgaaaacaggataacaagaagaaaccaaact

SEQ ID NO: 21304 - DNA, 880 bp, Glycine max
  Intron number 1 from transcript Glyma02g01150.1 (locus Gly ma02g01150) derived from phytozome v7.0 (chr-ID Gm02; pos 859601 to 860480 reverse strand)
atcctccccttcactccttcactttcctatttcaggtactcatcgatctatcacacttactcttcaatgtctcttttgcgatcgcctttccttttatggattaccgttattttattttttatttttatattcctacaaaatttacctttccgccggtaataacttgttccgcgtttcactgatctatgattgatatcttggtctttagttgcactttgctctgattggctgaaagtgtttcgatccgtttttgtttgcactgagattttgctaaccaaagcggtgagcttaccatagtggaagccgatactgatttcacggccgtgtagttttcttgcatcatttcttgttcaatgatgatggaattatgcaaataatttggaatgtaataatctcagttttctatttgatgttttttctaagagttaaagcagggttatgttgcgtgttttaattaatatgaatcaaatgagtggaagcattgcgttgcttccgttcaaattttcatatcatgccactgaaatgaagctatgctgagataagaaagcctgaaacggctgttgagttcaatgacactagactcatggattgagttgcatgtgatttggaatgtgtgccaactgaaaaccaaatacacttaaaactagaactcattgtaattggaaagaaaccacacagaatagcactatttccttccttctttcctttagaattgatgaaagttgcaattgccatcgggatgtatcttcttttgcaggaataaacatcttcattgatggattttttatttatttttgatagactttgtattcaagattaaaaattaacagttgttagtatgatttaatggtctattggattatttcagtgggaaagaatc

SEQ ID NO: 21305 - DNA, 436 bp, Glycine max
  Intron number 1 from transcript Glyma02g46290.1 (locus Gly ma02g46290) derived from phytozome v7.0 (chr-ID Gm02; pos 50286750 to 50287185)
actactcatttcccacaacacaaccttcactcacggtattctatttcttctctaaacttttccttattttttgtagaaaatctgtgctggattgatcttacttcctgtgtttttttttcctctcttatcatcttcaatagttttttggtccggattcttctgccgtctattctgaagcgtggtttttaaagcatatgcctttatagtcaagtgattcctcttgtttctggcatagaataaagtgattccactcaaaccagtttaattcattttatctttttttcaatatcttttcaagttacttgcatgcccttttgcttcctatgttgagagagttgaatgatttgaaatttgagtatgtaattaatggttatttgtgtggttctgtaataacatataagtactttgccttgtgtagccactccaaaagaacaca

SEQ ID NO: 21306 - DNA, 496 bp, Glycine max
  Intron number 1 from transcript Glyma04g08560.1 (locus Gly ma04g08560) derived from phytozome v7.0 (chr-ID Gm04; pos 6711372 to 6711867 reverse strand)
acctcgttcgtgctcccgaagatcctatcctcggggtataatattcttcttttcttctcgcatcactcttcattcaaattcatctctattatataacgcatgacacgatatcgccatttcatcttctttttctttttttcttttcgttcttcgagtttctaagatcgcgctctcaacgatctatacatcatttgaatatttttatttttggatgattattcgagatcaattttgtttaatgaatctaggtgtggtttgattattgtgcaaattctttgtttccttgcgtgatcgtaagctgcgattatgtttacgtatgaattttgaagccgcacggcacgattgaaaattagttcacgtaaattttataccgaagcggttaatcttaagctactttcatacgaaacgttttcagtttttgctctgttttattgactctcgttgcgtgtttgaataaataggtaactgttgcttataacaaagatccaagtccagt

SEQ ID NO: 21307 - DNA, 796 bp, Glycine max
  Intron number 1 from transcript Glyma04g34910.1 (locus Gly ma04g34910) derived from phytozome v7.0 (chr-ID Gm04; pos 41174735 to 41175530)
taggttgtggagcaatccaaggctgatgtgaacactttgcagccaaaatctgttgagcaaaatgttgtgccttctaagcagtcaaagcctcctggtgaagagagtgccactaagattgatctatttcccaatcaagttcttagtggcactaaaggacaaacaactgttgaaaaaagtaagtagccaatagtagcctctttctctgtttgctctggcaatggtacaaaccaaggttcagaagagccaaatcaaaatttgaagagaaaaagaaaagacactgacgactctgagtgccacagtgaagtatgtcttagatttatggggtttaatctgtttaatcattttcttacttattttatagtttccctccattaaccaagaaaacattttacatgaaggatgttgaggaagaatcagctggtgctaaaaagacagctggtgggtgaggaggtgcaggttccaagagaagccgtccagctgaagtgcataatctatctgaaagggtgagcaaggccatattctatttgtgtagtattaattattagttataattagtattaatttcgcaataaggttagcttggctttatctgtttttgcttttgttagacacacctgaaaaactttgtaagattatggaatgatggttagtggttacctctaataatttgaacttgaaaacagatagttattgaagttttgttctaatctctctcccctctggctttggttaaaattttatgatcataaatgatatacctgaagtgtgagattgattcctaatttcctattttctt

SEQ ID NO: 21308 - DNA, 848 bp, Glycine max
  Intron number 2 from transcript Glyma04g34910.1 (locus Gly ma04g34910) derived from phytozome v7.0 (chr-ID Gm04; pos 41175702 to 41176549)
accctccacaggcaagttaatttcttttctcttaaatcatatcaaccattttcaactgaagttgtttaattatatatgctagtagcaatgcaaagtataattcaattgttgtttccaataatctgttaaatattatgtattcgtatgcattacgtaaggtttttctttttgttattatgcattacgtaagttaaggggaatgcaaacatatcattttgataaataaaaaagtaaaaaaaagtatatttctttcgtttcataatttcaaaccaaatggttattagattatctatatatagaattattttttttagagaaattttatttaaatacttcggttttgtcttttatttttttggatttcagaatttcaattttaaatgatttttttaatgagcattataaaaccagtgaaagtatatagtatttaatatattatgctgttaaaaaagtattttaatatattatattaaattctttttgtagttactttaaactagtattaaataatttttatattttgaaataattaacactttttttaataaatattttaaatttaattttcttataatcattactgtaataaacatttctctttaactgtagtcataaaagcatgttgatttataactttttcatgagaacaatcatatcaaatttcttatattattgatatggaaatttcaaatcaaacaatgacgtgatactatttttttttaatttaataacatatcttaataaaaactatttaacgttggaaaaaatgaataggtcacatgatttaagaatttaattataaaatatataaaattgaggatcatcatatgctaacctttgaagacctc

SEQ ID NO: 21309 - DNA, 559 bp, Glycine max
  Intron number 2 from transcript Glyma03g36460.1 (locus Gly ma03g36460) derived from phytozome v7.0 (chr-ID Gm03; pos 43409058 to 43409616 reverse strand)
cttcttgccatctgcggttgtgtcacggtttcaaggtatatttctttggacaaaacttgcatacagttctttaggtgcaattggtgctgttttcagttagaattggagtttcatttcaataatctacagaatcctttaatgcaaatctatattatgtggacttctaaagtgaaactccaattctgattggaaaacaacatcaaaaaccaaggaactgtatctaagctttttcctattttcttcttcgaattgtattatactgttcaatcaatgtagtgtctggacaagcttgtgcaaacatcataatgcagaaaactaaacccattcgtatattgaatttgattctagcaggtgctattaactgggttagttggtttgaaagctgcttgctatatctgagaactatcttttctaaatattgttgaaagttcaaacttgtgctcttggtcttgttttccttgtagcagttgctttcgttttgtggttgtctgattgctcctctcagaatcatttgttttttgacatgcagtttacaggatttatacctccattcttttcc

SEQ ID NO: 21310 - DNA, 824 bp, Glycine max
  Intron number 3 from transcript Glyma01g45060.1 (locus Gly ma01g45060) derived from phytozome v7.0 (chr-ID Gm01; pos 55479315 to 55480138 reverse strand)
aaggttggactgcaagactgcttccctcaagacaggtaacatcaaaacccaaccctgttcaatcacacctttgcatatgctattaaactttgtgttgtatgaactgtcttttaatggtatgtttgggagtggactgttgtggaagggtctggaataggttttttaatttgaagtcaagaaaattacattttgtttaggaaaataaacaaaatattaaggcattctgattatacgttaatccgttcttttttgtttttttttttaaattcacacgataccaatgtctttgtttatagtgtttggcctttatttttttaatcttttatcttttaaagtagtttgttcaattagctcctctagaaactctattcttttggcttttgttcattagcagagaagctacctttgtctttaggagcttccttgaaattgtgtcttaccttctccttccaaagggaagagaatcaccaaaaaatgtacctttaatctaaagaatgccaacctatctgtattagtattgttgtttccaggtcagcaaaatcagaatatttctcttgtaaattgatgtacttgtagaattcttatagtaagttgtggttgaaaattggtttttccttggcctttataaaataggatcatattgtttttaaacattatttgatttaataggttgtttagatgtgaaattgctaacctatctgtgattaaactttatgttgtccgttattctcttgtgcgcatatggtttctcctgtttgcccctaaactttgattgctcaaaatgcgcagtttggttatattgtcttgacaacctctgctggtat

SEQ ID NO: 21311 - DNA, 560 bp, Glycine max
  Intron number 1 from transcript Glyma04g41660.1 (locus Gly ma04g41660) derived from phytozome v7.0 (chr-ID Gm04; pos 47515856 to 47516415 reverse strand)
aaccagagcccttctcgtcctctcaattctctcaggtaatttgctttgttttgatataaccctttttttggatttcttctgctttgtcgccgtggatcccgataactatcaccacgccatctccgtataacaactagcaacgcaattgactgtaacagattaaatccgttcgctatcgatatcgattaattgggattaggtcaatttgtatgccttgaattgcaatttcacctgaactttgccgttagccccaaaacgttgttatagattatcgggtttccccccctttttttttcattgcataatggcatctataaatgtttaagttgcataaggccaatgttatggccattgtgggataaggtttttggttgttggatctttatgaagcatgctggttatattataactataattataagtaaatggatgccctctgttggatgttttcttttgagaaacatagttatgcagtatgcttatggatttatgacgggatacctaattgtgaaatgggtgttgtagtccaaggggctgcaaattttctggttcttttcgac

SEQ ID NO: 21312 - DNA, 514 bp, Glycine max
  Intron number 3 from transcript Glyma0121s00230.1 (locus G lyma0121s00230) derived from phytozome v7.0 (chr-ID scaffo ld_121; pos 28642 to 29155 reverse strand)
ctgcgctggtcttgctacaagttttcctggtatatcccttcttttaataattgatgaactatcatcctttacttgaagtttttagtaacttgttggtctctgcaccaattgaaattaaggataaaggtcacagtaatcttacctattttgaccaaaccttttttctcaaaggtatgaattttaatttgtctttcattgttgaaatctatgaataaacatgatccttcatgccaaacacttgagacaattttgtctccaattggtggctggggaaaggttgaggtttattactatgttgaatggtctaacaaaacaaaacaaaaagctgctttagtgactcaggcatttcaatcaattcttttgtataagtctatctctatatgtatgtaatttattcaccaaaaagaaaaatatgtatttaattttcttctcttgtacgtttttattgttattatgactcatcctttaggattctccaggtacaccccaatcacttctacagagctgcattgct

SEQ ID NO: 21313 - DNA, 908 bp, Glycine max
  Intron number 1 from transcript Glyma04g06010.1 (locus Gly ma04g06010) derived from phytozome v7.0 (chr-ID Gm04; pos 4583211 to 4584118)
gatccctttgatttaatacgcgaaggtatatatatatatatatatatacacacatacactcccatttgtttcagatctttttcttacgcttctcattaatttatatatctttcatctctttctttctgcgaattgcagctttggaattactgttattgttgttgttatgtgctttttttggtctattttcttagtcgttgaattgcgcaagatctctttttgaagttcgcggcttctgtattggaaggttgtgttctttgcgcgctcgagctttgactcgttcgctgttattcctgtcttggttaatgttagtgtcaaattcgggtttgaatgttctaggttttgatttttttttttaaacgtgttattggggtttctatgtaggtactggtcgggaattctgtgtattgtttaatttctcttggaagttgttttgtgacattttctgttatttagtacgaaatattttttagggttttaatccttcctgcttcagttctgaatttggtcagtgttctcaggaacttattcgggtgtatgtaatgtaagttttgctataatttccttaatttgcgctggttccttttttgtacagtttaccattatcggattcacttccaaattaaagtgacgaaaaatggcaagctatatttcattgccgtgataatgaaaaatagtagtaactgcagttctatagtgggttatttatttggcactttttttatgttatatgggatattattgaaattatctattggatgatgtatggaaattttgtggtgattttttattttatttttataaatcccccccccccccccccccccgttctttttatagcagtttggttaatcaacgagcatgatcaaattgaaccattttcagggtttggttgaggctgactggac

SEQ ID NO: 21314 - DNA, 872 bp, Glycine max
  Intron number 2 from transcript Glyma04g06010.1 (locus Gly ma04g06010) derived from phytozome v7.0 (chr-ID Gm04; pos 4584957 to 4585828)
ctcaatcagttagaggtaggttgattttcacataataactgaactgtggtcaaattatggttccttataagctccttctcatgcatttgactgtgaaaatgtatgtgttgtcagttacatttatgcacaatatctatctcctgcttgttgcagtgcagtatgctcttgagcatttgagtaaacttctctacaaacacttttagcagaagaaaattaaatgaattgaagtataatgaatcaaacttttcccatgactgttaaaatcaactcacacacctcaattgttttagaagttccgctcatgtaacttttccatgagttgattttagtttttggtaaaagtttaactcattttacctccttgattcgttttttcttcttctcttgtataagtttgtccaaatttgctcttagtacaatactaagtctgatggcatggatgctaagtatttagagcaatacctgtgccttgttttggcagggaagatccggctccctataaagttgtgaggtgattcaagtgcaacctacctagcttccagttcctaatcgctgttgcctggtactggggggagcggttgttagaaataatcttatttttcaattttgatctacactctttttgagtttaattttgtgataacagtcctctgcagcatgttatccagggccattggcatttattaacattttgttagatacatataattatgtattggtatatgatcaagtagtacaattagttctccattccatgaataccatagtcatctcttatgattatttcctatttctatggaatattttttaatctaggaactttatgttgataatctccctttcccccccaacaaatttgtagcttcaagttg

SEQ ID NO: 21315 - DNA, 446 bp, Glycine max
  Intron number 1 from transcript Glyma03g33850.1 (locus Gly ma03g33850) derived from phytozome v7.0 (chr-ID Gm03; pos 41346770 to 41347215)
ggattggtgcgattactggaaaaagtctagctcaggtatttttcttgcacctcagggatttataaattatactgttgttgagtttgtaagattgcaatatttgaaaagcttctgcactctgagctgctttttatcccccctcaggaaaaaaaaactgttcaatttgagtttcaaaaaatttaccagttttgttgtctttttaatgtagcaccctgccattcactccctattaaataacttgttgcatattaggaagactattgagaagaagtcacttatcaagaggaaataaaccaagaagaaaattattaaacaatcttttgccttcttttgctaaaaattcatccaccaaaaaatcaaaattcactcaaaataagaaatatcataatttgcatgttttttttttatagactaacattactttctttttccaaagatttgcagtg

SEQ ID NO: 21316 - DNA, 912 bp, Glycine max
  Intron number 1 from transcript Glyma01g04590.1 (locus Gly ma01g04590) derived from phytozome v7.0 (chr-ID Gm01; pos 4191153 to 4192064)
agaagttggttataaattaatattttgctagatatgaaaattgtttcagcttttaactttttagaatctctataatctatatggtttatccttgtcctgtttaagtctattaatgtccaccgcattttcggatgaagtgaggaaagtaaaaaaaaaaaaagtagattgaaaaaataagatataatttataatataaagaaaaaaaatagaaagaaaaatgaagtagaagtaagttgtaaaagagtgagatgtatacgcatgtttagtattaggaattaaaaatgattgctcgaaagaattgagaaatataaatgtcatggtaatacaatgtgaccacaggatgccttaaaaatgtgatcaccggataaaaataaagaaaaattaaaaacgtcaagtgagttatatagttatttttataggaaaaatgttaattgttaatttgttataatgttactgtgagatatatctcttgtttattttatttctttaatactattaagttaatcttaccattcccaagttgtgatgagttacactttattaggtgttcatatgtatctttactatgttaggataattagttcatcataattttgagaaattctatttttactataattatagtttcatatacaacaaaaagagataaaataagagaaaagatcgaaaatcataataaaataagtgataaatgaaaacaattagaaaataattccttataaaatgtatacatagaaataatttataactcagatttatgatccgaggttcatagatttttatgtgcttttttgttttaaatttcacaaacatgttttggttttgaacggtgtgattcattcattttctgactttcttttcatcttttttttttaagtgatagtgaaaagagtgataagctcattcagcatt

SEQ ID NO: 21317 - DNA, 544 bp, Glycine max
  Intron number 1 from transcript Glyma03g29230.1 (locus Gly ma03g29230) derived from phytozome v7.0 (chr-ID Gm03; pos 37221407 to 37221950 reverse strand)
tcaagattcgccaccccttcgtcactgccgccgaggtcatctccctttttcctttcctcaatttttctgttcttctcaatttcaaccttctctttcctttgcatgtttctcaatcacttgctccttactctctcactctatttctgttgttttctgattttgatcctttgcttaatttggccgattccgtatttttcttttgtgcgattatctttgcttaaattttctgtttttatgagtttcttttttgtttttttttaaaggttgactttttttttttagctttaaggtaatttttgaagatttattcggttatgtaatgtttcttctattgtagattatataggcattaacattttttttaattatgtgtttagtcctttagagttttgtatgtgtgtgtgttagtttgtttgcttgtttgtttctcttccatgtccatttcgattttgtgaagatggattggtgaatgccggaatttctgatgcgtatcactcaatccatggcagattttgctccctacgattgtgttgttgctgttagt

SEQ ID NO: 21318 - DNA, 931 bp, Glycine max
  Intron number 1 from transcript Glyma04g16980.1 (locus Gly ma04g16980) derived from phytozome v7.0 (chr-ID Gm04; pos 18288311 to 18289241)
aagggaggctcactttggaacaagttctaaggtctttgattttttttttttcctttttagatttaggaatcttttgtttcttcttgtggttgattaatcttgttgtgagaagtttatttgacttgatagtgactatgtagtgagtagactgaaagaagtgtggtgattgttgcgtttgattagtttagtttctcttggtttgtttgatgagtaattgttgtggttgcagttgtgtgattattgtgtttgattagttcagtttctctgatttgtttgatgagtaattgtggttttaagttacggttttggttgattagtttatatttttcattatgtggttgttgcaacctcagtactgcaatttttcaagtgatgtctgcaatttgaaaacttgatcagtattatccaatgttgttaaatggcagcatgatggcagaatgacgtggcagattttttgcaaaccccataggaaattttgaagggaggaccgcaatggcggaaattgtgtgtttatatggcgaaattttggccttctgccatgttccgccattcaccattgataacattgttattattgcaatttcactgataagtaggaagcactacattctggttaaaatttggggataatgcaatgtctaagtaggctggactaaattaggttggtttattcaacgtctaaaatttatcattttactcctgcttaggtgcgtttatgtttgtagaaaatgtgttgttatcatgtctctgctagtcattaactaaccaatgtttggagggagacactgtctatctatgtgtttttctaggctgactatgtgctttcctgttggttaggcagatagaaaatagttgaatgagtaatcccatattgcatttcaattttccatgatgctataaataatgatattaaaattttccaaatgtagat

SEQ ID NO: 21319 - DNA, 872 bp, Glycine max
  Intron number 1 from transcript Glyma01g21580.1 (locus Gly ma01g21580) derived from phytozome v7.0 (chr-ID Gm01; pos 26814891 to 26815762)
gtggtaagaatatcatatattttcctatatatttgaacttgcttgattttatttgggctctatggggacaaattttgttatgaataaaatatgtttgtgattgttaataaatattttttgtatttatttttaaaattttatttatttattattaataaatttgaaaatgattaataacaaatgaaaaatatatcagaaaataaatataaaatttgttaaataattatgaatttaaaaaagtgtcaaaagataaaaataaattttttgtcttattagaaactcaatccaaagaaaatatttattaagaaatgaataaaaaaatttcatatttattaggaatcgaatacatatttttgtattttgttataaatacttattgtatagaaaagaagaataacaaataaagtattggtttaattacctattaagtttttatagttttcaaacttattaattttagttcatatagttaataagtgaatttttttaatctttgaagtttatattttaattttcaaaaggtccttgctgttaaaattcattaactaacgaagttaaaaaatttaacggaagaaaccttttgggaattaaaatgtaaacttcagagactttaaaatttacttattaaacttcaggaactaaaaaattcacttattaaatataagaactaagaaaaataagtttgaaaactatagggactaaatgaataattaatcctaaaatattttttcctataagttaaaattatagcttttgaataaactaattgtagaaaccttatcatattattagtttctccaaaatcttattattaatttatacataaactaattttagtttatctaaaagtgtattgcatcttttttataatt

SEQ ID NO: 21320 - DNA, 764 bp, Glycine max
  Intron number 1 from transcript Glyma02g06380.1 (locus Gly ma02g06380) derived from phytozome v7.0 (chr-ID Gm02; pos 5067773 to 5068536 reverse strand)
gcttttgcttacaagctcctacattctctctccaggtttgtaatgtttgcgttccctcatttctctcttctctcattccctggatctgattctggaatattaattttaatttcccctatgttcaaaaattaagaattgtttgtttattttatatgtgcttcaattgatttcttttttcattttcattttcattttgttcctattcgtttcgtaaagtcaacgctgccaagagaagcgtgaaactacttcgcgttattgctgattccgcagagtgtacggtcagaatagggtgtttgatcccagttctcacgtttagttctgtaaacggatccgtttcagaagagaaaaaaaacaaaattgagattcaaaacgttgacattcttcgtctatgtacctaaaaacgtgttggactcggtgaataataggtgtctgtttttcaattttgtctttgttggaatagataagtcctttacttatattttatgctgttgagacagttttgtgcataaaaaattgttaggtgtttctttatgttactgtgttttggtttgattccaaatagggtgatgtgcatgtgattgagtacagtacaggtggaattgttcgttcaacttatggaattgttgcaaaattcttattattctcttctcatgtttcgacttttatgattttgtgatggtgtggatgttaggtttgaagaggaaaattgatcttacttgaagttttgtgctgcaggttgggaattagtgcctttggtgatcatc

SEQ ID NO: 21321 - DNA, 429 bp, Glycine max
  Intron number 1 from transcript Glyma04g00570.1 (locus Gly ma04g00570) derived from phytozome v7.0 (chr-ID Gm04; pos 332581 to 333009 reverse strand)
aactgccgcaagagcaagatcttcttcattgcgtgcttcttcatctgtttttcataattacccttttaaccctctttttcttagtacttatcctatgttttattgctgttgatccgtggttttatgcatacaaacaaaacaaaagtagcctacccagtgtctggtggcgctattttaattatgagttatgtcgtctctaacagttgttgtaataatgttgcatataatggctcaataatttatgcggaggaaacaaaatgaaagttctttttaggtacaattatatgatgatttcagatggtagggggggacccgagtgggggattgatttgctttaattatctaatatgcatgattgaatttgaattgaaatatttataatatatatgatcaggtctccaacagcatcaaggattagagcaaagattc

SEQ ID NO: 21322 - DNA, 514 bp, Glycine max
  Intron number 1 from transcript Glyma03g38240.1 (locus Gly ma03g38240) derived from phytozome v7.0 (chr-ID Gm03; pos 44619990 to 44620503)
acaggacttcttgtcttaacaattttctaaatcaggtaatgtagtttctatttttttttttcttcaaaatttctctctcattctcttaaatgttttgttcattggttttaatggaacttcttatttgtttgagaattcattgcattttggtcctatattatggttaatgtgcaactgcaattgtagtcatccaataatatttttcttaaaattagtctcctttattttttattttttttactacaatctagtcttttgaagaggaagaaatttttttgatggtttgattgatggttttaaggtagagaaaaaccattagaaggatttgattatataacaattaaaggattaaatctgagcagaaatttgtttagggatcataatcatgcattagccttaataggaccaaaataaacctaagcttaatcttataatttaattgtgattgagttgattatcttatgattaatttctgttgctgattgaagacagccagaagcatcaccatcagagt

SEQ ID NO: 21323 - DNA, 798 bp, Glycine max
  Intron number 2 from transcript Glyma01g06320.1 (locus Gly ma01g06320) derived from phytozome v7.0 (chr-ID Gm01; pos 6442044 to 6442841 reverse strand)
cagttctgcctctcttgtttctgaccaaggtaccttaaaaatccaaactttattgtcgtttgattcaccccttttgtcgtttacctgtttttctatgttgtgttttgatgtcttggactgccctttgtgttttttttgctctaatttgtacggaactcgtcatggcatgcatgtctgtctctagagtttgttattgcctattgggaaatggggcttcttataccttcactcttcttcctaattgtcctttggattgtgctaaattgcctacgagcaagagtatagggattgttatcatccaaaatttgtagtaatagaaattatttcaatgtcaagatgtggtcaaagcaactaaaagtcattattttgtgttattcaatgattttgtgctactgctttatgtatctatctatatgatttgatgaactatcctatcttattgatcagttttgtgaattatattattggggctagtcatgttcttgggtttctctgatgttcttcgccggttgctgctgttgaatatggtgatcccaggctggcaacatcgatttgtttgtgtgtctcttttgtttatagtgtttactctttaaaagtgaaatcttagacaatttctggaggaggtggaggatttaattcactttgctgtgtgttgggtgtcatattgagcatgcttctgtgatatgaagatgtatgatggcttatcatttacttttatgttaaatcttgtttactgatctttttaaaacaacactgttttcagaacagaagccgcagaagttgtctgagatcaaagcg

SEQ ID NO: 21324 - DNA, 756 bp, Glycine max
  Intron number 2 from transcript Glyma02g15570.1 (locus Gly ma02g15570) derived from phytozome v7.0 (chr-ID Gm02; pos 14063732 to 14064487)
gttctgcatttccaaagaggtgttttttattcccaatcagtaatcagtagattttacattcttttgcctggaaatagattagctatcaatatctaaacaaagaatccaggtcttatgaaattgttgataagtcattaaagttacaaataaaatccatatatgcactcaaatgttcaaattagatagtgggtgtttaacaattaaaaaatcttagcatatctgcatactgctttagtaataataattattgaaagaggttaaaaggtatggaatttgaaagttataatctccagttgtatatggtgtgctagtgttttggtttgatgtttcagtaggagagtaggttattttcccaccctacctctatgcaactccttagatattgcatgcacttcaatttatattattaaatcctgacaattgttcatcacctatagttctagtagtaactcttgatggaagaattttggctctgcacctagtaaagattggtattggaaaaccaatcagcattgtttatgtggtctgccatattatcaatgtcttctttagagaccattaatgatcaatctgtttttccataagctaatcattaattggcggtggtataccactatacttggttagttggtgtttaatggtgaagcaatgttcttgaatattttttcttttgttacattatactgttatttattcatattaacgttttgtgtaactgtaggaagaggaagttgaccgatcattggaggaacttta

SEQ ID NO: 21325 - DNA, 611 bp, Glycine max
  Intron number 1 from transcript Glyma02g12290.1 (locus Gly ma02g12290) derived from phytozome v7.0 (chr-ID Gm02; pos 10570962 to 10571572 reverse strand)
gaacagttaatctctctaatttctgattcattctcttcaatctttgtcttttgcattctgattttgcatttttcctttgccatttgagaatcccccttctgggtttttatcacttttgaaaaaatggcacctttttcggtttcatgatttcactttttaaaaattcattttttttatttatgtttgctgactccaattaagggttatggttgtgatattcatttttcaggtattggtctagatttcactttcagagtttaacggtaaaaggaatgcttgggattcactgaatttttattttgaatgtttatttgagcattgtgaggatccttatttatttttgttttgaaaaattgtgtaatgttttttttttttttttatactaaagggttattgtgcttgtgatgttctatttttaagtcttggtctagactttcttttctgagtttaatgattttgggaatttttgggattcactgaatttttattctgaatgtttatttgatcatggttatggtttgtttgtttttttttttggaaattgtgtaatgttttattgtttactgtgtttatcagggcaccacctgcaacgtttcctcggtctgccggga

SEQ ID NO: 21326 - DNA, 581 bp, Glycine max
  Intron number 3 from transcript Glyma04g27670.1 (locus Gly ma04g27670) derived from phytozome v7.0 (chr-ID Gm04; pos 31667542 to 31668122)
ccaaaattacccttaataaagtgagaagagagagaattaattttaataaaactaaaataacccctaatgactttaatacatttaagtctaaccatcatcacattatgcattttttcattaaagtcattctataattacatgatccaatatgagattaaaataatctaacattctcccactttgactcttgtcatgacttaaagattcaacattaaactttaagtgcgcaccatacattgaaattacaagtcaccatccttaatttaattaaaatgattgaataatggtgattgcaagttatccaaagaacttggttccttccatgtattacgaatcatccaattcaacttaactttaattaatactgtagtatgtgtctttatagtcctttctatgacacaataatgtcatctcacaaaaacaataatgtataccatataatgtgaatgacaaaataaatagaaacaactataattgaattcacaagtgtcatatagtacaagcatcacaactaaaatgtatatatatacatgacactacatcgttaacaaggacttatccacaacacccatcctttcaac

SEQ ID NO: 21327 - DNA, 467 bp, Glycine max
  Intron number 1 from transcript Glyma02g40900.1 (locus Gly ma02g40900) derived from phytozome v7.0 (chr-ID Gm02; pos 46106682 to 46107148 reverse strand)
aaccttcttctctctcccttcgtcccctccaattggtaccaatttcttcaactccgctttctttctttcattcattacttttccctctctttcctcttcaaatccctaatttcaattttgatttcttttgttcccttcttcacgcgcctctgttcacctacctttctgttttatttccattcgcgcgttcaaccgatttcgtttattcactttatcacagtaattccttcacgcaagtaccaaatttcgttctcactgagcggatctattttaatgtaacctttgaaattttagtgcccaacaaaaaaattgtctactgcttgttaatttgttgcaagatttttgtagctaatgattgttttcttttgtaagctttttcatgtttgttagttcatctttataattatgattatgattattgttgttttgagtattcattcgcacttgttttgttctttgctgtagga

SEQ ID NO: 21328 - DNA, 702 bp, Glycine max
  Intron number 2 from transcript Glyma01g22470.1 (locus Gly ma01g22470) derived from phytozome v7.0 (chr-ID Gm01; pos 28115007 to 28115708 reverse strand)
ggtgcccagtgatccttccactgttccagaacaaggtgagtgggtgttttttttttttttttgactttttgatatttttgtggatattgggggattgagaattatgcttttgatttatttaaattttttgtgattttgatgtttcgaagggatcgggttttgttttcttgatttggtgtgttgtttatgatttttttacggatgttttgagatggggggttttcttttttaagagcttgcctatttggaaactttggtggttaaaagtaatctgattttgttttcttcttttggcgccttgttaataattttgtttgtgggaatattgatgtcatgaggtggtgtgttattggaaattttgttagggtgttatggtttgccaattttgtgggaatatggtttccgattacttaggtgattggtgtatgtgattttttttttttttttaaatttttggtattaactttgtgtgtgccactgtgaactgttgtcatgaattggtgcgtttttgaaaatttggttagggggttatggttttttattttcttgcaaatatatttacttaccaattattttggtgtttcttttttgttaatgatttttatttacaacaatggggaagggagggacttggtttagattttgttgactggagaattgtggtaagtgaatggctttttttgtttgggtgcagtggttgcc

SEQ ID NO: 21329 - DNA, 910 bp, Glycine max
  Intron number 3 from transcript Glyma04g05120.1 (locus Gly ma04g05120) derived from phytozome v7.0 (chr-ID Gm04; pos 3861639 to 3862548 reverse strand)
tgcaagaggagttagaggaggagatcgaaagagtggtgagttttttttcttttcttattctctctacttgtgtactttttatcgttatctaaggagcctcaattttgtagttttcagtaaattttaatcaatagtagagggggtgataaaaagagtgtgttagacacttggggattatgttgctagcacttctctcgttatcctttttttttttttgtaacaactcctcttgctatctatatgaagtttgcattgtacttttcaagtttgagacggaaagatgtgccatgctatattttttcggtaggctgaatcagaatattttgggaagaaatcaaattttaatgctttgcagtgaaccagaaagaaatgcaaattttagcttgcatgaatgttggattggatggttattgtaggcaccttagcagccaaggtgatgtagaacaataaacctaagctgatatgactcatctttggctgactagagtacttctcttgggcaaagtaaatctgaggttttgaggaaaaagtaaatctcaatattataattatgcagaaaagtctgaataatacaaggcgcttaaaatgtgtttataatcaaagatgataacattactagataaatctaaatgaaatataaaatctgaatcaaatatgaattttctaaaatatgagacttaattgaatcatatctaataggaaatcttaatatgatagtatcttcctaagattaagaaacatataattttttaaagatcaaatccctaaaattgatgaaagatcttttccataatagaaaattctaaaagttctgtgaatatcatgataatccttaagtatgcttcttcattctgcatcactcaccactcagtgattttccatttactctttgcaggaacgaataaggcgc

SEQ ID NO: 21330 - DNA, 709 bp, Glycine max
  Intron number 2 from transcript Glyma04g07860.1 (locus Gly ma04g07860) derived from phytozome v7.0 (chr-ID Gm04; pos 6133443 to 6134151 reverse strand)
cccgccatcttattgtattttctgtcatatttgaggtgcgcagcgccaatggttgattatacttttcctcccattcaatatttgttgtcaatcaatagtgcatgcttttctgcatttcattgtacgattgatatgtttgtcagttttatcatattttgtcatttgtacatgacagaaatttcagttgcttctttgccaatgtgaatgaatatttaaaggaattaaaatttgagtaaatagtttatacactgattgtataaagagtttccatattatcatccaatctcaaaattgcagtttatgttatgttttttgacttttataataactatcttaaaagttaaaagtcatggccacctaccatgatttctaattgattgacggtgtgagggtttttatactaacccttaaaatttctaacttctctaccagcaaattgatattacattgctgagtttttttatgggagagttagagtttaggaccatcagagctggttaattacagttttacagagataggactgaataattaatcagagcggttcatttttactaattacccaattaagtggttacttattctccctatttctaaataagttggtcttgtggtcctgctctgttatacccttttttttaatggaaattaaagagaaagaagtaatgtgcttaaaatagtttcaactttcaggtagttgctatagttt

SEQ ID NO: 21331 - DNA, 388 bp, Glycine max
  Intron number 1 from transcript Glyma03g00450.1 (locus Gly ma03g00450) derived from phytozome v7.0 (chr-ID Gm03; pos 219231 to 219618 reverse strand)
ccaagtctaaggataaagtcattcttaaaaaggtatttattgttctttgatttggtggatggatgtttttttgttatctctgggaatgaaagtcagtgtcaaccaactgagctagaccccttagatacaagaatgtttgatcattaggattcctcatccattctgtatttttttgttcttcttttctaaattcttgttttcatgatcaagagaagaaagatgtgtaaatgaacaaatattttaaattgaagtaggtccgtaaattgcatagtacctgagttgctgaattaccattttctgtttttggattaaaaagcatgcattttgcgtaatctgactaatggaatatgcaggttaaggttggaatccaaggggctgaggagtttgg

SEQ ID NO: 21332 - DNA, 1053 bp, Glycine max
  Intron number 1 from transcript Glyma03g34390.1 (locus Gly ma03g34390) derived from phytozome v7.0 (chr-ID Gm03; pos 41845027 to 41846079)
gcgctctccctcctccttctccaaccctacttctggtacctttttttttgcctcttctaaattccttctttcacgttcagttttagtctttcttgaatttgttctggctattatatttaattgttcactttgtgggtttgttgttgccaattgattttggtgattggtttttcttgtggggatctttttttgaattaatcatcaactgttgactgcaaagctagtgccattcgcgcaattccccaattgagttttcatgttttcgtatagtatgacaagcaattcttaatgaaatcattaaattccttctcctccttccttggtctgggagtgtgatttcttgtatatgtcacgactttgtagatgatgatgtacttttaaaaatttggtacgatggtagtttgttagcaatgtggttgagctgtgaaataactatgtgctttgacgagttgcgtgttctgacaatgaaatgaaatcattgttttgttagaatgctaaatggtttgtgcatactgaaattattttaactgtttgatttcaatcttccagttatgcatatttgtgttggaggatgttgtttgcattgataaataatgaacacttgttgaatttagctccttggttttatcttttgtcatttacaaagtccatatccgaagtcacattcatcaaccttttaaggttgactgcctccattgaactaatgtttctgataggccttgtcaaagttttaaaggaattaattttgttcgttatataatatgactttgttggagctaattttatacacttggtactcaaaatctttgttgttgatgttgccaagcatggaggtttggccagtagtctgttctccttcttcaaacatcttagtatgtgtaacatgtgattcaaattgaattattcattctgttaggatttaaactcagtgtctgtctttctccttcataagcaaactttgattgaattttgttgaaacagatggctgatctttcatctgacccattcttccatgcaggttcctcaccagattcatcttctggtgaagtgagg

SEQ ID NO: 21333 - DNA, 731 bp, Glycine max
  Intron number 2 from transcript Glyma02g01660.1 (locus Gly ma02g01660) derived from phytozome v7.0 (chr-ID Gm02; pos 1196664 to 1197394)
cttctctgtgggaagcaatcgggcgggtgagctttttcttttgtttgcgtgcaaatattcactcacaaccgaaataataataataataataataataaaacaaaaacatttagcaatcagtggcacatataccctcatattcattttttaaactattcatttaagagtgttaatttgtttttaaatgcttggtagtttagaaaacctaaaaaatatcaattatttttaaaaatacttttatttattaatatttactaaagcgttaattatattctattttttgataaaaatattattttatcatataatttgtgtaattaacaattttgttaagatgcatgttgtctttgattgatgtgaaaaggaaaagaaaactaaagggaaagaaattgacaaaatactcatttaatttaggcggaaataaaagaaaaagataaaagtaatgtacatttcacgcatattttccttctcgctactttagtcaacaaaactgaaaaaaagttgagtctgtgagacttttctttcacagtcgcatctttcattaagaatgtttatttcttaagtaataaaaaaaacatttatcatctccctttaagcacatgttggatacagtttcaactttcaatatattaaaagttaaatattgaaccttaataaaggaaggaaaatagatgtctaattaacaatggccaataattaatgtgaaggttgcctcggacgaagcaagagca

SEQ ID NO: 21334 - DNA, 978 bp, Glycine max
  Intron number 2 from transcript Glyma04g06670.1 (locus Gly ma04g06670) derived from phytozome v7.0 (chr-ID Gm04; pos 5131388 to 5132365)
aatccctcgttgggtcaaccggcttgctcgacttggtaaggaatagatggatcgtagtattctcgtcactaattaacttctttttcgcctgtcaccactggaaactccaatagttatcattttgttgaattttgtgtttggaattatctgttgcttgctagattctatttaattagacttcacatgttttttttctctctctttttttgactttgttggatataataaataaagcttgtaataatatttttttgaaggacaaaacttctgatgcagttccttatgtgcttttagtgttgttttctaattaaaggtggagtttcaccttggtgatttgtgtaatagaagttttcattagagatcaaaatagattatcgagataaaactctaattctgaccaagaacaatatccaaagcacgtatagaattgcatctaagttttgtttggacaaatattagatgtagtttcttatgtttttgttttaatgttgttctttaatcaaaattagagttttacattactgatttgtgtagtgaacatttgcattaatgtcaacatggattattattaaagtgaatcttcaattctaattgaaaaatacaccaagagtacctgaggaataacatttaaattttgtcattcttttttaattgatgttttgtagccataaattcattgtccataaagaagcatgcttcttgcagcactatataccccttgcactaagtgacaagaggattgctctaaagagcatctactaatctactaatatacatttaaattttgattttgcaacaattttatttctccatctaatatgtacctgttatgtgaactgatgttcctatggtgcaccttgcaaacaaaatttttgtaccctccctgtccaagttaactggtaaatattcctcctaactcaaagttgtgcacctttacatgaaggtcttctgtgcaactgtgttctcccccctggccta

SEQ ID NO: 21335 - DNA, 396 bp, Glycine max
  Intron number 3 from transcript Glyma03g40990.1 (locus Gly ma03g40990) derived from phytozome v7.0 (chr-ID Gm03; pos 46571659 to 46572054 reverse strand)
gacccgactggaccatctcgattattatctaccatgtaagaaggcttattttgtttcattcttgttatcaattttaggttttttttttttttttagcaaagctgttaagaagaagctgtattgttattgctacattgtttttaatctaaacacaaaagtggttgtaacattgtcagttattctgtgtttttcttttttgaaaatctctttagtactgtcagtggttgaagaagtttaataatttatttctgaaaaattgcacaaactgcctggtaaacttcatgctgcctttgttgtggcacttctattgcatattcggaattttctttgttatttctagaaatattggatttatcaattgagttatttgatgctggcagtgctgagcaagaaggg

SEQ ID NO: 21336 - DNA, 804 bp, Glycine max
  Intron number 1 from transcript Glyma05g00850.1 (locus Gly ma05g00850) derived from phytozome v7.0 (chr-ID Gm05; pos 492317 to 493120)
cgcgtctcgttaacatcatcaaggacaaagatcgggttcgtaaatttcttctctttctttcattacaatttcggccatgccatcatcatcatcatcatcattcaaatgaaatttgaaattatttaggaattaaagttaatggtaattttactaatttgtaaacaccttctcttaacgcaccaaagcgccttttaaaggatgacacacacaacacgacagtgaaaggtcacgagagttaaagcaaagaatacttgagatgcgatgagcctaacaatgtcagcctactttaggtagaaatagttttctaccctaacaagaaaggttcaggggtatatctcattggaagtggattcaattgcattggaggaaatttataacaaagaatgtactgaccttgtttgcccaaagggaaaaaattaattatggttttgtgaagaaggcatttcctaccattatttaaacattggatgtgtatgttggcatgaactattgagtgtgttccgattgaactcaccatgatttttggaagcaacaaacagataaaatcatggtgagttcaccacaaaagcaaatatttgttgcttctataaatcatggtgagttgaactaaccactaattcaagctcacactgattctctatgcaaatgcaatcatgtctcatttctattgattcattctcttgaagctaagcattttttttaccgctttcctctctgtcctcctttgctatgaccttcatttctaactgctagctacttttatttacagaaaattgccaaactcttgcaccagattgcacaaat

SEQ ID NO: 21337 - DNA, 398 bp, Glycine max
  Intron number 1 from transcript Glyma04g38460.1 (locus Gly ma04g38460) derived from phytozome v7.0 (chr-ID Gm04; pos 44867920 to 44868317)
aagctgaagttggagtagctgctaaagtatgcttctctttattttattttagtttttgtgaatttcaagcttttgttgatttgtgattattatttttttttgtttaacttgcttcttgctagatattggtttttctgactattttaggtggattaattgaccattcatgcatcgaatttaagttatggtattttttagcctgattagtgtctgaaagattattatgggggaattcaacttatgttgtcatttgattgcctgattaatgttgatgcttatttgaatcttgtgcatcacttattttgtgtggctttgtaagcactaagcaagggattgttgttttcttcaccaaatttacatcattttgcaactccatgctaccttgtgacagagggaag

SEQ ID NO: 21338 - DNA, 515 bp, Glycine max
  Intron number 3 from transcript Glyma02g05350.1 (locus Gly ma02g05350) derived from phytozome v7.0 (chr-ID Gm02; pos 4326558 to 4327072 reverse strand)
gcagtgccattggtgattttggagattccaaaactgtgagtatcatgtcatattttacattattgtttctactttccggggtttaattttttaaacaatataaagcttttattttatcaattttgttgctttcatacttgagtcctgttttaagcttccttcagttgcttgtctattgtacacctgaactaatttgagacttgagtccaaaaggaaaattatccataaatacctaatgccaattgacacctagttagagatagagagggaaaaaaaagaaaaagagaagagaaatctaggtattataggtatttgatataataggaagagagatagagagaaatgataggtattgacgaagtgtttatatattattgttcagtccaaatttgtgtgctgaactgctaactaaactcaacaatttaactggactatctattgtacaacatgttttcatttccttacccgacacttcagttaagatctgatatgattgcttccatgcaggtttctct

SEQ ID NO: 21339 - DNA, 809 bp, Glycine max
  Intron number 2 from transcript Glyma0101s00240.1 (locus G lyma0101s00240) derived from phytozome v7.0 (chr-ID scaffo ld_101; pos 20950 to 21758)
atcatcccactacaagaaattttccatgtagctacaggcatttttacctacgaacataatttagtgtagttagaactcaaataaacttgtacctacatgtgttttctgtaggtaaaagtaaaatgacatatacttatccaagtttgatgtaggtaaaaaaaaaaaaaaaaaaaacttatacttgtcgatgtttagtatcggtataatctctaaaaactttacctacgaacacttttacttatgaatacaattaactgtatattaaatatatataatttattattttaaaaaattatatttttttattgatgtaaatatgttttgattttaattttaatatgtataaataattattaagattatttatttaattttttattttatagaaaaatataaaatttgtaacttagttataaaattttatttatttaaataatttttttccataaaaacatttttaaaattatatgctaactagcccttctaactatagtctcctttcatatttttatattttatttattatatgaaaatgaaaaaaaaagaacagacacactctctttattctctcaaaaaccaaaatcattctaaccctttcttaggatgatgctctctcttcctaatccctaacgaggcatttcatctacaatctttccatgatcgtgagtttgtttctccttttctctcttttagtgttcaaatgtttttggtgatttatcttcatttgataggaatttacttggttagggcaacagaagtcctggtttcggcattgccttttgctactactaggtttgttttcttcattc

SEQ ID NO: 21340 - DNA, 512 bp, Glycine max
  Intron number 4 from transcript Glyma03g05000.1 (locus Gly ma03g05000) derived from phytozome v7.0 (chr-ID Gm03; pos 5247714 to 5248225)
ataaatttcatattagcatgtaatggaatatgataacatcttttgtttcatatattatcaaaagaccaggaacacttaatttaaaaaataataatccttgttcgttgtatgctagcagagactaatagtctcttaaagacatcttttttttaatagaaaagaagacaccccatatttgttgtggctttggtctatctttgaaaaaaaatttctaccaaaaaatggttatatttttgttgcttattaacaaggtatggttacttaatctagttataataagaaaaaataaataaatctatcattttgatttaaaagttgattccagtttttttatatatattttgcatttgcctgaattcgtcttatgaaatgaaatctttatataaagattctatttttgtgaaatcagggactatgaacaacaaatacttgtttccaagcctatatttgattagattcaaaatggttgtcatgtagctacaacaatagagttaactttggacattgctcat

SEQ ID NO: 21341 - DNA, 784 bp, Glycine max
  Intron number 1 from transcript Glyma04g40270.1 (locus Gly ma04g40270) derived from phytozome v7.0 (chr-ID Gm04; pos 46372137 to 46372920 reverse strand)
tcgtaatgaaaaaagaaagaaagaaagaaaatgaataaacgctcgttcttagttagtgtatcaacttggttcagtgtcttgcaggttattccttccctgcagagaatgggaattggtcagatgatagttaaaaaaattgttaggtatgcagttgtggacgagacttaactcttaatcatcaagttattgttatgcttcagttgttgcagatatagaacttttgttttgaatggataaaataaaactttagtcgaagttacttggccaattttggagcgacttttcaattagaattagtgtttctttttggtagagactggcacaggttattgaggtgaaatttcaattttgattgaagattaatatagaaaagagtaaatagtatatgcaatgacaacatataggtttttacattatcatccgatcacaggttattatatcacaaactgttactaaaagtttgttgtaacttttataataattattaaaagttacacaccaacgattatttctaattagttgacaatcatgcttttacaataccatccagtgacattcatacttttatcataacttctttaaaagtcatactaacaattattgatcatgcaagtctaccggttgtagcattgttatctttatgattgatcacatgctgttatcattgtactttttttcttggccatagacctttgtagtgtgctggtacttgctatttttatttcattacagatagacacgtgaatcttcaaaatgtcttaatatgatttcatccttttgcaga

SEQ ID NO: 21342 - DNA, 733 bp, Glycine max
  Intron number 3 from transcript Glyma02g45430.1 (locus Gly ma02g45430) derived from phytozome v7.0 (chr-ID Gm02; pos 49701811 to 49702543)
aggtgtgcacttctcaatttcacgagtatttttttttttgtctcaggaatatcaattattacactaaaatgaattaattttgagcgttagttacttgttaaaatgattacaattaggctagatttttacactgaagaattctagaggttttttttttttataaatattatactgctgagcttaacttgtgcatttggatcatcctgagagggggaaaataaatttgttaaagttatgtagacatttgaagaagggaaggtaaaatgctatgcagtcatgtagagaccctgttaggtgtggatttgaccacgggaagtcatttatgcttaactatctgttgggtagatcacattatttctccttttccgtttttttttattaactatggaagcaaatagttttcttgtcaatttttgccacgggtatgacagaatctagtgatgcacagttaggataaatggagtgtactcgagtcatatggtgcattattttttattaacaacccaacattagcagtggcacacataggaaatggtgaatgaggtgaaaggaattgaagcttggacttttggtgaattatggtcttgtgaaagcacctttaggaaagaaatactagaacaaatatttgtattctaggttccaattgcagtcttattggacaatgaacatggaggtttgattttttgtgctgattgcagatttttgagaggaatcctaccaagattaagaatta

SEQ ID NO: 21343 - DNA, 486 bp, Glycine max; identical to SEQ ID NO: 20701
  Intron number 2 from transcript Glyma02g30800.1 (locus Gly ma02g30800) derived from phytozome v7.0 (chr-ID Gm02; pos 32983787 to 32984272 reverse strand)

SEQ ID NO: 21344 - DNA, 710 bp, Glycine max
  Intron number 1 from transcript Glyma05g03910.1 (locus Gly ma05g03910) derived from phytozome v7.0 (chr-ID Gm05; pos 3010491 to 3011200)
actagcctccaaggttcgtatatagtttgttggtagtttatactttagtttggtgtatcaagttttctactccggttttgtttttatatggttagctgtttttgagtttaaattcatgtacatggaggatatgtctaaattctagacgtacaatttggttataatcatgattgaaattgaatatagaaaacaatgggtagaggcttcattaatcatggattgcatttagttgaagacctttgatggggtaaaatgaattgaattgatttaaattatgtaaattatttgccaaacactctctgttagttaagttgcatgacaactattgttgatacggatgtgacttagtccagcttccaagttgtatgtagatgattttctccattttgcccttttcccctcttggaaatagtacttatgtaatttgtttcgacaaaggggagaggaaaaaaaatgtccagaactgtaaatgtacttctactttccatgcttgtgagttgtgggtctgtattattaagtccacttgtgttaaaaatgaatgatattgaatggggccaattaatccccttgtaattgatttttaacgaggctactggtacttggtatcaaacatgatggggttttagttagagttctgtatgttaatccaagttctcttgctcttcatacttttagtgctgcagttaggctataaccagctagaggggacc

SEQ ID NO: 21345 - DNA, 797 bp, Glycine max
  Intron number 2 from transcript Glyma04g06880.1 (locus Gly ma04g06880) derived from phytozome v7.0 (chr-ID Gm04; pos 5317023 to 5317819)
agaagcgcctacagttgcatagtccacccgaaaaggtgtttaatctctgttcattttcaagcacatcagtttctttctatatatatgtatcacgtaaaattacgatatagctagcatgccatgataagttgcgtaattgccttacccgcattgatgtataaaattatttgtgcatcatggattcatgataaaatactttatttttggtagtttgataattcaagcaatctaatgatcatcttggtttttctctttaacttaaaatattaacgttcaagttaattcaggttgattaaacgtgtgtttagtttcccatcaatcaattgtgtgcccccataaaattcatgagaataatatgtgttttaagtctctcaattttcagttaaaattattcttagttcctatacttcagaaataatgatttttggtcttcgtttttttggtgattgtgaatttcacacctatttacaaaacataggatattagggtgagagacaaaactcactaactacaaaaaagaactagaaccaaaatcatattttttaaagtataagaattaaaaccagttttaaatgaaaattgaggaacctaaagcacatttaaccttaaaattcaggttaaaataacaacgtagaagctactctcattagcttcactctatcgcacatcatctacactcttaacgtagaaccaaataagggatgtaagaccctttgttaagaaagatctctacattgacaaactctactcttcttcattaaggtttttgaatactttgcatcttgtcgtactccaga

SEQ ID NO: 21346 - DNA, 839 bp, Glycine max
  Intron number 1 from transcript Glyma03g40490.1 (locus Gly ma03g40490) derived from phytozome v7.0 (chr-ID Gm03; pos 46227826 to 46228664 reverse strand)
tgctcggataaggttgtgctgcggtgattcactcggtgagccttccaattccattttcttattacttactactctcaatcttttcagttgtattgtagtcaccattcttctttttttttttttttttttatctttctgaatttctctcttccgcttttgcttctgcctctgctttgtatctctgtaactgtgaactcctttttctttatgtatgctttttctctgttattttcgtattctctgtctcaaaatcattatcgcttagatagttagatagccgatttttatgtacctttctcgtggattatttaattgatgataaagtgtttttaactctgttgagctttgattttgaagtttgaacttcgcttcaggagttcatctatttttcttattcttgctacatattttttttcttctttcccttagtagatcgattcatgacacacgaacaagaattcctgtttttcaactagtaataattttgaaacatgagtactataagtttcacaggtcaatctgaggcttgaactattttgttttatttttctatctgattccccacccttttactatagaggtcatgttctgtttcttaattggtcagttttggtgtctttagtatttgtatttacgggaagaaagaaaatatcaatgcaaatgcaatgcattctaaatggaatattgcaaattcttgatctgtttgtcgtcacaggataagtcaaatcaaccaatacaagtccagataaattgatttatgatgatgatgttatgtctttctgtttgtaattaccagaatcttttaaccctttttatgattttgcagtactttgcttaat

SEQ ID NO: 21347 - DNA, 890 bp, Glycine max
  Intron number 1 from transcript Glyma03g26480.1 (locus Gly ma03g26480) derived from phytozome v7.0 (chr-ID Gm03; pos 33921349 to 33922238 reverse strand)
agagtggtggcgacaaactcacatgagccttgtttgttgccattggagtcacaaggatcaaagaaaaagaagaacctagttgatttgttgaataggttggccaaaaatagaaaaagggttgggtttaaaagttctgagatctcagctaaaatttatgcttaggactacttgtacttgtgggaattcaatttagatcttgaactaacatgctgtgagatagttgcactaagtcttgaaattggtagtagctctgtttttgctgttttagtcttttaattggagtcgtttcattgatctatatttcagtattaattcaaaacaaaagaaaaagaattgaattggactttaaaattgtttaaaaacttttcaaagtagatcaaaattaatattttggaaagcgcttttgaagattattagactactatggaaggtttttcacaagctagctagatatacaatcgtataatgttacgagaggggtgacttaagtgagggtttgggtcaaaactttggatgatatttagtgaatatgtaagaatgaaaataagtccccttacctaggattctcccctttttatactaattttattggacctagggtttatgggtccacatgttctatttaccaattaagcaatacacttcctattcctactcaagtacttctaatcaagtaatttcgctttagtggtccgtttattggtgataattatggtcaaatgatactcgtcatttgcatatgttgaaggccaagatttgttgttcgaaatatatgtgtatatggccgagaggatactcggttggatgaattaggtatcctattgttctgactaaatattttatccgatatactagccccctaagtcgttttttgacctcgaccaaaaaga

SEQ ID NO: 21348 - DNA, 387 bp, Glycine max
  Intron number 3 from transcript Glyma01g33750.1 (locus Gly ma01g33750) derived from phytozome v7.0 (chr-ID Gm01; pos 45952525 to 45952911 reverse strand)
gtgtggtagcacaaactcaacaactgaagaaggtagtcatatgggtttcctttggatagtaaaaatcttcgatagtgtttttggttttagcatagcttaaattttgctttgtaagctcatcttcaattgttaatcgattgtttccaacaaatcttgttagtggaagattcgagaatacaaaactcttatcggattggaactttgaaattatggattatttctttagattcgtaaaaatactggaattttatgttgttcacatttcaattaccatagacatgttttcccttctcttctggctgtattctcctagtatagcatggacttctgtgatgttgcctgctcacctgtatctagttattctttgtctgtgaatctacagtagtc

SEQ ID NO: 21349 - DNA, 1027 bp, Glycine max
  Intron number 4 from transcript Glyma04g01560.1 (locus Gly ma04g01560) derived from phytozome v7.0 (chr-ID Gm04; pos 1038643 to 1039669)
tggtatggattaatcttctgtgttattattaacagctcatctctttgtacgcctataggccatcttacttcaaactcaagactgttgttaatgttattgctaaatagttctatcccattcatgccttttgtaagataaaaggggtgttttcattgaatatagatttcaacattttagcaaacgtccagatgatttatccacgtgatttccctatgtttgatggctttgttgaaacttcagaggctcagatatactgtagttatgctttcagtactactgtttgttatgctttccctatctttgatggcctaggtagtgtggatatactcagagctacacaaatgattgcagacactagttgtaggctgtagcacagagaactgatgccgtggaagtcaagcatttttcaacttggttctcagtcctcttgtcagctttacaaagatcctatcatttagtatttgtcattcatctaataaatcccttttaaattttgaaagatatggtagggctaatttcaaatagttgttatctgacttgtggagacctcgtaacagcttcaacctatgtgatttggtcttgtactttccttatagtagggtcgtggcccagattctttattcttttgtcctgtaacttgattttgattaccagacaatttattttataaattttggaacagaatgtgtcattgcatgtttagtttatttgacatgatgaaagagaatgagacatgataattgtgtcagaattacatgaatatacagttggtgctaaatgttttattactacagaattgttttatttttcaactctaattaacataattacataacatatactctaccatatttacaatattactataattacataatttccatcaaaatccataagttctatttcagttggtgctaaatgttttgggccctttgtcagttattcattaccaataagtgataaagttgaccttattgattgattatatctaggtaactggatccaagttgtggcggcaagtaggaga

SEQ ID NO: 21350 - DNA, 946 bp, Glycine max
  Intron number 1 from transcript Glyma02g13810.1 (locus Gly ma02g13810) derived from phytozome v7.0 (chr-ID Gm02; pos 12130341 to 12131286)
gggtttctttcaggtttggatgattattattggattattgtgtgtgttcctttgttctatgtccttttttataatctacaggcttgactgtttttattattttaattttcgtacctattataaataatatgcagaatcactcacttttcaaagacacatcattataattaatatattatatattatagagatcaaagttttgttgttcataataattttatccaacttaaataaaattatccctaaagaataattgtaaagtgtctcaaaggtaatcgactaagaaaaaatgaccatatatgcaactgtggaaagttaaattgtgcttctaatcttttatagagttaatagacgtgtaatttaaaaccttgccaccgtatacattttcctcttcggtataaagtttagattaagggaatactcaccctgagattgatagttatatcagtttaattaactcaggtcttattttgatatttactcgtacaaaacagggttaatgatatggtaatacaataatattttgataagaataatacaataatatataacagtataagttttgttctgttttttcttctctaactgtgtatattaaaattaaataatcaattaatgccttgcgattgcagttcattgttctaccctcgattttacgtagatattgtcataattcaagaaaggataaaacttacatacaatacttgtagcacagttggtgctatttttcaatcaaatttagagttttacctcaataatacgtgaaacagaggaattcattaaatgtcattatgtattatcgaggtataacttcaaatctgattggagaacatcaattcctgcataatagcatatattgctttttccaatgaagaaattgatttttatttgcttgttaatattaatgacagttgatcaatcacggagttaatccttgtttggtgga

SEQ ID NO: 21351 - DNA, 922 bp, Glycine max
  Intron number 4 from transcript Glyma03g22880.1 (locus Gly ma03g22880) derived from phytozome v7.0 (chr-ID Gm03; pos 29519397 to 29520318)
tttcatttgtcatatcatattgagggattcaaattgttttctccattttaaggaaggataatgttcatgtggggattactgttaggatttaattttaatcttaatacttgtctttgatatagtttctaggggaattgatacatgatagttttaagcttatagggcaatgttacacaaaatttgctctgtttctgttgtaccatcatcaaggttaaattcatttttatgatatttgaagttagaacatatacacggagaaataaaccttgttctagaatattaagagcttaatgtatacagaaatggattctgagacagaggaagcaaaactactttttttaattaaaatttgaagcaagttgtgcaaaagatagacatttttatttttctaatttcatgattaaatatttgcatcagtgaagaatgattccactatcataattgaatcttgaactttaccaattagtaacatgtgtatgttagttcaaaaatgattccactgtcataaaccaattttacaacattggttaagaaatgatcaacaaaattcaaggcaaaaatagccttatgtaagggagaaataacaataaaaaatgaattgaggtaggagcatagtgtgctcaacaaagttttcaaattcagagaatcttctcaagaagaaagacatagaccaaaaagaaatactgaatatttagacacctagttttgagtttgagtgtgtggtccaatcaggaacaatatatccacttgctacaattgctatcaatcaggaacagactacagtttgagtgtgtggtcactggtaatcatagtcttacttgaaggtaatttttaggaaaatttttactaaaaagtaataatacttaacaatactcaacaaaactttcaagcaatccagacatagaaaaaaaaataaagaaac

SEQ ID NO: 21352 - DNA, 319 bp, Glycine max
  Intron number 2 from transcript Glyma02g14920.1 (locus Gly ma02g14920) derived from phytozome v7.0 (chr-ID Gm02; pos 13507428 to 13507746)
aaaaaggtcggtttttgatatgttacgatatgatgtgttcgagtttgtgagcctcatttttgcttgctgtttgttttagtgggtctctacttttggattttttctcgtcttatttgatatgcttttattgcatggcgttgaattttgttttcatctgttggttcctcattaattttcttgtcactggggtcctccattattgtatggtgatgtatgtacgattgatttctcaaaactgatcatggccttccccttaactctcttcttcttcttcttcttcgcagttctctttcaatattggcatcctctctgtctttgg

SEQ ID NO: 21353 - DNA, 630 bp, Glycine max
  Intron number 1 from transcript Glyma03g29450.1 (locus Gly ma03g29450) derived from phytozome v7.0 (chr-ID Gm03; pos 37439740 to 37440369 reverse strand)
ccgccgtcaccaagaccatcgtcgaagtcgttcaggttcgatctggtgcttttcagtttgtttggttgttggatttgaattttgtgtggaaaattgaaaattgaaatgtcttacagattaaccactggtcttgagtttgaaacaagagttttaccactcgtaacgggttgactcgaacaggattgtctctctctctctcgtggaggatacctgtgtacaaaaaattaaagttagaatgtcttttggggttgggagaattttttctttaacgagctgatttttttttttattattcatagaaatcgaaaacagtgtgagggggtttaatacaactcgtacactctcctcggtcatctgagctagacccgcttgacatttaatgggctgattgtttgggtacactgtttattgtgtgggttttcacagtgaggattgatggggtataggttattaattggtgtttactctgttgtgtttggggtttatgagctattttatgaggttgtgccctttttttttttatatataatacggggttcagtttgtgtgcttttgggaatctttgttcttttcttgcaccagtgtgtaccttggtgaaatagggattgaattgtggttgttgtgttgcag

SEQ ID NO: 21354 - DNA, 949 bp, Glycine max
  Intron number 1 from transcript Glyma02g02070.1 (locus Gly ma02g02070) derived from phytozome v7.0 (chr-ID Gm02; pos 1497467 to 1498415 reverse strand)
cttgtggccgacggattctccaacactctcaccaggtaccacaatcgtttctcatctcaatttttatcaaaaaactgtttgcagtttcagcacgttcagtaattttctaagtgatatgagtttgtctatttatagttccaacattatcaactttctgtcggataatattagagtgttttctcattttattaattttttcattcatagaatacaaaatcttaatttcttatcctaggctaggctgtctcttcagaattcaaatacatggtacttgacaagaaacaacaaaagaaggaaattaagttgtctgtttcccactttaatttccttaagttagagtattattttatacgtaattttttataatattatttgtttatcacaccacacgttaatctctttattcatctcatccactacatagcttttttataaaataaaatgttgtaataaataacttacaactaacgtttctctttcttttgttaaataacttgttgagcgctctattttcaaaagccacaatagttggcttaaattttggcctgagggggttatttattgttctctttatgaaaagggggattcttgttctaacgggttattaaaaattgaataatgaagtgagggattaataatgaaatatacttcctttatctcattataattatcattctagattttttaaaacaaacaaataaaaaatataaattaataaattaattttctttattggaattaatgtaacatatgatagttattaggggtataaatagaaaaaataatgaataatacattaaaaaataaaataataatattttgaaacatatattttttttattatacaacaattatttttaggacggtggagcagtaattagtgttatgtggaattggttttgtgtggggaacaggcgtgggtacgcagcagcgacacaaagcgcaacaa

SEQ ID NO: 21355 - DNA, 693 bp, Glycine max
  Intron number 1 from transcript Glyma03g37630.1 (locus Gly ma03g37630) derived from phytozome v7.0 (chr-ID Gm03; pos 44179213 to 44179905 reverse strand)
tccgtggatcgccgttacgtcgagagaagccaaaggtcattgggttggtgattattaatggatatattcaagactcaaatcacttgtatatatgcatgcatgcatttggtgtttcttctcttgtgccctagctaataacatgtgattaagatgcatgtcagatttttaattaagggacaagaatattaattagtcatcaataagaaagaatataggtgatttgagtttggatattatgttcctttttgtttttggttctggttctcttcatttaaattgttcttgttgttgatggggaaggctgaaggcgtcaagatagcagtgtggcaatttatctgtttcttttaggagactcttaaatgaaataaacttcaatggagagggaaatgcatgtggtttgtgcacctttcacttttttttttcttgttgttatttagtttgattatttttatttttattttagattgctaatctttttatgttagtgccttaacatttatattaattataatttttttagttgaaacattaagtttttttttttttgttgaatagatgaaacattaactaataatctaatcctcgtcttcttaatttcatccgaaaatattttataaatgtagttttagtaatttcaagagaaaaatgtccatataagtaatacacttctatacatacaaccaatccaaccag

SEQ ID NO: 21356 - DNA, 597 bp, Glycine max
  Intron number 2 from transcript Glyma04g23050.1 (locus Gly ma04g23050) derived from phytozome v7.0 (chr-ID Gm04; pos 26290699 to 26291295)
tctcgagttttctgaaaattgtctcctctccccaggttatgttatgtatatttttctgttaactttctaattatcctgttttgtatgtttcttttggtgtgctgtgttacatttattgttctcttagtttttttttctcttttcattcttattttttggaacagtttttgagaatttcttatcctcttgcatttgtacctcaaagttcccgttatatcattcccctaccttatctccattgttacatattcttaactttctgctttagaaaggaagatagcatactgaatgaattaacaagtccggtactctagttatggataggacttagtagtcctttctgtctacctgtattttgcattttttcatttgtcaaaagttttgccatttagatagtgctgactttttgaagtaaaattgaaatatttgaaataatgtaatttgtttttggttatttatttaaatacttctccagatctttgaattctacttaaaagggaaaacgaagaaaataaaggaaaattaccatttttctgtttataggttaattgagtatcttctgatacctatacagctttcttactgccattcagatat

SEQ ID NO: 21357 - DNA, 694 bp, Glycine max
  Intron number 1 from transcript Glyma04g09040.1 (locus Gly ma04g09040) derived from phytozome v7.0 (chr-ID Gm04; pos 7216790 to 7217483)
ttaagtaaggtttttcttttttctttcttctttcgctttacgtttcgaaatttcaacacgtctcttccgtttattttgacggacttttgctaattttgttgctaaacgaacttgtgcttgcgtttgtgtttttggctttttaagcgtcgtgtgtatatatgtagagaattctagagatggagattatgctcaatacaatgaaattctgaagagccttagatgactaaatacaagtaaacgagtttaaaaacaaaatttttgtgcactgcagcttgattgaagtaattggtgccgtgaaagtggaaagtttacaagcaaatttcgtggtttgattttggggggttttactttttcggtggtttgtgttggtgtgctttattattgactggtgggtttactattgaactgtttacaaacagcaaagtgttaaggttcacaaaattgtaatagttgttttcacgggattcagttgttttatgtccttttccgagatgattgatgagacagtctaattaatggatagttagaaagctactgcttattgcctgtgctttcttttcttggttttaattccctgcctttttttcttgttagcatgtatagctaactttctgtttgctttctgtaatatttggctcaagtttttttctcttttgttctttcaggggcattctaatcatcattcacgggctta

SEQ ID NO: 21358 - DNA, 451 bp, Glycine max
  Intron number 2 from transcript Glyma03g28460.2 (locus Gly ma03g28460) derived from phytozome v7.0 (chr-ID Gm03; pos 36400107 to 36400557 reverse strand)
gagtagttttcgcaattttgctgcaaaaacatcaggtttcaatacttcaattatgctgaatcacttatgtataatctgttatgcaataaccctatcatttcaccttcttttagtgtcctctctgcctggggaaaaaacaaaacaaaactctagctaggtcacaaaaaaaaaaaagagtgagtaattgaagttccggtgataaataaaagagtttaatggtcatgacactgatagtctaaaacacttttacactggcgttgaaccacaaatcatcgttaatataacttttgaagtaattatcataaaagtcaacaaacttatcatacataatggattgtgattggatgatagtgtaaaagggataaccttttttctctaaaagaattcatgtactcttctgaggagctgttttgcagcaactgttgtgagtgcggagcggctcaagcggtat

SEQ ID NO: 21359 - DNA, 598 bp, Glycine max
  Intron number 1 from transcript Glyma05g01740.1 (locus Gly ma05g01740) derived from phytozome v7.0 (chr-ID Gm05; pos 1219195 to 1219792)
accgcgtacgttcaacccttttaatttcattattttttttgttctcgtcgttgggcagatgaagatgatgttttaatgttatgccatagggctagttggtgcatgattgatatgagattcaggtgattggttttgaagaataaattgaaacagaatgatttgtgctgaagctgcattctctagggactcaccataatgctgaataaaggattcactacgcgtgatacttttgatttttatatttcaattcgaatgattatgccatgccaaactaattgtctgaactctgaatttaggatatgccaagctagtagtgtcttcaaagttgaaaccctctactggatctctaacttggtgactttaggatatgttagtcagtaagaatttggaaggaaagggatgaaactcatgaaaggatcaatttttcatttctaatgaatattctctattccataatttgatgatattttatagaaaaatgtcagcaacatgcttttttctaaactctctttactattggctgaaatttgtgtcaagattcatggacatctgttgttgctattgtctacagtcatctgctgaaagagtcaaagccaag

SEQ ID NO: 21360 - DNA, 701 bp, Glycine max
  Intron number 2 from transcript Glyma01g38640.1 (locus Gly ma01g38640) derived from phytozome v7.0 (chr-ID Gm01; pos 50687549 to 50688249 reverse strand)
gtcagaggaggatcataaagggaaaaaagttgttggtaagatttatgcttttgttgtaccttggtagttaaagttcatttccaggttagtttggctcacatttaatactgttgtgattctggatactgcatatgaggtacctaaactcgaagatcttaatctaaccaaaatgctcgttgatttattacaagctctcacacctcttctatatttcctgtctttctatgcctatttcagtgtcttcttcattcttgtttcagtactttatgctttgttgaacaccccaaaaaaaatcatgctttgttgatcaaaggctatgatgctatcagttgagtcttttatttacatcttaatcagagtggagctaagaaataaatttttaaattacttcaattagcttctagattactttaaaatataaatttaatatataagaattatggggatattctgattctggtgtttgacttaagttgcaactcaaagtgtttaaagtatatttattatagttaatagtccattgaagaacttttaaaaaaaatataaaaaagagtgcattggagaaaatctgaagtttcattggtttatgtgttcagaaagtgaatgtgttaagcaattaattatttccacaccaaacatagccaaaaggtctcatgtttttttgtctcataataccctagattacgactctcaatctgaag

SEQ ID NO: 21361 - DNA, 698 bp, Glycine max
  Intron number 2 from transcript Glyma01g43610.1 (locus Gly ma01g43610) derived from phytozome v7.0 (chr-ID Gm01; pos 54569893 to 54570590)
acaaggtatgatctcagctttcgcttgatttttgttactcttggttcagcccattgacagagaggttgtttatttgtggcatccttttgaatagaaaagtatgaactccatattaagcgaattaatcctctgttgatctttattcatatgaagtttgaacctggaaaggaccaaaatgttattttggctattccaataactgaaatgaactgagtagttgagttcagtgcctagcaaatttaccctcaattaatcttatgttcacttgatccagaaaatatgaaatggaaaataccagaatgttttcagtgatacttgatagctaattgaaattggatttgatttgtgatgagtattcttttactcttaccaacttgcattttatctattaaaacactgtccagcttctcaaatctcaactgtagtttccttcaacaaaactacaactctctatccttcaaccagcttcctgtctaccctctttctaactaagaaacttcatgataaaattaactccttccctgcttatccctcattagtttgaatatgttgattttctggcaaatttatgtgcctatttattgaatagtatatatattttatttcactttaaaatcatcttcaaaatttctctaatttgtgcatctgcttgttaattaaaaaactaggcagtacttgctgatatcctagaaccaata

SEQ ID NO: 21362 - DNA, 746 bp, Glycine max
  Intron number 1 from transcript Glyma04g42180.1 (locus Gly ma04g42180) derived from phytozome v7.0 (chr-ID Gm04; pos 47972483 to 47973228 reverse strand)
tatttgcaacaagtctctccattggcatttatttggtaggttgcctttagtttatttctaacatatcttatgcttcaagtctcaaaaattacattttatatccactaaagtttattttttgtgaatatgggaaaacattcttgtagaaaataatgaagctgttcttgagtggcaccaaaggtatgccatcgccattgggactgcaaggaattgcgttttctacatgaggaatgtcgtggtggtcctattattcatcgggacatgcgaccaagcaatagacttctcacccatgattttgttcccatggtaaggtagcacaagttaaggttcatggatagtgtataaaacagttttggtttgataacattcacattactcggcctatgtttggtttacaattacaaaagtatttttgccaatttcactacaaaattgcacgcttcaatagatacatgaattaagtgtgtttggtttatccattgaaagacccctaacactgttgaattaaaagttatgaattcctattatcataaaatatgcctaagaatatttgttcgttcaacgttaacccaaacagaccctaagaataaaaaaaattattacttctgaggtaaaaatacttttgaactctcccaattttaatctaaacatgtaatcagtattcccatctttctgagaggcttcttcttgtattcacattccctttacacatgcaactcatgtacccatttgatgacaaataggga

SEQ ID NO: 21363 - DNA, 1021 bp, Glycine max
  Intron number 4 from transcript Glyma02g05070.1 (locus Gly ma02g05070) derived from phytozome v7.0 (chr-ID Gm02; pos 4117859 to 4118879 reverse strand)
cggtaaacaactatcaaaacactagtaatttgatatactgtcttcacttaaagctgtcaaatacattttcaccatgtattaagtattacttaatagtaattttatcagtttatagtgttttctatcatttgttataaaattattactttgtccttctagaactcattacatcaatgcatatgtttttgtgatataatgttcaggaataaggaatattttacatgctagtattgttgaactaaagagtaatgtttaaagatgatgaataaggcaaaatcactcaattgttggtttcctcctacctttgttatcccattttcttataatctagcatgatatcagtatgatcaataaaattttaatggcatgcatactgatgggcattaagctcccaaaacacaagggaagttgatggatttcatgatccaaatactcatcagatgcctaagatcaggcccaagatcattcagtcaagctgagttccttgatgatgtatgggacatttttgaatcccttgcagctttccaaagccaatgatgattgcccctttgccagaatcaacatttagtgcttctggagttcttgatgacggtaaagggaaccaagttctgacggaggacctctgacacatcattctgatgactatatcgtttcccaactaagtggattggattacttgtgttttatggtgatgatccagttgggtgtgtctcaagatcagaagaccttagaagcacatattgttattcactcttgtatgtcaagactcatgtccgacgtctcacatgtcattcatattgatatgccaattcagatatgtgtttgagtaaactgttctgtaatagacacatgtatccataacgtacaattaagaaaactgaagtgaccttttcagcattccaagttcagtattttaatagatatgtttaccatgtaatttacatttgtttctcttttttctcttatcatactatgtctttattctttctctgcttgccaggtactattttgctgtggtgga

SEQ ID NO: 21364 - DNA, 572 bp, Glycine max
  Intron number 1 from transcript Glyma03g07470.1 (locus Gly ma03g07470) derived from phytozome v7.0 (chr-ID Gm03; pos 8058923 to 8059494 reverse strand)
caagagcctggaggctcagcaacaccttgctgaaggtttataatcaattttatatatatatatatggaacattaattttaattattttcgtatattttttttataattgtgttgcatatccatacaattattcatcataacacttacgttacatttctcctaattttttacttccttcaaattagttttattcatcatctatcatatctgtccatcagatttttgtctatattattcatcacgtaatttgttcatcatcttcattgaaatcattatcattatctatatcatactagtccatcacatttttatcgatttttcttttttactttcttttccttgtttttttttttttttttgagtatagacactttcattaggcacaacaaggttttttttcacaaatatctcaatcgttattttatctcaagtgtttgatgaagttatttttgtgcatgatattttttttcttctttttttctatttgactttggattttggggtttatttattgttgattgtgcatatatataaaaggaaggagcaagggagggcaaacaaggaaggaacag

SEQ ID NO: 21365 - DNA, 673 bp, Glycine max
  Intron number 1 from transcript Glyma04g41250.1 (locus Gly ma04g41250) derived from phytozome v7.0 (chr-ID Gm04; pos 47130655 to 47131327 reverse strand)
gaggcttttcttcggttgagttcctcaggtacgtctttgcaaacattaatttttcctatatgcatgctttgccactttattttaatgtctttttgcttgtttgattgctcgtccatttattttaatgtcttaatgctcgtacaatatagttattacttgctctggattctagttggtgttcataatgaatgaatttggggagtgtgagtggcagtgtgtctattggagtagaatggaatggagtgaatttaaattaagttaaataagttactaaataagaaggtaaaatgacttaagtttctctcataagttacaattaacttatgcacaagttaatttgtagaaattatctcatttagtttctctaaaagctgattttaacttgagcatgagctaattttaatttatgggagaagttaaattcattttatcttcttatttttatatcttataagtgcttattaagaagtttttccaaacatggccatagtttatttcatttcatcccttacatcaatccagacatatggaaaatccacccttgcactcattgttctttgtgttgtgtggatatgtgatttcttttcttttctcaattgactctggtaaatgaattattattctttacacaatctgaattgttgaattggtctgccaagtgccaactacaggg

SEQ ID NO: 21366 - DNA, 848 bp, Glycine max; identical to SEQ ID NO: 16530
  Intron number 1 from transcript Glyma02g41470.1 (locus Gly ma02g41470) derived from phytozome v7.0 (chr-ID Gm02; pos 46581949 to 46582796 reverse strand)

SEQ ID NO: 21367 - DNA, 699 bp, Glycine max
  Intron number 1 from transcript Glyma02g24290.1 (locus Gly ma02g24290) derived from phytozome v7.0 (chr-ID Gm02; pos 24871810 to 24872508 reverse strand)
gtccgtttcggttcggcaactccaacgccccctaagtaatgttagagtgatattggttaattattttcctttttttcatgctttgattaattaattaattcagttgcttgtacaatcgtcatgttttagttcctacatccagaaactaatccttgaggtccttgcgcacatacactcttaactcgttttaatcctgcagtgcacatacacattctagggtctgtttggataaaaatctccataagcacttctaggagaagaaaataaaaaaggaaaaatgaaataagtttctttgcatgctaaaattagtttatgcataggttaaaagtcaacttttacagaagcaaatatgagagaacttttataattttgcttatgcataagttaattttagctaatagagaaactcatttattttttatttattttcttctcctgaaagtgcttgtggagaattttatccaaacaaacccttaatctgtcttagtctctacaattttggatggcatggactaaaacagattagaatgtgtatgtaactaaaacgaactagtttgtaggtggaaggactaaaacataaagattgtgtgtataaaaactaaatgagtaattaagccttttcttattttatacatttttacttgattttgaaaaattggtaattttattggattttatgatgtgtgtgcagttgagtac

SEQ ID NO: 21368 - DNA, 584 bp, Glycine max
  Intron number 2 from transcript Glyma01g32270.1 (locus Gly ma01g32270) derived from phytozome v7.0 (chr-ID Gm01; pos 43721176 to 43721759)
tattggctgttgccgctcgtgactctgtcgttgcggtgagtaacactacatactaccactaattaatgctctgttgaatgattattagtacagtttatattttaattgtgtggttgtgcctatagataagatagtaatgctgtcattgcttttaaaattttgactcagtaagcatatgaatttttaaatatatagaatagaacttcgaatattttacaacatagtttttcatttcattacaccaattgaaaaagagtacgtcttttttactctttcttgtaaagagagatggtataaattatttttacatcatgaaagtcataagaagataagggagaagatatcaataggattaataatatgatgaacttacagaaaatttttaaaatgggtattgtaaaaaatattatatgaagataaattaaacactaaattatttgagtgtgatcatgtgggttgatttagacatccatcatccatgttctaatgaaatttgagtaataacatttaacgtttgtttttagtaacatatgagtatgagattaacaattatgtgcatgcccaatgcagttaggagggccatc

SEQ ID NO: 21369 - DNA, 745 bp, Glycine max
  Intron number 1 from transcript Glyma02g14770.1 (locus Gly ma02g14770) derived from phytozome v7.0 (chr-ID Gm02; pos 13306663 to 13307407 reverse strand)
caccttcacctttctaggcggccacctcgaattcggtcactcccttactctctctcatattatgtttttttttcgtcaaacattttgaaaacgaaataatcgagtaatgcttagttttgtttttatattattattattattattatttgaacttaatatgggcgtaaaaataacttagaattttatataaattatgaatttttattattattaaactgaccttagttagtgcagcttattttttttaagtgcaaattttatttgtgtttagtttaattttgatgctttattattagtaaaacaaaattgtattattaattaaataaaacatgttagtaatatgtttttttaaatattcttttaaacataatctttattatgaactatttttttaaaagagttttactttttaaatttttaataaattttaaataaaaaatgtgttagaattagatgattatgttcctaatactttttaattaaagttactctaagcattatttttaaagtaatttttataaaataaaattaaaaattatcatttataattaaaacccaccaaggttagctgggtgaaaggaaagttattaagtttgtatgatgttttatgtttaaactccattactgttattgtagataactaaaaaaatatagtactttgtttaataattaaatgatgagaaaagaattatgcatagatagtgtaatatattttatagaatcatctaatcacaattcatcaggt

SEQ ID NO: 21370 - DNA, 828 bp, Glycine max
  Intron number 2 from transcript Glyma01g00300.2 (locus Gly ma01g00300) derived from phytozome v7.0 (chr-ID Gm01; pos 94459 to 95286 reverse strand)
aggacaacaggtgaagccattttttgttttgtttagatttcttaaatactactatgtccgcaataatgaggagctgcaagtcagggaatatattaacattttaacagtgcatttttaattatggttgtgaacatctttaatccgatctttttgatatttttggaactggactaatttgactgttagttgcatttgtaaactcttgggcttccttattccctgaagaaataacctgtgtatggctaattcataggaagaaagtagttgtttactttgtgaatctgattgaaaatttaatacttcatcatatactagtaagcacagttgcacttggtaatcaaaacatttggttatatggtcctacaaggtaacttttaaaaccaaaaactgtcttgatgggattttgaactgtataccccatgaatactccaccactatattttgatattttaattttgaaaaacagacaaacattccttttatatggtgtttattttatgtgtgttggggggagggtctgaacagtgttcttttggtggagaggagttcacaaggctagaacctatattgttaattgtgttgagtaggccaatgggttcatgtaattttcctggtggtatttatgtatttgcaacttcatcttttttattgaagctttattttttttcccttgttggtgtttttttaatctgggtttacaacaactcacgcacattgctcaaccaattgagctagacccccttgtcggtgttttatatagaatgaatttatataacttgataacttgatgtgtattgttccttggacataggttgactacaatctttg

SEQ ID NO: 21371 - DNA, 845 bp, Glycine max
  Intron number 1 from transcript Glyma02g07030.1 (locus Gly ma02g07030) derived from phytozome v7.0 (chr-ID Gm02; pos 5627604 to 5628448 reverse strand)
acgttgaacaccgcccatcttacgtcttggaaaaggtttgcttcttaattacactcttgaggtttccttctgaaatttcaccagttttcttacttatttcttcagacattgaacaccggccattttttttatcttgattttcttgaaagtttaatgcgacctactttcagtgtgaagttttttatgccgccgtctgcaaatcaaaattccatcatatgtgtgatttttatttcttagaaaaagtttaaaattattgtctgtgatccacactaccaggtaactctcattgattacttatttatttaatgaaagataaagtgatcatctcatatgaaacccaccaatgtctatgatatcatgtcagcacatgaaatataaaaaaatggatacttcatatttatacttttaaggatcaaaaataaatatttagattttggagtaatcaaagaatttttttacagaataaaattaaaatttaatttactcattttaccatgaataaaaacaacaatttcataatttgcagagataaaaattaaagaaaattttttgggaaccaaaataaaaaccttattataaaaaaatatgatgatgctagttagatatatttgaattatatattaatatgcacgtcatcaattatactactttttttatagataattaatatgaaaattctttagatttcaaatatctaattcttcgctgatgtcaaccaaaaatatacactctgaaaacttgagaaacatttcaaatcttattcattgtctatgtaaagaaaaatacagaatgaagaaattacactcatctttagcattattataattctttcccttgacagtaca

SEQ ID NO: 21372 - DNA, 486 bp, Glycine max
  Intron number 1 from transcript Glyma02g46330.1 (locus Gly ma02g46330) derived from phytozome v7.0 (chr-ID Gm02; pos 50317665 to 50318150)
cttcatccttatcacattcttttcttcatcatctggtaatatcattctttcagtttctacatacacaaaacttatatctagtttcatatatatttttttttgtatttttctctaatcaaaattagaatttctccttcataatctatctttagacctttattaagtcagtttgtttaaattatttgtctaaaaaaatacttattttaataaaataaatattttttgtttttctaaactgctttttatttttttttaataatttttttatactctaagaagcaaatcttatttaattattgaaaaaatgttttttttttaatttaaataaagtgattgatgacatgtattgtgaagatgaactgtaggtttaattagaaaataatacttatgaaactgcatgtaaattttgttgcttcatttcatttgcatggctataataactttaaactttgtatgttgcagaagcgggatccgttggaataaact

SEQ ID NO: 21373 - DNA, 1038 bp, Glycine max
  Intron number 1 from transcript Glyma03g38190.2 (locus Gly ma03g38190) derived from phytozome v7.0 (chr-ID Gm03; pos 44586734 to 44587771)
agcttcatcacccttcttttgcatcatttatatctgtaagtagcatttgcttaccaagttaaactgcttcctgttttgtcctatctagaccgttacggttatggatctgagttttatttatattttttcactttcttctgtgcttcctcttttgtcgtttgagtatatcaaatgaaatactactattttctgctgagttttttcttttttttagtattggtctttttcggtgtagatctgatgctttcaggagaataattatcccttctaactgtttttctctcactggatctagtgttgatgcctcatgccggatgtgattctgttcatttggattttttgcttgttgaactctagcattgtgttcgtttacgactgatttcaattaggactattttttcttcttccaaggccctaattttaaattgaaactgttattgttgtgatgtatcttgtgctttcctgtttctgaacaaacttagatacaggttcttacgtgtttttgctatttcagattttcagttaatgtttccgttctaaattagagtttcatatcagaaatatgtgtaacaaccgtttgattttaaagttacatgtcataggttttaccaaaataaaattccaattctgattggagaatagcaacaaaacacctaaaaaactgcatctaagttttgtccttcttgaaatccaatttactgtccaacttggtgctctagatatatatatatatatatatacacacacagacacgcactttgttatcgttctgtctgcaattatttttcaggaccaatagctttttcaaaaagtagatcaagatatactaatatttaattcaaccttggcataaactttcgagattttctatcaatttgttgtagagatgcgttctttaatttaattccttttgcaatattatctggaatctctagttatctgccgttcaaaagctccaagagaagtctttttttttcttcttttaagcttttgtgctttgtgatactaaacattgtgttgttttctgtagcttgagaa

SEQ ID NO: 21374 - DNA, 412 bp, Glycine max
  Intron number 1 from transcript Glyma01g43240.1 (locus Gly ma01g43240) derived from phytozome v7.0 (chr-ID Gm01; pos 54299948 to 54300359 reverse strand)
cattttgctctccggtgtccctcccttctggtcaagtaaacctccccttcatgtaaccaatttcatatttcatgtttagtttattacttgttttactgttttatttaggattttaattttgtaattgagattattatcctgcatcacaatctgagcctgacttttgctgtaattgaacattgatgcgtaagtaactatatctgcgtgagatttaggatgttaaatggttgtacatttgttttttggttcagattttttaggtttgatttagttcatgtgttttagtatggaaatttccttttcttgtcatttatttgctgccttgccttgatgacaacaatagtgtgccttcctacctttctcttactatgtttttgtcctttgtatgaagaaaaggaacaaggtatctttg

SEQ ID NO: 21375 - DNA, 1002 bp, Glycine max
  Intron number 1 from transcript Glyma03g27270.1 (locus Gly ma03g27270) derived from phytozome v7.0 (chr-ID Gm03; pos 34934739 to 34935740)
tcaactttgactccgttttccatcaactctctcaggtcatttcttcttctattttcctcctcagaaccccatcttctttttcacacttaatttttttctaggtttctctcgaatttcgtgttcgtttgtgtccttgataaagttcccctttttttatttctcacgtgggggttttgcggaaaatacccctttacagaatcggattttaaattgaattcacgtgcttgtgtgcgtgtgtctgttgaatgctttaattctgcgactgtggtgtgtgcggctgttgaatatgttgtgtgtggaaatgatttttgtgatttgtgtcgttgggatgtttttagggtttatgttgttattgccttttcaattgtactttttatgcgtatgatgttgaaatgctacattaggtgttgctatcttcctgtgacatggagaataatcaatatagcattttactatttttttttattgttcactattgtattttagtaaattggagtatgaaatgattaactgttgaactttgccctttgtaaagatgatgctgtgtgtactgataatcaatatttttttttctggtgttttgagtttatgcacagctgaagagcagagggattcctaagagaagttaatggttttagtgaacaaatataaaaatataatatgctaaggctgttgttttcttgtttgataatggtccagcattccatattcttgctctaggggttcgtaatatgacacgtttcactatgatttgtgtatatctgaatgctttatagacttgcacatctttgtttatctcctgtcttgctcagcccacactttttgtattttgttctcctgtgaattaccctaatttagttaatcttggtggcagaccttagtagattgctttggggtgctcttcaatttttaatcaattcatatttgtaatcttctctgcattgtcatattattgacatgtaatttcttccgctggcagttcacggaatttggaactactgg

SEQ ID NO: 21376 - DNA, 951 bp, Glycine max
  Intron number 1 from transcript Glyma02g01910.1 (locus Gly ma02g01910) derived from phytozome v7.0 (chr-ID Gm02; pos 1384532 to 1385482 reverse strand)
aagaggctcgtaagtacgttttcaacaaattactaagagaaaaaaaaatgtttttttttcgccgtggggttattttgttttgaattatgttgcaacccgtaaaacaaaaagtttttttttttaatttttattttgatttttacctcaacacccacaattgatctcggtgtttgtcctagattttgtagtgactttcaaggttaaattttattataatgtctgggttttaatcgtgaattacgtcaaccccttgttgtcaagatcaattctcctattgaaaaggatttttgccgaaacgaatttagtgaatatataggttggtgattgattacgccgtggcaggttcgttgtggcattgttttcatgtctctgaaaaaatgggtctagagatcttttcggtcaatgtttatggttctagctggaaattttctattaatgctctgctagtttcaattacatgttcagtttctaattatcgtatttatacctatgtattcacttttcaattttcttggaacgtttttaagaattatatccaaatttaattagtttgctttaagtataggttgttaattgttagggtgtttcacaaataccccttgtttattaccttttgaaaatatgaagtgttcgcgcctttaatatcaaattgcatcttttgtccgtttgcttctgtaatcaatactatctagcagtacttggttctctgggcgaaagccaacatctcttcaagaggaagctgaaatggaatatttattttgttcttcaagctgttattttatttttttgaagttttgatgactttaatttcattatatcttatgttttgatctccacattgccctctctgcagttcttacccaattagcaatgtcggtgtgctttaaattttctccttttcttttttcctttctaggtaactgtgcttttactcataatattaagcactgc

SEQ ID NO: 21377 - DNA, 800 bp, Glycine max
  Intron number 1 from transcript Glyma04g12500.1 (locus Gly ma04g12500) derived from phytozome v7.0 (chr-ID Gm04; pos 11593273 to 11594072)
agtaccgagatcgatacggctccttccaacaaaggttcgcatactctgaaatctcaatttttcaccctcttgtttttttatttttctttgaatgtcttggtttcgttttcagctctattattctttcatttaatttttattttatttcatttttacgtttgacatattaacttccataacaacgatttttggttgttttgttttaatactgttatgcaattatcgccaaattctagatgaatttgagaaattatggtaaaaaaaggtgcccttgatttttattatttttttgtataaaaaattttgggccttattctatcgaaaccctaatttctgggttgtctattggttaagatgaattttgggggaaaaaactgttcaagttttccttttttttaaatgcccttgatttcatttgtatgattttggagcgtatttttattggaaccctaatttcagggttgtgtaaaattattattttctgttttagtatctgcattcttttcaatgggttcatagaaatagctagttattgcccatgccaatcgttgttatatggttttccaattatcgagacataactaggtataaaattgaataatattttaactctctggaaactattggcaggttagactggttactgattttttgttttgtttacttgtggttgtttatttattttttaacttttacattttggacacaattgttgttgctcacccgggactattgtttgcatctgattttctaatttttccaattcttgttattataggttctaattagtagggcagaac

SEQ ID NO: 21378 - DNA, 631 bp, Glycine max
  Intron number 1 from transcript Glyma04g36670.1 (locus Gly ma04g36670) derived from phytozome v7.0 (chr-ID Gm04; pos 43163593 to 43164223)
gcaaattcaatcatccgcttaggaggaaaaaccaggtacaactttcttttgttcctgtctctctctctagcaaactatttctaattaattaccgggtatggttacattaataggtgtttaatggctatgcgttatttaggtattagatgttgaaaccgaagcttggaattcactgatgtaaagattgttatgtttccaagtttcttttagggtgtgtttgtgtatgtactgcctttgtgttatcagtggaatgactgaattggtagaaaaacattttgtctttttttattagaagggctggtactagctgttcatcatgactgatgctcaatagttagttgtatgtttcgaacaatttgcgtggtaatatgcttttaaatgtatttgggatttctttttgccatctgtagtttgcctaaactttaaaagtttttcttttaaggttttttgcctgggtagaaaagaaggaataaagtattatctttagagggttgtacctttattattattgagcatcaattttgtatttcttgggcattttatgaatggaaacgtcttatacatgctcacttcttaaaaacctcttctgagattttgatgtattaacactaaatgaaggctaaaaaagaga

SEQ ID NO: 21379 - DNA, 685 bp, Glycine max
  Intron number 2 from transcript Glyma01g40540.1 (locus Gly ma01g40540) derived from phytozome v7.0 (chr-ID Gm01; pos 52254064 to 52254748 reverse strand)
tcttgccattacacatttcctggctttccacgtaattatgcaacttttactcttcatatagcacacaatactttatactgcagttattttagagttgaatttgatagttattttaccaaatagaatactatgggagtaggagtgtttttccctgcgtttctttctattactagagtatatttgaaatgaatgtatctgtaattgagcatagtgaattttactagctaatacatcatgttttatattattgtcatctggcaagcacaaatatgacatagaacgcagatatatgacaaacataagttaagggacgtgacaacagggctataatatgacatacaaaattagtataaaattaacataaaacaaaaatattacgaagagcgtgaggcattgtagacaactagacattataaatactataatttgtataattattgtggtattgtcatttgttttggcataaaaaattaacaaataaaagtaagaaaattgtaatgtgcaagtattaaagtgttcaacacggatatgagtcccaaacatgaccaatattttgatctttgaagtgtatgcgcttcctttgttgtcaatgtcagctactggttgagtgcagtcaacatataatttaggctataacataaagtttgataccttgtttacagattcttgggatccaccttcttac

SEQ ID NO: 21380 - DNA, 492 bp, Glycine max
  Intron number 1 from transcript Glyma01g40540.1 (locus Gly ma01g40540) derived from phytozome v7.0 (chr-ID Gm01; pos 52255108 to 52255599 reverse strand)
aacctcaggtatggaactctcgtttttctgatcaatcttttgcggctttacaaattcagcttcttgtgaagcctttttctattttatttttgttccccctttctttttttccctgtttttttctggcttagttctttgttaatacaatcacagaataacagaggctagatatgaatatcagtcttaggaacggtggaaagaaaagtaggaatgcaatttgaactaaaaagaaaatgaaaagaaagtaaagattgaataaatttttacttttaaaaattcatttttttccctctttggcttcaaaaacacacattatgatatctactacttttcttctatcttagggttctcatctttttaattggaatcatatgtaaaggagtagcatgaatacctcaaatatgaagaatcataaaaaccaatttcagttgtttaaatagtccttttgagtttatttagatgaatatgatgattaacagcacaaccaagaga

SEQ ID NO: 21381 - DNA, 528 bp, Glycine max
  Intron number 1 from transcript Glyma02g39870.1 (locus Gly ma02g39870) derived from phytozome v7.0 (chr-ID Gm02; pos 45079746 to 45080273 reverse strand)
ttcttgactcacctgttctccttaactcttccaacgtgagtttcaactctttatcttcttaaattgttttgttgttttgagtttggttgtttagaaaacttttaacaaaggaaaatggaagagttttgtagttttaggtggttctggtatcgttaaaaggagacaatcctgttggagttcttataagattattactatatgttgtatgagagagttttatggtttagttttttttcctttcttttttacttttttcaaatttggtaattgactatgacttgagttgacttgatagtttcatcatgcaagagatttgttcaatggtttgaatgttgaaacaagggaattacttacttttggagtttgaacatgcttcgcttgagatttttttttggtactttgttctgtcttgtatataggtttgtgtttcttgtctcaccgacttgctttttgttgttattgaattaatgggtttgtgtttgtaaatattcagattctgccatctccaacaactggagcatttgttgc

SEQ ID NO: 21382 - DNA, 685 bp, Glycine max
  Intron number 3 from transcript Glyma01g38980.1 (locus Gly ma01g38980) derived from phytozome v7.0 (chr-ID Gm01; pos 50959162 to 50959846 reverse strand)
atcaacaagctggacgaaccatttttactcacttggtatggttctacttctttgggtctcttgcttgactcaaattctgtgctttatggtctgcattaattcctttctgtgcatacagcaacttgtgttttcttgctttggatttttacttgtccccttgaaactgaagggaatctgttgtctctagctgcttaattgtgatagatcttgttattatttccacattttggatgaacggagttggacaaaaaaggtgtcatttttgttatgtggagcacttactgttttaacttccacagatattgctacattgattctcttttcgtagcaattgcggttttaactttgtgaaagtcacattctcataattttgacgatattctctatgttgacggtatatcccaagattttaaaaaagagaagacatatttacctaaaggaaccggaagagatgctttgctgtctttttcagtataattgtcgtaatctattaatctttgtttcttatttctcttggccttaaatttctcaccttgcttcaaactacagggtaatagcataacaaacagatttgaatttttttttttgtcgctgtttatattatcttcttgtgagattttctttgagaacatggtttaacattgtagtcataaaacaggaacggtattaaacaaaggaagaattc

SEQ ID NO: 21383 - DNA, 840 bp, Glycine max
  Intron number 1 from transcript Glyma04g42070.1 (locus Gly ma04g42070) derived from phytozome v7.0 (chr-ID Gm04; pos 47855046 to 47855885)
ctgttactgttcaatttcacaattttcaactctcggtgagtcatgacaagttttaacgttataacgttacacttccaaacgtttgaccctttcgcctatatttctgtctctgtttccctcaattgctgcgccccatttgtctcatttgtagccctggatcgttgattcgcttcagctacgcttcgatcggctgctatttttgtcgccacttttatgaagtttatgttttacactttttttccccttttttaattgagcttgaacttttgtgaaatggtaattctgaacttgtagctcggggttttattgattttggtgtgagatgtgtgtcttaatttgatttaagcttctctctttctttcttttttttttctttctttctttcttttaattttcaagtttttaaagtgttcagtgtgctgaaattttggggctttgtttttttgtattggtttcttgggtattattgagtgcactggttaatggttggatctgagaaatcatgtgttgtacagagattcatgcgagagctgtttggaggttgctcatttaagggaggtagcgcaattataatgttcagaatcaaagaatgtttcttgcttttggttttctttggtgtatggcttgtgtttggtaaaactcagcacaacgtgcttctgttggatcatagtgaagactttggccttgaactcggggttgaaatagtactgtctgggttgagcgttgtgaatttgcccagtttctggcaagctcttgtgtaattgtagtttgttgaacttgtgttttaagtaactcagttgttatgcttaggtgattgcttgaagaccgtgatatcgaaag

SEQ ID NO: 21384 - DNA, 432 bp, Glycine max
  Intron number 5 from transcript Glyma04g00410.1 (locus Gly ma04g00410) derived from phytozome v7.0 (chr-ID Gm04; pos 185426 to 185857)
aggtatactattcaaaacattacactttcccaagttatcttctaattagatattggcaccggctctcattaacagcagtattaggttttcattctgcacctatacctctcttctgtcactggataatgggcatgttattttttgttgccaatatccgtgtctgtaatataaaccaaagctcaagtatcctatggtcatttctgcatattggcttctcacatcataatcagtgatatttccgcgttgcattgattagagaaccaatatccttgatgatgtttctgcgctgtgttgcaaaaaatatgtacttgtagtgttttaatagtattttcaacataaaagaatacaacgtaactttaaaaattaaattgtcatttttcatttaattgcaataaagtctctgatttgattatgaaaattgttaataggccc

SEQ ID NO: 21385 - DNA, 672 bp, Glycine max
  Intron number 2 from transcript Glyma03g33320.1 (locus Gly ma03g33320) derived from phytozome v7.0 (chr-ID Gm03; pos 40936373 to 40937044)
gtttgtcagtgacaatcttttctgcaatttcaaaggtatgttatatatgcccttaactttattttataagcatatgtgtatttattggaagtatagtattttttttcctcttgatacttttcaaatgaactgaagactgcgaaaaggcattaatatgttcttccttaacccatgtattcaaaattataaccattcacaaccaaaactgccaagtaacataattcgaacaattggaccctattttttgacagtgaaaactggattgttaatgattttaagtataaagacctatttgaaaatcaaattgaaacaagtatcatgtataaagataaggatcttgctaactaatattggtgaagaaattaaaaaaaagaaagtattcagtgtgaaaatcgtaggagagagtaaaaatgtcacgaacaatgaaattttatgcatctccataaaaaaaaaaattgcttttagtttcttaatcagtatccttaaccagtatccttaccatactggttggtatttgcctaaagacaacgttaaattgaaaagatagatgtttaagaaacttactccataacaagcataattttgttctctcattattaatatcatttgtggtgatgcatttttctgtgtgaaacagatttggctggtgaacatcaaggcatatcggagaat

SEQ ID NO: 21386 - DNA, 693 bp, Glycine max
  Intron number 2 from transcript Glyma03g38530.1 (locus Gly ma03g38530) derived from phytozome v7.0 (chr-ID Gm03; pos 44867588 to 44868280)
cgccaagttggagaagctcgccgagggagaaacaggttcaattctcctcaaagttgtaaaaatgaatgtgtagatagtcttcgtaatcgatgttttattgtagactggtgcatttgctttttggagcttttggaagcacaagtctcgtgatctgtcaatgttactgtgctagtggtctttagtaacaattgctgataggaatttgttaattgtcactttttattttgagtaattaacctgttatccatcgttgccacttgccaagttgttttgttctaagtagtgaaaagtttaatcaggtaaatttgctttgtgagtctgatagctatgatagtttatagtttctaggcatgatactgttcttgtttggctaaactttctcagaatgcaagttttactgagaatttatggtttgacagtgagagttgcttggatttcttgatgttagccactagttagttttggtgacatatttgcatggttgaatttgtagcttgctaacatagcctttaggatattgtaacaacttacaagtgagtttcatttaatgcaaaatgaaaaacggcgtgagaaactgtctcaaacattatttgtggccttccacatttctgtgctgatctggtaactgaacttttatgacgtgtttcttgtttggtagagtcaaaagggaagccgacagaagccattcgggga

SEQ ID NO: 21387 - DNA, 1016 bp, Glycine max
  Intron number 2 from transcript Glyma04g12830.1 (locus Gly ma04g12830) derived from phytozome v7.0 (chr-ID Gm04; pos 12182697 to 12183712 reverse strand)
ttttagattctccagtgttccttgcaaattcactggtgagctttggtttatttgtgttgcggattgtttatttgtttatcaaatttgctatttattctctcaaaccacaaggaaaaaagggggaaataatagaaggaagggatatagaatagatcctagttgtggctgtaagcatacaacactacaaagcacaaaccattattgttgctcctgaagtcctggtgtgtatgtctgataggatagataacggtatgcatgtctgtgtatttaattcttttatgtaatgttaatgttgtaatttggacaatatgaggattcgtacgaggttattctttcaatttgaataagcattttatgaggtgatctaaagttttcctatgaccttgtctgattcacttctggaatttccatgcttgcactttcttatgtttcttttctgtcttttcttaagctcctcaaatttcatcaggggcatgctgtttggttaatatggtaacccttttctgacaccatagttttgaaacatcctctagaacaggttaaaaaatgtcatgtcttgttactttttcttttcaatatactttttgtaacagtaggtggtgcactcagacatagagtgtataattatatataaattatgtttgtactttaactttgaaagagctggtaggaccctgttgtcttggtaatggtatgcgactgtgcttaatatttgatttgattttcatcatgtagtgctactcacactgtttaactgggaaactataaacctcttggattcttgctgctctgcatgccatgcaatgatacactttttatgttctgaacacatggtgtcaaatgtagtttttagagtcctaagttatcacttttcctttttgaggcaccaatagtggtctatctgctgttgtaggaaactgattcctggttctgttgacatcgttctacctcctattgagttatgaatctgtctaatttcaggcacagccttctccaactaccggaaagttcttgtt

SEQ ID NO: 21388 - DNA, 764 bp, Glycine max
  Intron number 1 from transcript Glyma04g12830.1 (locus Gly ma04g12830) derived from phytozome v7.0 (chr-ID Gm04; pos 12184137 to 12184900 reverse strand)
gagacagacaacaaacaactgataacaacaacgtaagaaaacaaagctggatcaaattccattaatcaacaaaacccaaataactggttgggtcgggttcgggttttttggatccgcttctctggttcaaccgttgttgttgtggtgattatagtgttctctttcatttttctcagcaattcattgttctctaggtaaaactcattcatcattctctcttgtctgtttttgtgttttctctctctctggttttgttccccccccctctatttttgttctgtttttgtgctttttaccttgtttgtttggtgatttaaactattttgaaacaatgttgtttgtctcttttcatgaattcggtcgtgttttttgtgttcggttttgtcccgtttttggtttttttattatttcttgttggaagggactgaaagaagattaaaaataggatctttttattgatgattttgagactctgtcaaatggtgaatgagcaaagtggggggtatgaatttttggaaatttttattgttaaaagcatttgtcctatgatgattcatgttggcagggttgtcttttattttgtcagcagattaagcaatctgcatatatgtttgtaaacagaatcatttactttttttcttctcttttgagtggttgtcattttgtgtttctggtgctgaaggtggggtttctgtgtttttttttgccttatttttcagaaaatttggtttttgcaggttaggtgttcataaggtgaggtctga

SEQ ID NO: 21389 - DNA, 888 bp, Glycine max
  Intron number 1 from transcript Glyma03g07950.1 (locus Gly ma03g07950) derived from phytozome v7.0 (chr-ID Gm03; pos 8699234 to 8700121)
gctttggaagagtgagtagttctccctcttaactctatacttcatacttttacattgatttttgaagaaatttttatgtggatgggtaactttataatgtatatccattatcaaaccaattttcattagttttattaacattttttttttggtaaattggaagagttaatgatatttgaatacaattttacaaaagattgatcagagcatatatgtggtggtctagagtcaagttaaagtcaaagcaataaattgttgtttcaacattttttaattttctaccataattttgggtcaaagcaataaacagttttttttttgtaattgacacagaagaaagaaaagtaccgtgaaaagtttacaatttgaataagatatggaattacggattttattttttataaaagtcaaattttgcctcttctttttactttttttttttactcaagtgcatccatattttttatattttatattttttttattttttttatttttattctctttctctctctctctctcttttatctctgctatatgacatgttttttttaataaaatttctgtataatattgttggtcaatgattcctttttatccaggggtaacctcgtaagaatcgaaacaaaaatgcataaatgcaattgtgtatactgagatctttaatgggtccatgggccgggatactttattgataaaggcagaaaaataattaaaattaaggtatccgtatctatatcgtgataatattggaaaatgcataaatgttttctctgtcttctcaattgaggttgctaatgtttatataatgggatgatgagggattatgaccactcttaattattgcttacagccttggatttttgcattgagcttacttgggcttac

SEQ ID NO: 21390 - DNA, 681 bp, Glycine max
  Intron number 1 from transcript Glyma03g39510.1 (locus Gly ma03g39510) derived from phytozome v7.0 (chr-ID Gm03; pos 45565298 to 45565978 reverse strand)
catcccttgacatctttcgcggtctcactgttgcggtacctctatctttgttcccttatcttttatttggaatatagataaatgaaaaacctcatcttttatgtgcaactgaacatgtatctcaaattctgagattaactctctcctagctagtactaaagcataccaattttattctttttctagttttgtgctgtttcaaaaaattcacagcaaacttcagaaagaatatatgttctataaagcatcagtgtaagttagcataggaaattaaaatcttaagaccaaaccaaatcttcacctcacaaaataacagtttatcaagaagataacttggacaagttttataattttcacccttggaccacaaataggaatctatggactatggattgcgatttgattgtgttcatgattataacgtattcagccaaagagtcataactggtgggaaaactgctattggcctggatttacatgtctgatatcgttaatatcagcatgtctctatatctgattaggtatgtatactgctgttttcccttagtttgctgttaaaaaaatctcattttgaaaccaccaatgaaaaaaacatcaattttgattctttaagacttgcaaacagtaaacatcaatttagacttaggctttgacatgttttgatgttatgtgatgtagtta

SEQ ID NO: 21391 - DNA, 918 bp, Glycine max
  Intron number 1 from transcript Glyma04g09810.1 (locus Gly ma04g09810) derived from phytozome v7.0 (chr-ID Gm04; pos 8084587 to 8085504 reverse strand)
aaggataaaacaccattcaagttcatgaaaacctatacaaatgtgacatctcttatttgattcaagtttcattgttgaaaaattcagaatcaaataatgaatttgcaatcatactcaataatgacattgaataaattacttatcttcatcatgaaacctaagtgatcacctttaataaaatctctatgtctaatcacttttttttattcaaaagactcaaactttagatcttacataaaaggatcgagttcatgactatttgaagcaatgatttgttggtttatatatatacattttatatatatgatcatataaaagattttttttttcttttgcactttctcccttgactaaaaatcaagaactacttttcgaggtattgagattcatccaagggatcaacatctttcaaccgatttttttcaaacacacgtcatccatcgaatccatgatcacatgctcacatgttgccattttttttaaccaaacaacttataaaatcattttactttctacttttttttctcttgttttcttttttcatggaccaaacaaatcataaatgattaaaaaatgagagaggtgtgaagagataaaaaaaaaaggagtgagaaaataatgggcctgggaagaataacaattaacaagaagttaagaaccctttatgcgttttacttctgagtctaacagtctctttggtaagcgttctcttgtttcgtgttcctggttcgttcaaatcaaatcaattgctcctcgtgctacttttaaatgccacgaacgtgtctagaatcatcaaatctcatgaaattctcagaaatctatcgtagcagacacacatcttcactgccacggatatcccttctaaaattcacgaaacccacagaaccaaaagcggaccctccccccgaaaccctccga

SEQ ID NO: 21392 - DNA, 537 bp, Glycine max
  Intron number 1 from transcript Glyma02g08870.1 (locus Gly ma02g08870) derived from phytozome v7.0 (chr-ID Gm02; pos 6865993 to 6866529 reverse strand)
cttctctccgtctctctctcactcaatattttgaggcaagtactctctctctctctctctctatctgcttctgagtgttatcttctcattctgtacgatttgcagcgtgtgccaacgtgatgcgaatttgatgagctttttgtgctcttttttgtgattcggatatgcccttttgccgcgtgtcatttttttgtttatcactttttgttctactcactcgtagattcacctcctcaattgggtatctgagtttttcgtgagttcgattgagtaggagataaagtttgaattttttacgcgatttgcaattggtttcagaaagccccaaaatttatccatttgaatcttgatttgctgtgaattgggttttgaaaaacaattggaatgaatgactgttgttgagtttctgagtgagcgttttcttgcatgtttgaattgtaatgaaaacaaaacagcaacagatgcaaaaatattgattatgttttttattttaatttttaaaactttttgttgtttgttttgtctaggtaatttgca

SEQ ID NO: 21393 - DNA, 636 bp, Glycine max
  Intron number 1 from transcript Glyma01g36410.1 (locus Gly ma01g36410) derived from phytozome v7.0 (chr-ID Gm01; pos 48908608 to 48909243 reverse strand)
atcaaaccctccaaagctgtatttaccgatcttgctgttctccgtgtatttctcttttgtattgactttgatttgagttttttgcagcatcgatttagcgattttgctcatgtttcatatataaattaatcgaaaaattatatatatcatgtttaatatataaattaattgaaaaattatacacacatgttatctgcgtgtgtgtttcttattggtatgctgatttcatttttttttatttaaaatttgacatggttttataactttcatactcttcggtctcttgtaatttgtttattttccctagagatttttgcgagcgtgtaattaagtaatgaacctcttctttgcatttgtatggcttaatattaacaataatgtaggattaatttattgaggaatttgtggtattttctacgagtactgcttctgtaaggtgttataggaagaatacatgctgtatggcttgcattcctctagggcgataagtgaggacataacatggggaattgtttttgatgcaacctagattttttcactggtgttttggagagtagttctttaatgagtgaatgactaacttttcaatttgtatttgtaggtttggaggctgatcacactgttcatttggttcgt

SEQ ID NO: 21394 - DNA, 641 bp, Glycine max
  Intron number 5 from transcript Glyma04g21470.1 (locus Gly ma04g21470) derived from phytozome v7.0 (chr-ID Gm04; pos 24618359 to 24618999)
ggttgaaagaagagaaagaaaagttggagcagcaagtaaaagtggcaaatatacaacccaactttagttgatgatgcgtgattttagttgggcaaatataattgcagaaattagaggcatgtaggcatctaattgctaggttttatcttcattattctccggataagttaaggtagatatttggtttgagttgtgcccatcattatagatgctcttaattaggtttgtattttgtaccatattagatttaacccgctcccctctattactgatgttaccttttatttgtcatattgaatagtttttttttgcctgcttgtaaacattattattgccttcaaatttagataaatgttctttcgtttatttgttaactcattttggtgctcttgtttgcttctgtgaagtgttcttcctagttgggatgaagagttcttcctatttaaatgcttctatgaagtgctctttttttttcaaaagctttctacatcggtcgtaaaaggaccgtcgtagaacacgtgacaaactacatcggtcgtaaaacgaccatcgtagaatacgtgataaacgaggtcgttcctacgacatcaccgatgtagaaaacagtgttttctacatcagtcctgtcgtaggcacgactt

SEQ ID NO: 21395 - DNA, 1011 bp, Glycine max; identical to SEQ ID NO: 20575
  Intron number 1 from transcript Glyma01g28820.6 (locus Gly ma01g28820) derived from phytozome v7.0 (chr-ID Gm01; pos 38704161 to 38705171)

SEQ ID NO: 21396 - DNA, 911 bp, Glycine max
  Intron number 2 from transcript Glyma04g16670.1 (locus Gly ma04g16670) derived from phytozome v7.0 (chr-ID Gm04; pos 17771679 to 17772589 reverse strand)
agcagtgtcaaaaactgcttcttcttctgctccgggtacttttcttttgtgtaatatatatatatatatatatatatatatatatatatcaacaccatatctatggcctcaaatggggtggattaaattactgtctttgttattctaatctcaaagggtggctatatttctctacgaatgttgttgttgtttttttttctggcttgaccttctgctattaatccctctctgatttctgcatagtttttagcatcttgccccttttcttttcaattcgaatataagttgttcactattccctgcagttgaataaagaataattgattctatgtggctctcttgtgctgatgattgatttctaagactccctttgctgtagtgcttataggctataagcacttcaacatattaaagccagattgcttgattgtacttagtgccgtcatttcgctattgactggctcaaagaagttattcagttctttacctgttagttttctcccttttgctatgacccaagggatgatgagacagaaggatgtgaatttccaattccgatattctctcttaatcatacaaccctcagtatgactgatatgcaactatatatttttatctaatataccaaagcaccaaactatgttcatatttagtgttaagagttgattggtaatgcattagcgagaatttgtttttcaagttttgtttgtctattcaaatttgaatgaccagagctatgctgaaatgtcttctaatatggaatattgaggtgtcaaatatagcgatgcacatgctgtaccctttgatgatgttttctatgttttagaatgtaagactaactgtttctcgcatattgtgtactttgctgtgaaacaggcagcaagcaagccttgatatcattgtcagacaag

SEQ ID NO: 21397 - DNA, 620 bp, Glycine max
  Intron number 2 from transcript Glyma02g09730.1 (locus Gly ma02g09730) derived from phytozome v7.0 (chr-ID Gm02; pos 7694186 to 7694805)
gatagagctcgagaaattgttgaggttttggtttgtcccttttcttcttcaagtagaattttgttaaactgcttgcattgcaattgttatattaatggatgtgtgaatcattatgttagattgtaagtgtgttgtagatgatcgaaagatgggttatagaaggccatgttgtgtgtctaaaatatgcatatttcatacccgctgaccatctagttctatttgttgatgttgaaaacactttttctgtaatgtgttttggcttgtgaaacatatgtcttcgtttgataaaatttccaaattttagctaaggattcaaatttgcatgtatgtttatagatgttcaatattgaaagttgatatgagctggtgtaactgagtaattattgatatctaatattgagtgttctgttactgctatataatgcatatatgctgctatatatgaattagttgtgtgaatgttctaatgttaatcaaacttttttgatttgtagatgattatttttgttatgttctatatttgtttcatgttatccttccatgttatctggtgactacattagtgttcatttcccgtatgaatagacaaagacaggaggcttggttgttttgagtaagaa

SEQ ID NO: 21398 - DNA, 1030 bp, Glycine max
  Intron number 3 from transcript Glyma02g45230.1 (locus Gly ma02g45230) derived from phytozome v7.0 (chr-ID Gm02; pos 49561243 to 49562272 reverse strand)
gacaaagggaccgcttgaaggtatatcttcccttctgccttcagtcatcaacactttaggtagaagatataaggttggtccagtgattggagaaggaagaagacaagggggagaggttgcaggtttgaatccaccaattgacatttctaaccaaactaacatttttcaatccaaaaaaaaaaaaaaaaatcaaacctttaggtttagcttttatgtcatcacttttctgttgagaatggtggatcatatatgatagagacagggagaaggaaagggaagggtccttgatttcgaggacaagatgcctccttactacactaattatttttactcaaattcatcttgcctgatttatttattcactcatgtttatatagagataacaagtttctcctaaccgaattgattctccactaacaacagctttcatattccactaacactactaacaacctataatagaatttggcattatcctgagacataaccactgctagtgcttcctgcatataatacacaaaatcaacgagatatgcaggtctggtagtgctcctcttgggcctgccttcttgggctgttgcatctccttcctggactgctgcatctacttcagcatggtcctgatttctatcaatatattatatctattttatgttgggggttggggggttaatggtttctttttcctgaaaatgtatatggtgattgcttaaatagttaggtttcagaatctgagcatttataaaatgacaatttaatggttctggtgtgatatctcagcttcctgtctctctgatgttctttttattctattttggtctgttccataatagacatcttaactgaaataattcttgccactattcactcttaaaattctcgagtacattccacatataacagatcattttttaaaataattaatttagtaataattagcagtttatcgatatcactttgtgttgttgctgatataactttttttattttattcatatcttggtgcagagtgctcataggaaagcattgg

SEQ ID NO: 21399 - DNA, 424 bp, Glycine max
  Intron number 1 from transcript Glyma03g33950.1 (locus Gly ma03g33950) derived from phytozome v7.0 (chr-ID Gm03; pos 41440076 to 41440499)
caggtgagagtttgccttctgtttttatcttagtgaaggtattgccatgcaccagtgtgtagttatttttctctatgatatatacattttgtgttgtgatatcataattcaagttataatgcatatattataaaacttgaatgctttgaattgtcacattagttgcctcatgtagacatggttagacacttaaataatctaactctgttccggtgttcccatatgttaaatttaactggtgcaaaaacttttaaattgtcacattttgattttgttaaccttacttgaggctagaagatttctgttgtcaagtaagatgctctggttggtacacaagataggaattatgggttaatcttttctatgtattttttccttcactttaaatttgttactttacttttgccttgtagggccataggga

SEQ ID NO: 21400 - DNA, 821 bp, Glycine max
  Intron number 1 from transcript Glyma03g19260.1 (locus Gly ma03g19260) derived from phytozome v7.0 (chr-ID Gm03; pos 24588014 to 24588834)
tgtggaagcagctgcaactgtggcagcaactgcaggtatggaatcgtttttgcttctttttttctaatatgctcgattaaccttcaaaactatttttttaaacttatattctaataaaataaaatttgtgttggaaacgaatcttaacatgttattgctttctcaaaaatatgggatttttttttcttgctttatcatgaaatgttttgattggtttttcggatacccttttgatttagttgtgtgtgaatattgttactttatttttctgactgtacaagtttctaaatgataggatttgctgcatgtgagtattttgattggatttttagcaccctttgttttataaaattaaaattagatgctttttttcctccctatgtacatgggcttataagggtagagttctcctatctttcaggctctgctttctttcaaaaccgtttctctttccaatgataatttttatggttattatttgattggctctgtgggtaccttttggttcaaattcgatgctttaatcttctttcaacatcaataattaagagggtagaactatgatctcttaacactttgagattgttttgcttccagggtcttttagtttttctgcgtggattttcttttttcttttttttttctttttttgctgaattatctgggcaagaaacaatccgacccatggattttcttttataatctcactagaaaggatttttctgaattttatttttccaaatgttttcccaaaccttatgtatgttaatttttcatgtattgcagttgcaacaagtactcttttgactacgttgagaaga

SEQ ID NO: 21401 - DNA, 446 bp, Glycine max
  Intron number 2 from transcript Glyma02g42320.1 (locus Gly ma02g42320) derived from phytozome v7.0 (chr-ID Gm02; pos 47381577 to 47382022)
ctcaaagtaaccatttgtgagttcacacttttgctgagcacagcttcatttaaaccctctgcaacggaacttgctcatgaatagtaatataacaaaacaattgaaactcaaattaagctcttcacccttcactgatatatataatcaaaccttattcgatctcaatctcaacaaaacgatattgaatttgatttatggagggaagttagtttctaaccgaggccaaactatgatctataaacaagcgtttccacttagaagaaaattgttcagctcataacttctgaaacttaattacaccgtcgaaaatctccaaatctgttcaggtaactatagttgaaattgagaagcaacataatcgaaaagattgatccaaaacaaaatcctaaaaacattacaatttcatagcagttcaggtacataaacagagtttcctcgcagtaacg

SEQ ID NO: 21402 - DNA, 967 bp, Glycine max
  Intron number 1 from transcript Glyma02g08010.2 (locus Gly ma02g08010) derived from phytozome v7.0 (chr-ID Gm02; pos 6287033 to 6287999)
ctcgtgaactcaaagccggacttcaccccctaaaggttcctctctctctctctcacttccatttttatttcttcaccactcaatcgctcaaactctaccaacaattattagtattgttcttgtttttagaataaaatttagatacggttttggtgcttttctccgattagaacgatagtttcaccttgataatctatagtgagatatgtaaacttttattacgcggattactgaggtgaaacttcaatttgattagagaatggaatcaaaagtatacgagaactgcatctaagtattgtctattattatgtgtttgttccttaaattagggtaattttgactttgatcctggtctatggttgtgtatttgggacgaaatggtttgcaatgagaagtttggtgattcatatctaggctttttatttttttaatttgtttttcttattttggttttttattggagaatggcaatttaagggcgtaagtgaagtttgcaccaacgcatagacatgcagaggtccgatgtaatggctaaattggaagtttcggattgtgggtatttatattatttgctgaggaagatgataaagaaattaaaattttggattggttttttgttaaggttttatgtaagggtagcctgctttgatgtatcactatgattctgggatctttcaatttgacgtaaggagtggttttaattctggaagagttgattgaatgttgtgttggctgcttctgctttgaagtagttatatgagagatggttatgcacttgattagattgagcatcttgatcatttgagatgcttgttgattatgtgtggtagctatgtttgtttcactctatcttttatcctgcttagaggctgttggtgcaatttaacattttggtggatttattttgtgttgctggtgatttctattagcagcacaagtttgtcttctggtacactcgtcgaacacc

SEQ ID NO: 21403 - DNA, 598 bp, Glycine max
  Intron number 1 from transcript Glyma01g42930.1 (locus Gly ma01g42930) derived from phytozome v7.0 (chr-ID Gm01; pos 54051827 to 54052424)
gtgggggtgttgggaatcaaaattgttactttttagtttttcagcaatcccattcctaacttttaatttcactgttgggacacttcctttccaataatggttttttgcaattgcagcaagcttgtaattggcatcgtaaagtttgatattttaaaaaattgtagatatctgttgtacgtgccctttcttacctgcaatcaacaatttgttttgtgaaatattatcacattctgcctcaattgtgattttcctctgcttatctcaaaattaggaggcaaaccattattgaatatagtgtgacctcaaaaatcactgcaaaattatgatatttctgcgctgattgagaagctgagctaaatatacactgattagttgcaaatataagatttaaagttcgttcaattacaaacaaaatgcatcattgtgtcaaatgaattcgatctctctcttgcaaattaattatctgtattttttatttttcttcttaatagtattgcagggctcttcaggatgggacaagaattggagtttgatctgaatgacaagtcttccgtgggtctcagttccgatactgttcttccatctcatcaatattgct

SEQ ID NO: 21404 - DNA, 679 bp, Glycine max
  Intron number 1 from transcript Glyma02g10150.2 (locus Gly ma02g10150) derived from phytozome v7.0 (chr-ID Gm02; pos 8034027 to 8034705)
gacgttgagcttctctcttcgttcaactcaatccggtaattcttccaaaccatctttcaatattcgattcactgttctccatttccttcctttaatattagttttaataaatataaatatacaaagaaaattagcaatcgttatgctttgactctgttctgaccaccattgcttcttcagtttttattttgtttcctgtcatgatgtgtatctatacactaaatcaatcagaggtaagaaattttctttattccattatgatgacgatgatgatgaaatcaaggttttgaatttgacaaaatgatattaattttcatttgttttgaatgtgtgtgtgtatactgaatggcatgattccttatgtgctatgtgttgtttaatgtgaacaatgtgtagagattctctgtgcttcatggcaggggtaagaagctggcaatagctgcagcatctgaataggaatggattatatctgtttttttgtcaccttcactgcgattgcgctcttagggtttgtctctgtagtgttttttgaagcatataaaagaagaaacaaccatcagtatgtccttgtttttactcatctaatattatgtgtatatggactgggagtattagtttaatatttccattttgattttcaaaaggcatattgaagttccggctatttttgaggatccta

SEQ ID NO: 21405 - DNA, 778 bp, Glycine max
  Intron number 5 from transcript Glyma04g09220.1 (locus Gly ma04g09220) derived from phytozome v7.0 (chr-ID Gm04; pos 7367871 to 7368648)
gtcatctattgcaactcaggttttgctctgcactatactacattttttctatcaagttgtccactgttctgtcattgttgtttgctcataatctcccctttcaattaaacaattcttgcacgaccaactaaaagcccagaatgcataaaaaataacaagaaagtctgtgttaaagtttgcgctagtctgatagagttattttaatattttacttcagcctttgatcggtactgtgctcgtgcaagaatttctcctttccaatttctagtctattaaagtaacatttgacatgaatatatcacaataaattcctttcacctcaagttttagggcgcttgattcttgtatcctgataaatctgtcactattttgaattttcatgaagcacataactggtgaagttagttttaaaactacccttctttgtgggtatgagtaaaacaaaatggatcttagtttatttggtatcacgtaggtaaaacctatacacttagttcatacttgttgcagttttcattcttctatctgcacaagttgtcactttgctggcaatgcttctgattctaactgggtcaattcaatatcaactcagcattgttgagtgcttttggtttggatactaagtttttgtgacaagtgttttatcagttgaccggttggatatgaaagttactttaatgtattgtgaatgtgatatacactcaaatatatatatctatatcagtgtttcttagtacttacaggcgtttctacagatttttggcattgaaaaaccttg

SEQ ID NO: 21406 - DNA, 919 bp, Glycine max
  Intron number 1 from transcript Glyma01g24360.1 (locus Gly ma01g24360) derived from phytozome v7.0 (chr-ID Gm01; pos 31586149 to 31587067 reverse strand)
accctcttcttctttggccttaaccgtcatatttggtaagctaatagcttcatctattctttcttgataacatttttcttttgttttctttttcacccattaccctgaatcctccacttttgattttcgatccgccatggcttcatgacccttcaaacataattgacattaggccattagtagcatggtcatggttttgagattgtgcctcaaaattcgccagcatggaaccagattttggattacagaacaataccataactctgttatttaaaaatgtacacctgtttatgtggcgattctacacattttttctttgataagatgaggctaagaaacatgcgttgcgctaaagtgttgtattttcttggacaataaaccctcttggttggatcgtgaaagtttgttaaatgagcaaatttcatgctttcaaaagtttatgcacttttggaagtggtttgctctgtcatatgaactcagttccaaggttttattaatgggtttgtgccctttcatacaagtccatttcttgcggtttcaaaaatataaacttagagcaactttttaaaaccatcacaagtttctcttaagttatgtgccccaaaggggcactgtttcactttttttttttccaattcaatccatgccactggttgtgggttgtccactcagaaacttcacaaagccttatcccaaatggtttggatttccctctgattgtctcctcttattgacactttttgccacttttggtgctaatctgtgtcaataaaagcatctttttttttttgttccaaaaggccatgaggatctgtggctagagaaccaaaatgaattgtcctataaattgtgattggctcaagttgttgtcgtggagcttacacacactttgttttctgttctgttttaaggctttgaa

SEQ ID NO: 21407 - DNA, 1011 bp, Glycine max
  Intron number 1 from transcript Glyma03g06440.1 (locus Gly ma03g06440) derived from phytozome v7.0 (chr-ID Gm03; pos 6713863 to 6714873 reverse strand)
cacgcagaggagcagaagcctaagccttcaacgttagctcttcgtcttgaaactaattgcattcaacttatcattttctttttacttttttttccttggtttcgtttttataattaaatggaaatgaaagagtgaaagaaattgagtttattttcgcttaccattcttcaagccaaagtttttgtcttccgttctgtcgttgctcgttagaattatggtatgttgtctcttgctgttgttgggttactttctgagttgttctctgtttgcacaattcaattatttgttttttattattgatgaaaattgagtccaccatagctgaacctacatccccctcagtttatataattggtttggatgtgttgaaattcttacagcatggcatgttgattatttttttgtttgtggttttttggtttttgatgggatgcaccttgacaagttttgtgatgattttttatttttattttttgggattttattcccgtcaatgcttattaattgtcgaactggtgtaaatactactaaggttttaaagaacaattcctgacagtgattgtgcccacaatgtcaaggttgttgagatctcttgttattgcgttacctgtatttgtttttccactactcaatttaatactttgagaactgtttacagtttcatactactcaactgtggttgaactggtgtgtgtgtgtgtctgtgtgtgtgtaaatctaggggtcgtgttcggctgctgcattgtcaatctctaggattttttggatttaacagtttatatgacctgaccactgactaggttggctaatgctatgattaatggttgaatttgtcagactggccagttcagtctagtttttaaaacactggcttacaatgattcgttgtgtggtcagtggtgtatttgttaggaatatatggtatcttaagttgtgaccttaaattctaatttgtagcttttctcgtgtatttcaggcgagagggttgaagaaacacttgaagaggctcaa

SEQ ID NO: 21408 - DNA, 647 bp, Glycine max
  Intron number 1 from transcript Glyma04g42160.1 (locus Gly ma04g42160) derived from phytozome v7.0 (chr-ID Gm04; pos 47936027 to 47936673 reverse strand)
aaaaataagaaaaattggcgtcataagggccaaaggtatggcctttgttcctctctgatcacattcatagtcatgtagtatttttgttttctgttttcatgtctttgatcacaaaaaaaaaagtttggattttgattttaatttaccccagtttcgtttctgattgttttttctttcttccttcccctttttatgattttatttctcggttttaatttcatattatgacaaatctatataattatacaaactttattataaaaaaggggccttttgggacatcattcctatgaattgatctttctgtttagcctagaaagcaaagtttgagactttcagtcaagtcttaatcatgtaattgagaaacaagtgacgggtatttatgtaatgtgctgaatccctctaataagattatggcctttattttattttactttataattgtatttatctttctgttgttttctttgcaaattgcctctgggggaccttggatttttcttggtttgtggtgattatcgttttgctacaagctctattttttcgataccttaaatccaaggactccctatgccttatcctttgtatattttcttttaccttttgtgacaggtgggaaagttgaagttttttgttgaggtgaaagt

SEQ ID NO: 21409 - DNA, 1051 bp, Glycine max
  Intron number 1 from transcript Glyma03g41940.1 (locus Gly ma03g41940) derived from phytozome v7.0 (chr-ID Gm03; pos 47291169 to 47292219 reverse strand)
agttgttgccgcttcctgtctcatcgctggcttcggtattctcaaaaccctaatcttaaccctctcccttttgctaatgatttgatgtgatggtgttaattgttttagctttccatctgcaattagttattgcgattcattcttgtgagattgatggaaagctgcactcaatcttcggaaatgatagaaatttgtaattttattatttcaaagcagcagattatattgtagattcgattttctcagataccctgcacgttcagcatgtccatcgttaactaaatgagtgtcacttacacctagctaattatgtcctcagctcatgaaatctgttatttttatctatatctttacttgtttttttgagtgggattctagtgtgtgtgtgtgtgtgtgatgttagcttgtgaattctgctacatttgccttgcacttgtagaatttgtgtatgtggatcttaattatcctttaatccagccacatggttataccattttgatcacaatcatgaaaataattcttcttgttatagcctgaaatttgcttgagcttttatttggtaagactatctgaagcctggcatgcatcatttggaacacaatcaggaaaacaatctttcttgctctaacctgaattttgagcacctaactgcctgaacctactatgcttttacctgataagactacatgaccaatccaactgaattgaaattgttctttaaatatccttttgtaatattaaggctaaaagtaaaaccatagaattctgttttctgggatcctggttcctttcttgtagtttccctctttaggtgttaggaagagcagaatgctagtaagaggtttgcttctggttttaaatttgcttttgattaattaatgttctctataaccagtgtatgctgtgtcacgagcctactcaatttagatttagtttaaaattgaatgtatttctctttggatggatatagtctttttctactgacaggctattcacttattatgctgtgtaatcctcctcaggtctttttcttccagcttttgtgaggccc

SEQ ID NO: 21410 - DNA, 602 bp, Glycine max
  Intron number 2 from transcript Glyma03g07510.1 (locus Gly ma03g07510) derived from phytozome v7.0 (chr-ID Gm03; pos 8094221 to 8094822 reverse strand)
gcagccagaagattgcaccttgcccaagtaggtctcaaactttctaattaacatgcctatatatttttatgattgcagagctagtcttttttatcttctgcattttgaattttcctcttctaaattacattcatagctaatcatgatgatgcatgatcatatataacaggagatttatcatttaatcataaattattatataattgaaaatcgttgacttttataatagtttttttgaggtacatatttagagtgattttcaattagttgacatgtaaaaaacttatgttaaaataaagtgtatatacatataaaacaagttagacgttataatgttgacttagtgataaaagaaaatagatgttacagattcgaatccctattaacacaaaaactaatgattaacaactgatattgttctataaaaaaaaatgaaataaattattgattttattacactaactgactaacctttaaactgcacaagtctatgtagttggttttttggtcattgaaatgtttattaacctgacataacccaaattataaaatgacaacattttctaggtttaatccaaagctagctcttgaaaagcttcaag

SEQ ID NO: 21411 - DNA, 1005 bp, Glycine max
  Intron number 2 from transcript Glyma01g42050.1 (locus Gly ma01g42050) derived from phytozome v7.0 (chr-ID Gm01; pos 53408399 to 53409403)
cccgtcttggcaacaggttttccattttttacttgctcggcttccaagcattgccttgtgtttgttcaccagaaattattacacagtttatgacaatgtgatttcggttaactctacgcggttcttaatcatatttttcaatttacaaacaagaattaacaacttgatttataaaaattagtttaagtcgcttaattattggctatgtaataatttctagttaatttagagtttagcaatgaaccatgtgttttttctccttcaatcatgtttaaagtaattgccatcacatacatgtataaaccacatataatgttcaaaaaggtcctaaatttgaaatcatgtttaaactggacaacttaagcaaattgattgaaggtttattattattatcggcataatacatataacgatcgtataaacatatgttcgaatgttcatatttgccttattatatctcagggaaaagagatctattttatttttctttataatttttaaaagtagcaataaaataaaacaagagagaaagaaaaataaaatgagagtgaaaagttaattttgtagaagttacttaataaaaaattaataaaagtaaacatgtctatcaaaaagtatagactaaaatgagatatctttcttataatagttatagattatggataagttagtttatggtttataattgtctatcgttcttttcgtacaatgcaaaagtcattaaactggagatgattgatgaggtgaagaataatgacatatacttatcagttaggagataaatggcactaattcaatcgaagatcttactttgagcgatctatacggtttgtttgatatcggtacttacctttgggactaagaaagaccctcacatcaagcttatccgtaaatgttgcaacttaacttaattatgaggtaataagttttgtttgacatatgagtgatgttcgtagtttgtctgtctcaggtggtccaagattgctgccaggttaccaggtagga

SEQ ID NO: 21412 - DNA, 931 bp, Glycine max
  Intron number 1 from transcript Glyma0023s00620.1 (locus G lyma0023s00620) derived from phytozome v7.0 (chr-ID scaffo ld_23; pos 708288 to 709218 reverse strand)
ccgttctactcctccaagctaacggcatccacagggtactactgctctcatcttcattccattttctgttttctaactctctttatgtctgtgatctctttcgggatgaatacatatttatttatttatttgggcattgaattaaaaataaatttgttgcttggggtgtgagggtgggtgtggatgaaaatatagtttttagtggggaaagaaatggatggtgttatgtgattatgaagagtgaattctgaaatgggttttgatttgtttttggtttattggttggtgatggcaggaagttctgtttctaagctattcaagttaacaagggaagcggttataaattataaggttgggttagtggtgaagggagaagggagaagggagaagggaggtgggaagaggtcgtgggttagaattccgctgctaataaaactaacaattaatatttgtcaattaaaaaaaaaaagagttaacaagggaggttgagcaatgtgaattgtcatttgagttcttgaaagttgtgtattaggcagtggatttcatgttgtgagtgagatgtcaacagagggtttgtagcttgtagactgaagttgtgtgtggacgaaatgtctttatagtggagaaatcctgcataatgttttatagcttattggtttctttggagaagacagtagtttaagttaccaaggaagtttgagcttgaaagaggacaatcctgtatacagttaaagttggaaaaaactattgtgttttggttattttgaggttgaactgggagacattgctagttccattgtttaaatcattggtcaaagagaaattttttttttttaaactactgaaaatgccttgcacatgtgatgttgcctcttattaatgtttggtcatattttgtttgctgtgattcatgacagtgcattgttctacc

SEQ ID NO: 21413 - DNA, 479 bp, Glycine max
  Intron number 1 from transcript Glyma02g40760.1 (locus Gly ma02g40760) derived from phytozome v7.0 (chr-ID Gm02; pos 45984139 to 45984617 reverse strand)
aagccagattctggactgattacattgacaaaaaggttagttgttgcctcattcttaatgtctaagggtatcgtgtggaaattttgttttcttatattttgacactatatgaaacttttgtgatccccttacataacagattgaaataaacccacaaaaactatttctaatatccaaatctctaccttaggaaaagttgttagatagtcttcaatcaacatgtgttatgctcatgtctaatcattgtgtgacatgtagtcgagttttttaatcacaagaaataattaataatatttaattacttatcatatgaagattagttggtattatagtggttccgactatgtaataatttctcttaaattagaggttaaattaatattgatatgtagatttatgtgtgcatatatgattatggatggttacttttatacttggaattaggtatttgaaaccgggaggagtatctggggaagcaa

SEQ ID NO: 21414 - DNA, 253 bp, Glycine max
  Intron number 1 from transcript Glyma02g46820.1 (locus Gly ma02g46820) derived from phytozome v7.0 (chr-ID Gm02; pos 50671618 to 50671870 reverse strand)
acaaccttaaagccgtcatccaggttagtaacatatgcatgtaccacaaatttacaataactcaggcaacctaattgaatatataaatgtaaagatataaacatttataaagttattaaaaaaacaaggcaagaaattgttcggcttctaactatttgaatataaagaagatcaaagaatttatgacttaattggttgtgtagaagaaaatgcaaaccactccagataaataattttaatccctttgcaggac

SEQ ID NO: 21415 - DNA, 602 bp, Glycine max
  Intron number 1 from transcript Glyma04g35380.1 (locus Gly ma04g35380) derived from phytozome v7.0 (chr-ID Gm04; pos 41727706 to 41728307)
ttattcctcccaacctcaagcctgccaaatccaaggtacatacataacaacagtcaactctacgcccatatgttaccaactgagggtgcgtttgagaaccccttttgcaacaatgcaaacagaagtttactctttgcaaagcacaaaaatttgttgcttttccgttgaacagaagtttgaaggtttgcaattgtaaactaaacacacatttccccttcctttatcaccaaccgaatcttatacccttaaaccaatcacatatttttttattgataaatattaatttattagtttttattaaaaatattagttaggaaattgaattgcaatctggctagcttctctctcatttctctttattcttttttaatcacttaacatatcttatatctccaaatcaaacatatatttaatgtatgtttagatgtcagttgataaaattcaaaacatttttactggcaaaacaatcaattcttctttattttgtctttgaattggaaaatggacattgaaattcccaaaagcacattcctaactgtttgatgaacttttatccaaacataaatgaaaaaactaactaactaattgaatgctttcagttg

SEQ ID NO: 21416 - DNA, 901 bp, Glycine max
  Intron number 3 from transcript Glyma03g04970.1 (locus Gly ma03g04970) derived from phytozome v7.0 (chr-ID Gm03; pos 5160969 to 5161869 reverse strand)
aagacaccttccagcttgaagctgtcggaggagaagtaagataatacactaggatatacatgatcatctaattccttcctaccttaatatatttgccttcttttgttttcctttggaataatttttaagtgtctaaaatcaggtcacaattattggcttaaataccaatgacttgtgaaacttttaatatatatatatatatatatatatatatatatatatatatatatatattacttttttttgtttcatttatatattttatagtattcttcttttaattttccttgctaaataattttaaccatgtaaaaggggatcacaattcatggcttagttaatgggattacatcacttgtgaaaccaacacaatagttcatattctcctgaaataaaaacagtaaattaagaagaaggaaaaaggaaaataatcaaaatatcacgcgtgagttgtacaactttggtttgagcgacatatctaaaattctagcttcatagtccgaactccaaagtactgacataataatgagtgtggctcccatatatggattcgtttaaccgtgttctgtagttgcatgggccgtgtatccgccaataaagcaagaataacactactattttgtagatataatttatgtaacaaattatacaatttaagaaaaaatatgtaggatagagaacattagataagagatgtgatggaatagaaaaaaaaattcaaaaaagcattttaagaaaattattataagtgtttcagtactcgtgaagtagacagctatattatccaccttttgtcatggagttaactggttaattgaatggtgcacctgaaaattctcctatatgattttgatacatgtgtaacactggataaacctgttggttttgcagagtcaagaga

SEQ ID NO: 21417 - DNA, 856 bp, Glycine max
  Intron number 1 from transcript Glyma01g45390.2 (locus Gly ma01g45390) derived from phytozome v7.0 (chr-ID Gm01; pos 55693564 to 55694419 reverse strand)
caccctaagaactacggacctggttctcgcacttggtatgttactcatcttcgccaaatggtgattcaggatgagttgatccttttccctctttgttccttctcaatttgattatgcgattattattaaggtttttgcttttaatttgaagcatttaattttatcccccatatgagtactttgaatctgtgttttttctgataacaagtattttcctcattatttggttttgaataagtttcgtaccatcactattgcaatattacttttgttcttcgttaataattttaaagaggtgactcttctatcctgatgtcataataagatattcttttaaccattgattttctcttcattacgttactttgttgaaggttgagtgtgtgcttgggtgggtgtttaaaaatttgattttgaatgaaattaattttaaaagtagttgctttttcatcattgattttggttaaatgtaatttgattctgagtaatatgaaaagagtggtgtatgcattataaaatgtatgtcttattatattggtatatggcacctttattttcactcttttttcataatcataccaatatgtaatacgtgcttctctgttttaatgtatgcattttattttaaaactatagcaattttgtttggctagttttagactgttacaatttagatattctcagaaaacatatttttgacggtccaagatcggattagaattctagtgtgcgagttatttgttaattgggaatgtggtttactgttctttcctgttttgcagccgtgtgtgtgggaatcctcatggattgatcaggaaatatgggcttatgtgttgcaggcagtgcttccgaagca

SEQ ID NO: 21418 - DNA, 435 bp, Glycine max
  Intron number 2 from transcript Glyma02g45390.1 (locus Gly ma02g45390) derived from phytozome v7.0 (chr-ID Gm02; pos 49676551 to 49676985)
cttagcttcccgccttgtctgttgtctcttactgggttctcagtaaatacttgttggagaagaaattaagaaagtaaaatgaattaaacttttcccatgagtttaaattattatgcatgggctaaagttataaaagctctcccatttagcttctccaaagtccaaaagctaataattttaacttacggataagctaatttttatgggagaagctctattcatcttaccttcttattttctgattatggaagaatctaattttaatagggccaaaacttggaataaatatataataaagtatggataagtacaagtgtttcatatgcatataatgctaattttagtgtttttttaatatcttgaaagcttgctgtatgtatttcacaattttgattttttttccaattgttattagctcaccgctgtctcgcataa

SEQ ID NO: 21419 - DNA, 681 bp, Glycine max
  Intron number 1 from transcript Glyma02g37210.1 (locus Gly ma02g37210) derived from phytozome v7.0 (chr-ID Gm02; pos 42543325 to 42544005 reverse strand)
tagtggcttgaaatttaaagttggtgatagtcttggtaagatccttttttgtttcttgcacaaaatgctcccatgaggagatttgattcttctaaatatcatttgattacacacatgatcattaaaaaaattaaatatgttttgagttttttttttttaatttgagttaaaatcagttttagtttttataatttgaaaacaatgagatgttgttctatgtatttttaataataggtgaattttgtctctcttaatggaacttatcatttttggcttagggatgaaattcatcaattatgaaagaaaaatatgaataaaataattgattttactaacatcacatcgtatgaaataatgttagaagattttaatcctttaaatgaatacaacatattagtttttgactctaaagtaaaaaatatcgtgcgttaaaaacaactaattttgaaattgctctatgtaaagtgcaaaaaacaacttgaaattactctatgtaaagtgtagaaaacaattccatactttattatccacatatatagataattttagcatcatctaaaaattggtttggtttatcttaattaaataagatatgttgctctcatttaattcttacgtataaaaagaatatcattccaaacatgcacctcattaaatattcatgtgtgacagttttcaatt

SEQ ID NO: 21420 - DNA, 713 bp, Glycine max
  Intron number 1 from transcript Glyma05g05450.1 (locus Gly ma05g05450) derived from phytozome v7.0 (chr-ID Gm05; pos 4765268 to 4765980)
ctggtaacgttatcccttttgctcactgtgctacaatacctttttaacttttttttatttttttttatcgaaaattgaagttaatttttgcttaaaattgaagttgagattttttttaaaattctttgaaattgaataaaagggaaattttggtaggtgtctgtggccttatagccttatctatggttatttcttcttctggggttcttcagtttttatttattttttctttgggattaaaaaggaggtataagacatggttcaagagccccatagcttctcagccatgatccaactccatatctatgtcagattcgtttgttttctttgttctttaaagttcttctccttgccattttgtttctgttaacattgctgcataaactttggtgtggcttatcgtggcttggagtttgatctctttgcataatcaatggttgttcaatgctgcaaagtgtattgatgcaggttgtgatttttttgtggtttgaaactacaaccgcaatcaaaaccttgccaattatatggaataagtgcatctattaacaatgtcattcctttttgacactgcctgagttcattttatgtttcgatttagttggtgtaggattagattcatattttgttggttccattatttttttccttctcaaaatacttcagactttacttcatccaaggatgtaattgttttcagaggctagaaggagaaa

SEQ ID NO: 21421 - DNA, 442 bp, Glycine max
  Intron number 1 from transcript Glyma05g01510.1 (locus Gly ma05g01510) derived from phytozome v7.0 (chr-ID Gm05; pos 1030430 to 1030871)
accgaaaggagattcggaagaaagaattgaaaagggtactcttcacttccttcaacctacgctccattttccccttcgctgttaatttgattttctttcacttttttctttcatccgtgccctaattcttcctttgctatatcccttgaatatgtttcattgccaattgattgaagtgcaagtagctattctacaaaaataataatgaaatagtgatgctaatagggtttttaactcaaggagctgtttcaatgaaatgaacttaactttatttgccgtgatttctgttttcatctaagtatatgttattgttatgtatttttctgttgtgtattgcttgtgtttttggggaattgagctcatggtctggttctgtttccacttttttgttttgtttcgttgaacagaataagaaagaaagaaagaaggtgagggaggtggg

SEQ ID NO: 21422 - DNA, 951 bp, Glycine max
  Intron number 2 from transcript Glyma05g01510.1 (locus Gly ma05g01510) derived from phytozome v7.0 (chr-ID Gm05; pos 1030930 to 1031880)
agtaagtcatgctttattttgtactggaagtcatgtaatgtgatatcatctattttgcttatcattattatgacaaaatgtctgttgagtgttgaactgttgatagactatttgatcgggcatctggtagttgttgtggtttgaatgaatctcttattctgtgtaattgtaaaaaccaatttgtagagagtagtaacaactattgaagttttcattagtcttaaatatattgtgctgatgaaagagaactagttaatttgatttatacaaattttttcatcagcttgctagtaaaaatttcaaattaaagatggcgaactcttaaatgaccatggagaatcaaaacatggcattacagtgcacagggaagttccctctgaattctgtccaaagttatttttgtccttgaaggataccctttagtctccatggagcatggaccaagaattatgtctccatgtggattggataaataagaaattatgtcatatgcaattatttatatagatgttgtggtatgaaacataaacatttatatatttgcttctaccagatagtagcattgggaaataatgttactacatatacatggactcatgtggtgtgctacttactgctttatatgtttttttggggttatacccagacacagggagtttttatctacagaatagcttctttttttttttcttcctgaggtgtggggggtgggtgggtggggatgttctagattgtcttgtttattctttattcgttttttttttgttcatactctctaccttccactttttgtttataaactggtctggaactctggatatattgatttattacttgactatagttgttttctgggatgtagttgtataattgtaaattaagtatgatgtctttttacaattcttttaactattcaaattcactgtgcattgttggttgtggcagaggctg

SEQ ID NO: 21423 - DNA, 975 bp, Glycine max
  Intron number 1 from transcript Glyma01g05250.1 (locus Gly ma01g05250) derived from phytozome v7.0 (chr-ID Gm01; pos 4946883 to 4947857 reverse strand)
gtttgatacatttctatctactcattgtaagcacctcgatcgagcgtccaaccaatctgtagagataaggcatgttcaatcctactctggtattacaattataacccagagttgtaaccttcttcattattccatgcacatttaataatttccaacattccttgggtgacacaaatctattgccataaaagtatgcacctctgcatatggttaagattgtattatcataaaatttgtttgccaattcagttaccaatgtatgattttatttatattttcatccgctattgatgtgtgtgtaccatttgttgtgcttcacagttgtatacacattgttgtgctttccgtgcctgcaatttacaagttatgtattgggcatgtcactctttgttggttaacccacgagaaaagtgatagtatttgaagttgccattaccgcaaccatctttctagctatgtaactttataggaattttatttggattgtaagtttgctgttcaataaattactattattgtccataaaaaaatatgtgcattgtgagtgaaccctagtttcctgtttgagattccatatcatgactaatacgaatagtttggattagttgaggtatggattcttgaattgtccgtttggacagtttgggaactatctttttttacttcattcatagttataggttaagtatgttgtggtatatttgatttgattttggtttatttcatattgctttgttctccgggtgcatacttggttgtggtaaatttatgtgaccgctttcattttgtgtacttggagaccaatgcgaaatgctgctgaaatttcatcaaatttatgataacatacttaacttgtacatatgaatgaagcaaaaaaaggttgggcctgaatgggataggacctaaccttcatatgaaaaaagtgagaatatcatgcatatagcataacacaaatgctctgatagaacaacaaac

SEQ ID NO: 21424 - DNA, 835 bp, Glycine max
  Intron number 1 from transcript Glyma02g39890.1 (locus Gly ma02g39890) derived from phytozome v7.0 (chr-ID Gm02; pos 45099714 to 45100548 reverse strand)
agaaggtcaagaaaggtaacttccgataacatccatgtcctcattttatttatttatttatttatttttcatatgcacccgttttctggattcactgtaatttgtgaactttgctaggttgcaattcttcctgtaagattttaagtgaatttgtgatataataatttgggggcaggaaactagtgcctgaagtttttttctgctgaattagggtagcagtggatttggcttagaagctgtgattattgtatcttttctgctgaaattttattgattgttgtgaagggaaatttcatggagtgggcgtgattcgattggataacatggaacttaaataaccgagatatatgtagtgacattttttatttatttattcttgtccatgattttgcatctcagatgttgtaattggatcttttgcagattttgttgatgttagtttagggttttagaaaataatttaaatttgcttgaccttatgacaatttaaaattatttgtatgttattttgctgatacttggggttttagaaaaataaattgattttgctggtgatcatatgacagtttatacttatttggatatgttcttttgcttattttgttgatgactttagggttttagaaaaataattttattttgattttgatcatgtgacaatttaaaattaattggagatgtttcttttgctgattttgtttatatgaatttaggattttagataaataaattggttttgatgttgacccgatgacagaatttaacattatttttattctgttttcttttcaatgtggcagaattgaagagatctctgtattgcttattctctcaa

SEQ ID NO: 21425 - DNA, 814 bp, Glycine max
  Intron number 2 from transcript Glyma04g32440.1 (locus Gly ma04g32440) derived from phytozome v7.0 (chr-ID Gm04; pos 37130601 to 37131414 reverse strand)
gtcgagtggaaaactcatccatactcaacaatttggtatattccttcatttaaacaatacctccttagcctgtgatgtgttgcaaatgtttgatttatgtatttcttgttcatggctatgtttagaacttttactttcgtggtaggaataatacacttgttagttagtcaaggaaatgatctgtctttcaatgaggatatttttatttttattttttgatgttatgcttagttactgtctcctcctgtattgtgagaataaaaatcgtaaaggaatcttgttttttttcttctcacgggtgtaagttataaatatagatatttgatatttctatacagtacactaatctttgagaatgaggcttataagttattttaaaattgaatggcttctgaactggtttaaattttgaagtcctttcatattggagggatactgtagcttttagtttttctattcactgacaattcatatggaaacatacaatagagaatctcattcttcctttgcaaatggatattttatggggggtgaaggtggaatgaaattgcttcagttcctaaagcagcattcacagccttaattagcaaagggtattattatctgatctttaatgttttgattaagcctaactttctaaattctatcccaaaactgtcttctgcatcggcaactgtaaatattgatctttgaaatgaattaggttgctatttatttcatgggtggacaatatgtattactttgatgactacatttgttaacacatctttattcatcagataaaacatttctcttcagtcttgggatttcgttc

SEQ ID NO: 21426 - DNA, 655 bp, Glycine max
  Intron number 2 from transcript Glyma02g43460.1 (locus Gly ma02g43460) derived from phytozome v7.0 (chr-ID Gm02; pos 48224863 to 48225517 reverse strand)
ctcacccgtctttggctcaggtttttctattgttcatttcttcattaatgatgacattttttatgtttaatgaaatgttgaaatctattaaatgaagactatgctgtatgtgttctttggttcttgtaattagcttttttctgaattacgaagattctttattatatgcttaacttttgtgtataatgtacactggaaatacctttttgtggatcaagcatgatgcaaaacacggctttgttattcataatcgtttgagcccttggaactgtttcaaataattggaatatgattaattggatctgatcacctcagccattttggattagttgtttgttttatggcatatctacatgcaagaatattgtatgtgtaaagttttcgtatctagcccccactctgtatgtaaagcaaccaaagaatatattacatgtacaagatataatatctctttggacattctttttctgtttcttcttaacatctgcatatttacatgaggttcatgtactccttgtaggtattttcagttatgggctgttttcttcaattttcattataactttatatttgaatctggaagtctaaaaaacatttagattttcacatgtgtttgagtgtgtaactttttcttgattccgtactctacaggaat

SEQ ID NO: 21427 - DNA, 1010 bp, Glycine max
  Intron number 2 from transcript Glyma02g31480.1 (locus Gly ma02g31480) derived from phytozome v7.0 (chr-ID Gm02; pos 34458804 to 34459813)
ctcaaacaaactaaggtattattcattgcatggaatatgagttgaattgaagtaaatagagttttgggttatctgttcttttcgtctccttattattgtcattttgtgtatttagtactcctttttttttcttcctcaaattcggtcccatgacttcaattttgcaatttgagccacttgacatccaatatttaatagaaatgttgatgtggtgttgtagaaagtgatttagtgttaggaacggaaaagaagagggaagagaaaagcctagcttcgagggctaggtaacctcctgagcacaagaaaggaagaaatggaaaaggaacttgtattctttctgctttttcatacaatcattgctcaatatatagccttcattagagcatttgagatgctagagacacacacatgacaaggatcaacagatacccactactcctataacagaattattctaccaagcatattcctactaagtgctagccattccctcactgccaggtgggctacctctaacggcattcgaaatttccttcatacgtagtctctcaaatgcttgggcggcttcgttattctcttgggccttgcatagctgcttcctacttcctgcacacccttctctcggagcactattccatgcctatcatttagtgtctatttatttttgagtttggtagaattgattctgatatagttgattttgaacttttaaatgccactggaatgcatgtccaaattaatattaggtacaaattttgaacgtgtgtcagtgtgtggagttgatttttctcataaatcaaacaagcacttatttctatacaattgttgtgaatgtgaaggataagttattttttagagacttgataacatctgttgactggtttaaccctagtttccatagcaaagtcatttggtttgttcttgtagaaaagagtggagtggatggatatgatatgtgtgttgaattttgtgcaggtatttcgtgataatcaatttgttcaggaaaggat

SEQ ID NO: 21428 - DNA, 557 bp, Glycine max
  Intron number 1 from transcript Glyma02g01230.1 (locus Gly ma02g01230) derived from phytozome v7.0 (chr-ID Gm02; pos 913416 to 913972)
ggaggtttgtcgtctacccagcctgacttctagttattcctttttgctcttttcagcattgtcatatgcagactccacaatctctaaaagaagaccaatgcctatgtagtgtttgtcggtttccacttccaaaaccattaaaaaatttgtaatgtgcagatgaaacttaccatattgtccactatggcttgttattatatatagtaactcccgctttctgatcctgcatgtactccaaaggcccaactcaaagttatacttgttgcaacttgtgttctagtgctcctagtggtcactcttgtacaaggtagaaccactggtttctttcaatttcccaaaactcagggtgcccaattagtccaaaattcgtgtcttcatttctttcatctagttgttgacagtcacgagcgaattggaatctcaagttttcaaagttttagcatcttaacctttttaattcttctttttaactccaatactagaaaatactcagaatgaggcattctcatattttgacactagcattgtccttatattttcttgctttatttcttccc

SEQ ID NO: 21429 - DNA, 846 bp, Glycine max
  Intron number 3 from transcript Glyma02g38120.1 (locus Gly ma02g38120) derived from phytozome v7.0 (chr-ID Gm02; pos 43438631 to 43439476)
gatctccaaaacatctggctcgaccgattgtcatagtacagcacaatcaagtttctcccacccaggtctcttgtcgtttggaacagcatcagcacttttctccaagtggtcatggtacccttgaccgagaaaccacagctccactgaagcagaccaagacagataatttttccagtttagttttgtagttgtgatggttggggttccagaaaaggagaacacagggccggaagaagccatttcagatcaaaatacgaaaccctaatggagaaaaagaacaggaagcacaagactgacacgttccaagtgtcaaaactgaaaaacgaaggctgaaacacactcaggcaagaccgacgaaccgattgatgttggtccggcgtgattccggcaatgggagggcgacgcgtggctgtcacatgccagaattggcactggctagtggcagcacgtggcagatcttctggccacgcgacttgcaagggtgagtcgcgctcctcaagacacactcaacccaggtctcactggagaaaatgacgactggagacggcggtggacggacggcggtcgttacccgctctgatgccaagttgattttgaatatgtgaggaaatttctctcacaggcacccattgcttacaaataacacatatatacaatacaaaagctaggtgagagacagcttgataggacatgacacactgctgtcttctgaaccaagtaaaaaagaaaatctaagcaaccatgcactcaaagatacacataaatttaacaatagtgaactatcaattattaaggtttgaaatttccaatacacacattttacttcttgtttgatgtagcaggaaa

SEQ ID NO: 21430 - DNA, 608 bp, Glycine max
  Intron number 2 from transcript Glyma02g16700.1 (locus Gly ma02g16700) derived from phytozome v7.0 (chr-ID Gm02; pos 15074893 to 15075500 reverse strand)
ttacagggtatattgatacaacatgccttactcttcttactaatcttaggttttagaaagctcacatttattttgaattccaaccttctaattcacaattaagtttcttagatgagagagatttattaattttcactctacttttagaaatttgagctgatcaattactctcccacaatatgttagtaccaatattttcattgaaattaaaattaaagtagtagttattttaatacgacaagtttatgctatcacgaatcttatgtagctttcttccctatccccgagtcatttttgcctgtgaatgatgatgtattctagttctaggtagggtgtgaaaattactaagatgtgtacggttatggcagatttaatatattattaaatgttacatataaatctctaccaggaagggtggtcatatttagtatttgaccatgtccaaaggcaccagtctttacagaaatgagattaccatgttaccaaaacattgtatgccccattattggccaatgtattaaaaagtagtaattcattctgttttctacatttctgtgtttgctattttgatttgaattatgttctttgacagtcacaggattattgtt

SEQ ID NO: 21431 - DNA, 829 bp, Glycine max
  Intron number 2 from transcript Glyma01g29950.1 (locus Gly ma01g29950) derived from phytozome v7.0 (chr-ID Gm01; pos 40563204 to 40564032 reverse strand)
aattctacggactctgcgatccaggtacggcgcggccacggatctgaattgcgtttgtttttgttttccactttacgttgggaaattattttttcttcttctagttttccaattttgtgtgtattgtgcgggttgactttttcttttatgggaatttgaaggaaaaaaaatgtataaataaaataaagtcaaactttagcatgtcccatccccatgccatgtgttattaaaaaataaacatatataaaaatatattatttgtttgtaatacatatataaattgattaacaaactaattttccgtcagtaataagctggtaatggattcttagtttgtttgttgttggtcactgtttatactggctaagcattgtatgtgttttgttgatcgggtaaattgtaaaaatgttaaggttgacttggatttggtttgtttgtttgtgttcttctcagacataatggggtctgaattttgatttgggtgaggtttgatagacacttaactggttgaattaaattcatgctggaaataatggttttttttatgatgattattatgaatttctgtgttgtatgtagagttcacggtttctctggtgtggtccttttaaagatgaggagaacttgggcttttggaaatgatatgttagttattatgatgattattatttattatgtttcattgtgttgtttttaaccaagtagattcatgttgtgtgatccatatagccgaactcacctagtgagataaggttttgttgttattttatttcattgagttcaatgtttctcgtgtatttgttttaagataaggagaacttgtgcctct

SEQ ID NO: 21432 - DNA, 674 bp, Glycine max
  Intron number 1 from transcript Glyma02g00930.1 (locus Gly ma02g00930) derived from phytozome v7.0 (chr-ID Gm02; pos 702245 to 702918)
cactctcattcaaggagctgattctaaaggagctggtctctctctctctctctcacacactctatttatttttgagttgcttctttgtgtggtgtgtctctttctcaaaactacattttgagcttcattgttgttagtactcaatactactacacattgtattctgtctatctttgatttgttggttattgatggttgtaagcatcaataatatacctttgggatattacatgaaattccacattttgtagctaacccccatttcttgtttctcctttaaaattaaaaattatttgctagagttgcatttctttgcttttctcctcccaattctgttacctctaaactttggttacttcctaatcagaattcttagtatatgagataccttagtggggggattcgagatggagatagacttgttatagccccacacaaacatcccctgtttgtctcattttgcttgcaatgcatattattttgattgattactgtctgaatatgcctcatatttgtgtgtgtgcttgtttgaattggttgagtttttccataattgatggcaaaacctattttgttgaaaagagtaaagatggtctgatgcataaatttgttacttgctttgaaatctggcaaataagttttgtacttttctcctataatgccagtctgtttgg

SEQ ID NO: 21433 - DNA, 768 bp, Glycine max
  Intron number 1 from transcript Glyma04g11420.1 (locus Gly ma04g11420) derived from phytozome v7.0 (chr-ID Gm04; pos 9844381 to 9845148 reverse strand)
gaagaaggtaaatgaagagaagatcttcactgaagacaggtatatgagagttttttcctccagtagaacatcattgggggactacaaaatagaccaacatgaacaatatcactaataatcttaagctgccaaagtcaaacaaatattacttaaaaaaacatattatcagtactctaaaatctaaaaattacttcaggggtcaatctagaacctaggacaacaacaaattaaatggacaatcaatccactttaggagaaaaatattgtttaaatagagatctataacaatattagcgatcatgttattgacagagacaaaaacataactatgaaagatgatattatgtgataaagcaatgatgaaaaatgaaagatattgactaacattttaaggagaatgattgtagaaaacaaaataaaattaaggagaatggagtgtctaaaaatcatgactgttaaaaaataataaatctgagacagagaatatatcacccaagaaaaagaaacactactaaaaaatgatattttaacgttgttaaattaaaggcggtttttaagaattggggtaaaaaaataagggatgacatttttgaaattaaatcaaacttttttaaaacggttatatagagaccatcgttgatataaaggatttacaaggacgtttttctaataatgactgtctttgatttcaaattaaataataaaattaaattttgatttttcgggcccacagttccactttttcatccttcgcttctctccttccat

SEQ ID NO: 21434 - DNA, 766 bp, Glycine max
  Intron number 3 from transcript Glyma03g41400.1 (locus Gly ma03g41400) derived from phytozome v7.0 (chr-ID Gm03; pos 46891733 to 46892498)
acaaaggtataacactcttaagctctttattctttttatttaaggatgttcaccgtaatgttttaattagttcatctcttagtgagggcccgaatctctgaatgctctgacaatgacaataagggccaatatatttcatgcaactgtctaaccttgaaaatcaaaagattattctgttttttttgggctattgtctccccttgaaaatagattattctttttcatgcatctgtcacatggctaaaggttgaaatggatttcgtgcttttgtaactgataatattgaagaaggaaaagttctaataaactttatttctgactccagcctgcctttaggctcctaaggcatgtgtagttattttatggatcatataaatttacctgtttttattaaatgtgttacataattaataaacaatcgctttacatgaaagtgtggccttttttcattttgtaatatttatgtttctgtcctcttgaaacagcctctttgcttatgcaagagtaaggttgcatacaatgaccctctccatacctttgcatagtgaggagccttttggcaccttttattattatgtcctcaagggacaggctcatcctatactgttgagcatctaggtggatgcaactcattcactgaaaagctgtgttgtatggaccatggaagtgttcttgttttagtacacacattacataatcaataaacaacttttcatggaagtaaccttgttaagttttgttgcagccaaaaagcggaaggaccaac

SEQ ID NO: 21435 - DNA, 588 bp, Glycine max
  Intron number 1 from transcript Glyma03g40830.1 (locus Gly ma03g40830) derived from phytozome v7.0 (chr-ID Gm03; pos 46468489 to 46469076)
agaaaccccttttcttttacgtcaatcttgccaaggtaaatgtgttctttgattttttatttttttttcgtttttggtcattgtacgtaattagttaattcctaatccattgaaatttctttcatttttattatttgaaagtgtatgatacaagttagttacatttattttcttggaaaaaagtggtttcttaaatgttctcattgcctagatctgcaaccaagactatgatattattaaaggaaacgttgtagatgcggtcaaaagagttaattagaaaagaaaaaaaaaagggttatatttgaaagcaacaacattctttatgcagtcactgaatttgttgtttggatttctgaatcggataatttatcattaatctcaatggctcacacatttctcaaaggcttttttatttttaattattaatttattaatgagaatgattcgaattcatgagtcgatgatctatcccttccctttttctcttttaactatcaaaccaaccttattaaattatcccatagatggatcgtatgagtataaaactaaaatggtttctgcttttatagaggtacatacaacagcgca

SEQ ID NO: 21436 - DNA, 717 bp, Glycine max
  Intron number 3 from transcript Glyma04g42040.1 (locus Gly ma04g42040) derived from phytozome v7.0 (chr-ID Gm04; pos 47813623 to 47814339)
acactgctcaattgtctcctttcagcttggtgagcttctcgcattttctttcattttactgtatatctttatggtcttctccctcaaatcttctgtcaaatcacgtgcactttctaccgtttttgtggtggctatttttgctacttcgtccaactgtctttattttttctttactttttccttgatataatttgtcatttcttatacccgaataatttcttacgttgctttttatttgagaaaaagttgcttgtctgttggttaatccttaaagtgtgccgaatggcagggataaattttgtggggtttcaatttgtcggactagaattcaatcaattagtagttaaattttcgctttcaattgctaaataaaactttacgtgtaaaactatatactaatcttgctagctactaaatggtacctcatcacgttctaatctgaaatttataattgattaatttagacacattttaatttgagtttaatagtaatgcgattatgaaacagtttttatattatcatccaattataatttattattgttaatatgacttttaagatagtttcattaaatttatcataaacatgaatgtttgattagatgacattttattcaatacttcaaaatcaattctattaaaacttaaaacaaagatagttccaagtaaaagtttgtgtctgtttttagtcccttaccatttttacaatccacaggt

SEQ ID NO: 21437 - DNA, 615 bp, Glycine max
  Intron number 1 from transcript Glyma02g43820.1 (locus Gly ma02g43820) derived from phytozome v7.0 (chr-ID Gm02; pos 48520651 to 48521265)
tcattcagttcttatatcctttaggaaatcaaactattctatatgtctggtaataatcttcatatatatatatatatatatatatatatatatatatatatatatatatatatattttgcagttgtgcaagaacctctgcaagttgtctggctcatctgatcttattgacaaagaaaagggatcatatgatgtgttagtatgtggagtgttaattcattgacaaatgtatcaaattgtcacaagtagtaaagttacttggaaatccgaatgttgaatccacatgaattttgtttgtatttgagttggtgtatatcccataaggacctttagctgttaggctcctaacaatgaggatttagcctctcatttccgtgagagactttacaccttagaggctaacatggatggaagaacgagagagatggataaaggaagaggagataatggttagagagagggttcccctatgagagatgctctgggtgggtgtattcaatagaactctaagtctgggtgtgtcttttctttcttttttgtttcttactccttttataggtaaggtagcttaaaattcactcgacctcatgttgagggcgcacgtacttctagacttg

SEQ ID NO: 21438 - DNA, 451 bp, Glycine max
  Intron number 1 from transcript Glyma04g11060.1 (locus Gly ma04g11060) derived from phytozome v7.0 (chr-ID Gm04; pos 9339354 to 9339804)
aggtattttaacattaatgatatttttaataatattttaaatcaaatttcatcttattatagttttattgtaagaaaaatatcttcattttgatgagaagtattaagatttagaatttaatttaaatttaaaattaagaataaacgatgtgacttaagaggcgaatagggctaggatattagagctaacaatataagttcggcacgatgggacaaactaaacaacctataattaagattgagttgcgcaattaaaatttagcttaagaaaaggttgtgggtcaagccaatctagactcataaaatttaagcctgaacaaacctggcttttatgacccaactcaattaaccattttagtttttttttttttttgttaatttatatacatttcttagcattttgtatattaagtatgattaattttatgttttatggttattcttaattagga

SEQ ID NO: 21439 - DNA, 1008 bp, Glycine max
  Intron number 1 from transcript Glyma02g15290.1 (locus Gly ma02g15290) derived from phytozome v7.0 (chr-ID Gm02; pos 13791732 to 13792739 reverse strand)
tccttcggttgcactttcacgattgcatagtaaatgtaaattctgttgtgctttaattaggattttgttatttcttacacttcaaaatgaacgtactctttagcatggctttatatgtgctttctgccagagtcgaaatcataccgcatcacactaattagtaatagtatgtgtttctcacttgctttactagaagttttaattttgatggtagaagcatgcggttaaatgaatcggcaatagaaattaattttagttgaatataataggtccagttcagcctaatggtgagtgagacaaaaaaaataattgttgtttgtccttttacggcttgaagctaattcaagagtgtgactatgctatacggcataaaacttgaaatctatttgttctttcattcatatcacatacacaaattaacttctttccctgtttcccttatatttaattgggtaaaatatatttttatcatgtatttttagtaaaatttgattttagttcatgcatttcaaatccatcattttagtactcttcaaactttgaaaaacatgtaaatttatttcattaaatcggccatttgtattaaggggtactaaatctacatattttttgaagtttaaagattaaaatagttgattttaaaatacaaagactaaaatcaatttttacaggaaatacagagactaaaaatatatttcatcttatttaattttatttttatatttgatttagagggaaaaaagatgggagatataaaaaaatttaaaaatgaattaaagaaaaaagatgggagtatattttatttctaaatgtcaattttcttttatttttcttcaattaaaaaaacaaatggttaattacgtgttttaaatcatgtaataatttcatcatttttacagtatttacattgcatatgtaattattgtgcttggtgccatgccattataatcatgataacttacacggggacgtcattaattatgtttaattgcttgtgaaagggttgtg

SEQ ID NO: 21440 - DNA, 883 bp, Glycine max
  Intron number 2 from transcript Glyma04g41710.1 (locus Gly ma04g41710) derived from phytozome v7.0 (chr-ID Gm04; pos 47563842 to 47564724 reverse strand)
tcaaaagggtacgtcttaattttatttgtcgcttaaattaacacttctaattctaatacttaatttgttttgcatatatattccacctatacttactctttatacttatatagtttgcatccttgactttgttttatatctcaaaagctccttagtttcatcttgagtttttgttttttttagaaaacttagatgcgcgcagtttaattttcaagtgtcgctctataattaaaattggagtttttacactaacggtggtcaatataaattttcaaaataaaactttaattttaatagaaaaacattaaaatcatttaaagagctgcatttttcttatgagcaaatttattattgaaaggaagcaatgcagaaccagtacaagatgtacccagttctgcatacagcagacttatacaagttacaataacttgaagacctgcatgtaagttttgtcttatttttaaggggccgggggagatatacaacttgccttatgagtttagatttgaaacaaaacgcggtttcatgttttaagtgagatccttcaagatgcaagccactttaatggaatcagaaaattaagggcatgcatttttttaaaagtatccattattagtttaaaattgtttttatcttacaaaaatataaacttttaatttttatttttttaactatatggtttcatattacgctgtaaagtgttatttacagaataaactaagtgcaccatgcatttttgaatctcatcatcataaatacgtgattatattacaagtaaagttgcaacttaattacattgttatcaattttctatactagtacattattcaatccttcttattcattagggagatcaagcatcgataattggaggagtggttga

SEQ ID NO: 21441 - DNA, 319 bp, Glycine max
  Intron number 1 from transcript Glyma03g30980.1 (locus Gly ma03g30980) derived from phytozome v7.0 (chr-ID Gm03; pos 38835450 to 38835768 reverse strand)
tgactccaaggttagtaatactaccttcggtttctcttctttatttcttcatattcatcatacacactcttatatgggtataatgataatttctatttttctatacagatttgaggggtagcatatagtttggttataattattaatattttaataaatgttatatatatttgaaatttgaagtcaaatgtttgattgaattgatataatgcatttggcttcactgattggattttgtgtaatttaattaataaaataataacatattcttcttcggctaattagtgtaatatatatctgagcattcctacagatacat

SEQ ID NO: 21442 - DNA, 614 bp, Glycine max
  Intron number 1 from transcript Glyma01g22880.1 (locus Gly ma01g22880) derived from phytozome v7.0 (chr-ID Gm01; pos 29151185 to 29151798 reverse strand)
tgtaagataatctacagctatcttcttaatatatattggataattatattacgtgtgcaaaatatctatagtgtttaagttttgttaaaaaatcttaccgcgtggattgaagtctcttttttctaattatattttttttcttaaatgctcgaatatgagacctttttgaaatattagagtccagttttacttagaacaacgacttgttggttatttcattgtatatacatgttcatgtactatctttttgtatatatgtatattgtttagacttaaatatatttttaatccttttaatttgagaccctttgaatttggttctcgagtaaaaaaattactcttctggtctcccaaatttgcataaggcttattttactccttcaacattgttttggacactaaacatctactctttttaatctctcaaatttacttttagaggattaaaaataacattttacaaatttgagagactataaatagcaatttttttttattgaaagaccaatacataaaaataagtcaaatctgggagactaaaagcatgtctaaaccgtacctattgtttttttcaatacctttgaaattagtttatcatttcaggtgataagtca

SEQ ID NO: 21443 - DNA, 778 bp, Glycine max
  Intron number 4 from transcript Glyma04g39560.1 (locus Gly ma04g39560) derived from phytozome v7.0 (chr-ID Gm04; pos 45747547 to 45748324 reverse strand)
tctcgcgacccggggagaaactcaccgaagcacaggttgggtttctatctgattttcttaacagttattaccttagaatttgagatgtttgtattggagatctcgcctcaacactgatatgatcaagcaaatagtttttgagttcaacaactgtcaaatgtgaatctataagctaagttttggagttgaattaggtttacaagcacaaatttatgataatattaaaactttaatatgttaatgatgattgttgttgggcttactggatcatttgtaattgggtctttctacttgatttgttttcacagttagaagattagaagttgagatgtttgtgttagaagtaatatgtttaaaatagtttatataagtagaaggtaatatgattaatttatgaactaacttttggagttagctaaattatgtgtaaaatttaaattttaagataatattagaacatattattctagtgataattgttggtggacctattgaatcactagttatcatatccttatcgaatcatttattatccaatcttacaaattttactcttaaaatatctgatagtcaatgtaaaagaatatattaaagatcccacataaacaaataatataactaaagtagtgaatataaatgagggaaaattctcatggattgagttaattttaggactcaaattctaagagtttgtaatgtcaagttatggatttgctgtctttggtgatataatgcagtttttttaattatttttattttgtacaagatcaagtgctat

SEQ ID NO: 21444 - DNA, 162 bp, Glycine max
  Intron number 1 from transcript Glyma04g41680.1 (locus Gly ma04g41680) derived from phytozome v7.0 (chr-ID Gm04; pos 47529152 to 47529313 reverse strand)
ggcagagaccattcgcttgggtgttgctgttcttggtacttcttcgttcattcattccttagctttgaacgtatagggtgattaattattattcattatttgagtcttcaaaaaaagtgactcattagtaccactgtttgttttttttttttcttgcaggca

SEQ ID NO: 21445 - DNA, 365 bp, Glycine max
  Intron number 1 from transcript Glyma05g01330.1 (locus Gly ma05g01330) derived from phytozome v7.0 (chr-ID Gm05; pos 860341 to 860705)
ctctgcgggccattaccttctagtggatcttcccggtattgcatcaaacacctaattcacttttgaacaggaaaacaaatagaatatgcatgtgaatttagaagaattcgataaaccccatagagagaccaatattaatttcgttttagtttttgacttgcttcttgtttccctacccaaccgaaaaacctgttccagcttttaaggtgcatgcgtgccattttttttttttgaaccgaagaactatttaattcacaaatgcaaggacttcttgtacagttctcaataaggattggtgccgtgaaaacaagattaactcatgattttttttttatcatcttgcttcagatttcaggaaggaggag

SEQ ID NO: 21446 - DNA, 812 bp, Glycine max
  Intron number 3 from transcript Glyma01g07550.3 (locus Gly ma01g07550) derived from phytozome v7.0 (chr-ID Gm01; pos 8346319 to 8347130)
taagtctggtacactgcacacacttacaaaattaggtttgattgtcccctatatgtgttttaattgtcttatatgtattgtactgtgataattttgttactgtgggttcatatagatgatcttatttttcacctcacatgttgaaaattcaaaataattaggtctggatgttcaatctagttagctatactatctgtactagtttggaaattatcaaatatttgggaaacaaaattattatctgggttcttttcttactgctatatgcataagaatcaaaaggttggttttgcctattcaatgagagtgaatctacttaatcatctatttaggatttgttttctatgcaatgaggataaatctacttaattatgtatttaaccttgaatatcagctgtcagcactgactgttattatgaaatatgaataacttaatgttcatattgcttaatgttgacttcctatcagtttattttcaacctggacctaggtattatttaaactgtagtgaaatacctatatatcaatgatagtgatagagcttccatcttgtcttgtaaacagaattcgacactgtttgcagtcaattagcatttaacatagtgggcaataaggcttggttattgtactagagtgatgtcttacaagtttgaatctacaataagatacattccacaacattctgaagagatacatgaaaagtagattaatagcttgtctgaccatgcttagatttattttctttggaatttatctggattgatatttttcttttcaaatttggctgcaggaccgaccctcaaccaaggtcc

SEQ ID NO: 21447 - DNA, 805 bp, Glycine max
  Intron number 1 from transcript Glyma01g36340.1 (locus Gly ma01g36340) derived from phytozome v7.0 (chr-ID Gm01; pos 48817976 to 48818780)
aagttgccgcctaagataaaatcgtattcaccatttctgtttactagtgagatttgattttatttatatttctgcgcagtattagtagtattttttcactatgccgtgtctgattcagaacactttcaagttatattgtttaaaaaaatgcatgtgtttatgccaaaatgtaagtcttaagatcagtatataagagtgttttgttacccagtaattaccaatgtactggagatggaagtttctgcgcttccagttctttagcttttaacaattgtcaagacaaaagctgaagaaaatattgctctgcttgttgtttcttgtttgcagtgaaattttcagtttctagtttgatattttatcgccttagttctatgttgtcatatttagaaatatataggggtgaggattttatgttgtgctttggaaatcagaatcaaatcacaaagtggatgtggcttgcactaatagaataatgttagggattattttgtaaagttttgatattctccccccagcaattggtgcattagtgtttggttagttccttgaagtgtttggtactggcttagtttgttgatttgggtccttaaacagtctgatgacatggcattagatatatttttgattgaaaaagtgaggttgataatcttcttgtgcaatgaagagaactatttctttcatattttgttgacactttttgagtaaagtatgtcaactcaaaccgtatataatgcaagcatagcctgttgaacttcttcagtacactaaggtaatggcttttttgtcttcctcaggattcttttgt

SEQ ID NO: 21448 - DNA, 885 bp, Glycine max
  Intron number 1 from transcript Glyma05g05540.1 (locus Gly ma05g05540) derived from phytozome v7.0 (chr-ID Gm05; pos 4970951 to 4971835 reverse strand)
ttgttgcggtcaaatacatagagaggggcaaaaaggtaaatttataggccaaattgtttcagtggcttgtgtcaaattcaattgactactactgactaatgctgttgttggttcacatattttctttgcattgattgttctgtttttgagcgatctgaatttggaaactgagcagtcttgtctgcatatttatgatatgataagaagatagatacctctgggccatgtttttttttcttgttttctttcagcttgtgtactttcaaaatcttaaattcaatgttcaatgtgaaatcaaagtagaatagcaatggttggattttggaaactgttatgcagaggtggtgtttttcctggtgatgatattttccctcctccttatatttctcatctagtcaactcttttaatgtatgctgtattccattagttggttgtttccataagtcttgttcagtataatctcaaagaaaattctcgaaacattatgctgcaacacgtccagtcttcaatttgtgttccctgcgaacaactagaacacccattttttttttaatttcaagtaaaaacaaaagaattgaatgctatagttcctcataatgatttttgcctttcttattgaaatttggctgtcctttgaatctggacaacattttgtacctaaagctgatgaatgatgaatctgcgatgttcataaaatatagaatgtatttttgttgttctctcttctctctatcaagcttaagtagcttatatcagcattctcaacaagaagcttattatcagaacttaaagggctagcacaggtgctcttttgaaattgttttgtccaaaatctttctgatctgtttttcttctttgtgagctatgtttgtggtatcagattg

SEQ ID NO: 21449 - DNA, 485 bp, Glycine max
  Intron number 1 from transcript Glyma02g10870.1 (locus Gly ma02g10870) derived from phytozome v7.0 (chr-ID Gm02; pos 8878967 to 8879451 reverse strand)
ggtaatgataaaatattagttccctttcacttaccagcaaatgtttccatcacttgtcaattccaaaatttatagtacattttagaaagaagtccttagcatcaggggaaaattcacattttcaatttaaaaatatatcatccattaggacaaattggaccatcacattacacctctataaatcctctaattccctcaatagaccaatttacttaccccactaaaaagttaagaagtttcaggccggactaattagcaataaaatcttgtttacaaggggcaagcatgtagggtgctgatatgttcatcacaaatacatgaaactttgaaacggtttatatgcatcaaccgcttcatataaaagttgtgcacatttcattttttttcaccataactcaaaaactcaagggaaaccaaccctctttctcttctctgattttttaagtgtatcaaaatggtctcagcttcttcttctccccctcgca

SEQ ID NO: 21450 - DNA, 610 bp, Glycine max
  Intron number 2 from transcript Glyma04g08200.1 (locus Gly ma04g08200) derived from phytozome v7.0 (chr-ID Gm04; pos 6425695 to 6426304)
tatacgtgtgtcgctctggatcggtattgttcttttaatcctatcactcttgtgtaaatgccaaattgttgtgtaattatggtgatttgttcctatcattattaatagcctggatttgattgcgtgttactgttaatttggatatttgctttgctgtgtctgatgcaattatgctgtttcactcataatgtatggtgttggacatcttttttaaggtttaaaaatatagggtttcaaatgcagttgttgttaactgaatttattggcagagaatgaggcttttggctgtttagtatcaatgttcccctcgatttcttacataatatgttggtcattttcaaattttgcccttcactaaaagtaatcttatcaatgtgtgtggaatctgtggatgacgatttggtgaaggttctgtttgaactcttgaaactaataatctaatatattaattttttgtttgttctagtcatacgagatactgaacatactggtattataatcttgcagaagatgactatggaatctctcatacactgttattgttttatgccttaaaaataacaatctgcattctttttacaggctgctgattctcagattgtctctgatt

SEQ ID NO: 21451 - DNA, 789 bp, Glycine max
  Intron number 3 from transcript Glyma05g00880.1 (locus Gly ma05g00880) derived from phytozome v7.0 (chr-ID Gm05; pos 504657 to 505445 reverse strand)
tggagaaggaggcgcgtatgtatttcccaacttctaatttatattttgtttattcatatgattattggttttccacttgtccttaaacatctctattccatgatgatatgaaatgaatactgatgaccgactttcccatggactttaagcatctctattccatgctgtccactttttcttcgaaagctttgagattgatttgatcaacccaccagccattttctccacctgtgtgctgtaccagagctaagccaatcagcttgctggtgcaaagttatggccaaaactccaaaagtgttttttttgggggggtggggggtgtactattaaaagcttttttttaacttataaaataggtaatactaaatgttgcctgccaactatatcagtaaattacttgttgactacattgttatttaagttaaaattgaatcaatgtgtttggcaaagtagtttatgatcactgcatctaacattgattagtagtttcatttctcatgaaaatatgttacattgcttcatcatatgtgaataatgtggagaactttgatttagaagtcataaataaacacaactttacatggaataaccataatggaatatagaatgttggtgtagcctctccccttttctctagcttgcttcctcactgtttatgtgcatttgtgaatctccattgcatctgacattttcccctaaattttccaatgttaaacttagatcttctcaaattgaaatgagtgtttttattctggcagcttggacttgtagagaacaacatcttgactt

SEQ ID NO: 21452 - DNA, 1013 bp, Glycine max
  Intron number 1 from transcript Glyma02g00830.1 (locus Gly ma02g00830) derived from phytozome v7.0 (chr-ID Gm02; pos 627070 to 628082)
tcaagcaacaaaagtagtgtttaaccatctctgtaagggtttttgttcaagaagatagctttttatggaattaactttctttgttgaaggctctaaccatatttgtattgcttcctactataatttattttggtgctgttaaaaaatttgaaactccaaaagttgaggaagcaagtaggtttctgtcaaaatattatactgagcttagaacttaacgataaggtgggatattttttttattgtttgctttgtcttctatatatatatattaaaggattgcctagtgcactaggctcccatcactgtggggtcttgggagggttatattatatgcaaccagagggattatttccttgtctagaagccaaccatacggttatgccaagcttcatcttcatcctcattaaataattatattgtttttatttattcatagtgagttttgctgtggaattcgaattgcggtgtacatcaacagggtggaaacctggcattacatgcttaggacaacagaagatatttggataaacctgaagaagaacacaaaactatttaagtttctaaagttaaaacaagatcatctttttctgtacagtttgtactatatggttgaagtggagaatatattatctgattacacatttgatttgacaaaagcagtctgcaattttacaacatgacaccatcttgtcaaaaaccaaatgaatatcatctactgccatcaggcattttatgtaggcaaacattgtttttctttatgtaggcaaaaaatgtccttcttgatttctctcttccccgtttcacaaaactagaaaccatgcaatctatcttgaatactgaataagtgaatagaaaatcatttggttgacacctcatatgatgctgcaaaaattgataaaaatgcctcatagtgagaaaaatttctgatatagcttctcaattcaatgccagatatttgatcactatttcttttcccagatccggtttcacttgttcgtgatcacaacatcaaa

SEQ ID NO: 21453 - DNA, 929 bp, Glycine max
  Intron number 3 from transcript Glyma05g03350.1 (locus Gly ma05g03350) derived from phytozome v7.0 (chr-ID Gm05; pos 2567313 to 2568241)
aaagaatacgcgatttctccgttgccatagttgtctgtattaatctcctttaccactctttgttgctgtagcataatatttgagacatgcatgcttttttcttttagttatttaaatatttaataatcatttatttgtattatcaatggcataaattagtaaatttcaaagacccaagggcatgttgaattacatgaggacaaaacattaatcgtcacccttcacttgggattcatattttagttaaggtctcttgttagttcctctaggaatcaccttaactttgggatactacttatagtgacgttattattgcttattaattattatggtgatatgctttataaaatgaaattaggaatatatttcatccaatttctgaaccaagataataataagcttgttggtgtattttttatccattagtacaatatctttccaatatgacatgattgatagtgaaaatattattgatatggaggagaacctaatctgttgctattgggacatataattagagtgtctttggcaatcttgtttgagtatgtttggaaataattccatgttgtatttgtactgaaaggactgttaggtgtggtattcaatgagaatcactagctagctatacttggatataaactttaatccacttcatactcactgagagaatagtcgatttatgccaagagtttctgtggccttgctgaatttgtttactaaaaggataagccttttggtcatgaacatagacaatggatgaatcattttttaaaggataaataggcaatccgcgatcctgactattttaaatttatcttaaagttcctctcaatatatttcttcttggtgctggttgaaattgctggtttttggtcaattcttgcacaatcacagggagtaggtggtgtaggaagtgttgcagctgagat

SEQ ID NO: 21454 - DNA, 898 bp, Glycine max
  Intron number 3 from transcript Glyma03g38720.1 (locus Gly ma03g38720) derived from phytozome v7.0 (chr-ID Gm03; pos 45031780 to 45032677)
aacaaggtttgtgccgtattatctctttactcgatttttatcaatttgtttctctctttatgaagatccgcataatgcattatagtttctggtatgctgcatgagttgcccctactctttgatttttcttgcaacattttctctcccccttctgtgcacccttttttgtacctccttcatagtgttgacacaacctgccttttcccctttcttgtactttattcctatggagtgggtggcaaggaagaagaactctctagcatgacttcaatctcattaatgctgcggataaactgacaattatttttcccaactcatattgctgtgacatctaatatcttgcaaacatttaaaacttagactgtgaagctttctgttttttatccttaatgctacctcattctgtcaatctacacctagtagtagtagtttgttgtaagcatgacaaagagtattgtaattgttattttgttccagtatttaaattgaccttatatttgtatttgtattcaataaggatcttcataaatgtgacctttagcacccttgttaatgctatgcaaactgcgaagtattaactcaagcttttttttttaccttccaggagaagagttatatttttctctagcttagggcttgattctcatttattgaatcacctgtgtatttgcacctacctcattcaaacagggattttggaaatgagtttgtgtttttttacttcctttctttcagtatcaattttgtatgttcctaacattgggattctttacctgaaagtgatttgattttggtcattggtgttgtccttgattttcaatgttttatcttggtttttgaaattgacatgggcttgtgtttaggaatcattgagccaataaaatctggaattagagat

SEQ ID NO: 21455 - DNA, 971 bp, Glycine max
  Intron number 1 from transcript Glyma04g42660.1 (locus Gly ma04g42660) derived from phytozome v7.0 (chr-ID Gm04; pos 48349395 to 48350365)
gacgcacttcccatccaagtactactagcttcttcccctctctagtccttattagactagtactactactatttatttatttattcctccaatttttctctgtttttcatcatgccttcttgaaaacctaaaatcaaataataataaaataatatcggaataagaaaaggctcaattattggacttgttacttctttgatgttacataattactttgttgcctaagaatgtttatccctaatgctatttttcttaatttttaatttaaaataaaaaaaacttatttgctaaagaattatgggaatttgatagtgatggaaagatttatgtttaaatgtttttatttgattgcgaataaattataattgtatttttttagttgacagagtatacatcacaagatctttgatttgtctttatctgtttcacattaatgataaaactttagatatatcttatttatcttatttatttgaatgtgtcaatgtggtataagtaataaaaaatgttactttttaagttttacagtaacttttgtatcttacacaaatacaaacaaaaataaactgaattacttatatatttttgtaagggaagggggaaacttttttttcttttgttggagagaaggtatttctattcttgatgttttttttagagagtattaatccgtgttttatgtaattttttgtagtattttgctttttattaagtttgttcatagcttttttaaaccaaaaatagaaagcttcataggtttttcccatctacttttgccctactttattactgctaaatattgattcactttctatgcattcagaagtgggaaaaaaaagcgcttaactttgcactacaataaagctcttagctataataaatactctttgatagtaaattgcaatttatttttcatataaaacaaaattccatctcatcactagttgggattcgttgtaggaagctgtgga

SEQ ID NO: 21456 - DNA, 647 bp, Glycine max
  Intron number 1 from transcript Glyma04g31810.1 (locus Gly ma04g31810) derived from phytozome v7.0 (chr-ID Gm04; pos 36166468 to 36167114 reverse strand)
aaaggcaaactctttgagtactccagcgatccctggtatgcacatatgcacataatttaattcaattataccatatacccttttacgtactatacaataaaacccttttgatttctctttctcatgatctcttctatgtatctaaaattctactccctagctactatatgtatatgatcttttacgctcagtcttctttcttttcatgcttagttttcttcatctgatatcatatttaatttattaatttgcttatggatctctgtgaattatgtgtactatacatatcgatctatgtttcttctcgatttttttttaattatcctctttatgatatggtattcttctgggctaatattcaattattttctaattaacccttccgccccctctttgggtttattactagtgtgaatttgatgtaattgggtactcaattctcaatttttcattatgattatgattatttaggcttaacattaatcttcatagatatatatattatgtcgtttaattatttgttttcttgtacttgaaaagagtgtcatcatgcgatggcatatactttagttttaatatttatgcataacttgttgatgagggtcgtcatagctgcagaaggcgagagagagtgagaattgcaattt

SEQ ID NO: 21457 - DNA, 1024 bp, Glycine max
  Intron number 1 from transcript Glyma05g03280.1 (locus Gly ma05g03280) derived from phytozome v7.0 (chr-ID Gm05; pos 2518077 to 2519100)
gcctcttctcttccaccgtcgtttcgtccaatccggtactgcaatttccatttatctcttatctttttccgatttccgattttgaacatacctacattcattgcgctgctttcgatctgtgtacttttggaatgttttccctgcttttttgcatgtactcgcgaaactaagcgatttgttgttttaggttttttgtgttaatcatctgtggatggttttgtgtttgtatcgttttcttgcttttagtttgtggaactgcaagatcactttgcttgtttttagtagggcaaagtactaggagagattgaaagaaccgaagtttattttaagggattcttgtggaatttcaatacaggcttgttgataatgttaaaatttgtggtgtgtttgtgatttatttcaccgtgacaaaattactagtttacctcaaagagaattcgagttttatattagatagtttaaaggatcttattttcgtccttaattagcatttgttctatcttgtcttccttgttgagtagtaggcaataacaaagtaaaaggtaatgtctgatgtaaacttgagtaagtaggcaatgtatgatatgaagttttccataagcacttaaatgaacttgagttaatcaacttatgtacttcaactttcagagaagttagatgagagagtttttataaaacttagtgcataagttattttaacttacaagagaaactcaattcattttaccttcttattttctttcccttagtgttagtgcttatggagaagtttattcaaacatggccatatgacagaatagctacttagctatccctactttcttcgttgtacatgctttttttatgttgagttgtaatgttgtggtgattttttcttttgccatagaaaattagattccctccaattggtgggacttaggatacctgctgctgtaaaattgaagtttatcttttaatattttcatgaggttattagttatatgagacattatgtttgaatttgaccttttgactgcagggtggg

SEQ ID NO: 21458 - DNA, 689 bp, Glycine max
  Intron number 2 from transcript Glyma02g39010.1 (locus Gly ma02g39010) derived from phytozome v7.0 (chr-ID Gm02; pos 44325820 to 44326508 reverse strand)
ttggcctaggagctaccaggttggtgtgcattttgttttacttttttcttgcggggtcactttgttgtgatttgacttgcgtctttgagattttagctgttcacccctgccatgaattttccaattgacttttatttgctagaaaaagagtaaagtctcaaattgatcttctattttctctttcaaacatacataacagttcctataaaagtagatgctttttagatttttaagtaaataatttggtgacaacaactttcaaaggaccaatatagtgacatgttcatttttggcagaccaacttaaggatttgcatgagaaaagattccttcttgaaacaaaaatcttcaaaatataatcatgaacaagtagttatagagacgtttcaatgttgcccagagttgaaacttgaggtgttatgtgcatttttgctatttatatgaaactgtccagatccagaccttttgtcatagcaaaagatgttcaagaccaaataatttcaagttcttatgttcttgatttttatggaaaagtcacctcctgatttgaccagggatagctccttatgctcaagtaaattgtgtttgttttgacaaacaacttttgcttttatcttaaacaagctttgatttttcattcatggtgtacttatagggatcaagatttagttcaaagaattggagctgcaa

SEQ ID NO: 21459 - DNA, 804 bp, Glycine max
  Intron number 2 from transcript Glyma03g34370.1 (locus Gly ma03g34370) derived from phytozome v7.0 (chr-ID Gm03; pos 41839516 to 41840319 reverse strand)
tataaggctggcatcgtcccagtccaatatcgcaggttacatacataattacagaaattatatacgtgaatgttcatagcataccttatttgcatgctacaagtaaaatggaatggaattaatagctagaaactaagtccgaacaataataaacaaaaccctaatactagaggtaaaggtgacaagatggatcaggtgatcccaaacttgtccaataaaatgtaagatttgagactaaatttttgaacattttagtctaacttaattaggattcaacgtggtttaagtccgcaaaaattcattaaaaatcacaaaaattaagtgtttacaggactgggtttcagttttttaggccgaaaataaatttgaattttatgacccgacccattataacctacaacttgcattggatcaggtagcgcttttaatcacctatacctaatacaacatactagtaataaataggaaagaatatgataaatttaaaaagattagatccagagtacaaccgtattaacaatatactttttaatattttttttctaacacactttttttacttaaaatttatgtcaatcccactagtttaaaaaaaaactcttataactagtagaacttgtgtgaagaaaagtgttaaaaaatgttaaacatttttttaactataatattgagtacaaaactaacatataatacgaaatttttatgagtatttttgaagtgtccttatttattgattaaaaatatgcgtctttcatttcaaaatattcagggtaccgtgcaagaagcaaggaggtattcggttca

SEQ ID NO: 21460 - DNA, 757 bp, Glycine max
  Intron number 1 from transcript Glyma03g36280.1 (locus Gly ma03g36280) derived from phytozome v7.0 (chr-ID Gm03; pos 43280650 to 43281406 reverse strand)
agtagaagaaccctcccaaattgcttcaagtccaagttgaaggaaccctactacatacacaatttgtatgcgcaattttcatttttttatattgggaatgcacctctgagctttttggttcatcacactcaacttgttcatatttggttttggtttccaagactctttctttcctttttctactagtttgtgttgcgttttccaatgagctttttttaggttgtgtgcaagggtgtccttgtgtaaaatatgatcaaactttccaatggtgcacaaaattttctgccggtagatgaatgtatcgtagattttcgattcaactttgatgaatatcattgtttagaagggaaaaagagaagatgcagtttcattgattgatatccaaaacctagtaggatactaatttctggtgtatatttttagtttaaactaaaaatatatttctggtgtatattttagtaatcatgttattagtacttaatatttatgaatgactattttttattggaaaaattgaccattttttaaagcattttcattatctcagtttttcttattaaatatcactgcttagtaagactttttcgttgaagttggaacatttggaagtactacttctagagtagctgctgcttatataagctcaaagtttttaaaaattcgtgagtttcatgtatttttatgaagtagtgatagaatgcaacgaggtgaagttatttgagagacagagacctattcagtgaaatttttacagaag

SEQ ID NO: 21461 - DNA, 520 bp, Glycine max
  Intron number 1 from transcript Glyma04g08310.1 (locus Gly ma04g08310) derived from phytozome v7.0 (chr-ID Gm04; pos 6499766 to 6500285)
attagatcaactcaattccaagatccaaattctcggtacgttttcatcttctatgcgaaataaaacctaaatatatttttaatctcgatttttttttcctttcttagatttcaattttagtagttacactgtttcgttgagagaagtccacgtttacgatttttcttcttcttatatttctgtgctatttttgtttaggaaataaggaccgtgttataatcgcgagtcgttgtgttgtcgtgtttacaattttctattagttgcagtcactgaataggagaaagcgttgtgtttaaaaaacaattttttgagtttaatttatgttgttggcgaaagtgttgttgaatgatctctatacaagtcacttttttgcgtagtggctaatgatttacgattgaagtgacctctatatatacttcgaattttatgttgtggtttctgatggtttctttttatggctaatacatgtcgtgcctaatttgaagagtctcaaatcagtgaaaagttggaagaagtgaag

SEQ ID NO: 21462 - DNA, 456 bp, Glycine max
  Intron number 2 from transcript Glyma04g02480.1 (locus Gly ma04g02480) derived from phytozome v7.0 (chr-ID Gm04; pos 1742798 to 1743253 reverse strand)
atcctttgaccgcacaactagtggtaaatacatgcattctatattacatcttaacatgtttatatatatatatatatatatatatatatttaattattcatttaatttttaattttttttttaatttttatagttaaaaagtgaattttttagtttctaaaatttaataagtaaatttttttgtttttaaaatttgtattttaattttcaaaagaattctattgttaaaattttttaaagtattaaatgggtaattaaatttttttgttttaatttttcctttttttttcttctttcactcgtttgatattttttaatcattatttcctctttgatattatcccataatctggttagaagctaacaaatcttctcttatcaaataaattgttttaatggtcgtactttgttgctaatacagtcagtcataccgttatctgagcaactagagcaatt

SEQ ID NO: 21463 - DNA, 698 bp, Glycine max
  Intron number 2 from transcript Glyma02g40380.1 (locus Gly ma02g40380) derived from phytozome v7.0 (chr-ID Gm02; pos 45631702 to 45632399)
ttctacaattgtatgacttcaatcttttacttaaagtttcttttcttgtaaaagccatgttaagatgtataagcatacattttgttggtccattttcatttatattttgtggaatcttagcaacactctctttgtgattagatggaatttgttgaaaatcatcaattttatctaaatcaagagatagaatcattaaatgataagtgaagtcctaaaaaattggttattttcaacaaatttcatccagtcacatagtgttgaaaagagggtatcatagagagcattgttggtatttctcttacatttttcccttctgagcccaaactttcttaatcaattgactagattagagaagttagtatactaaactcaacactaaactagtcaactgactacaatgaaaacaataagctataagtgcaccattctgtatgatattttcactaaacttgaagcacaataatctctgtttgacaaatttatcttactcatcattagctatcttttacttcatgaattgcatcaaatcagaatagtagtcaatactacttaatgcattgcataataatcaaatatagtatagacaagtatataagctgtggatgagtcttttcttgcttgcattgacacatttgtttgaaaactttttttgtttgcctgcaggcatctactgaacttgaacttgtctggaactttgg

SEQ ID NO: 21464 - DNA, 533 bp, Glycine max
  Intron number 3 from transcript Glyma02g06180.1 (locus Gly ma02g06180) derived from phytozome v7.0 (chr-ID Gm02; pos 4938866 to 4939398)
ttctacatatctattgtactttggtctggttccatgtaagttataaatcattgctgaaacattccattccttttttttaaccaaaaataaagcgatataaaatttctcatctttaaattgctcttgaaagcttggcattattagtgaatgactatgattgttgaactttaagttttttatattttttgtcattttcattgtaggtgtcagcatcatcattttttttctttggatttcatcatcacatttccattttcaaatgtactactcagtatccatatcatttttaagttcatatattgtgtagaagaatgcactttgcttcacataaaatcttatttatatatataatttaaaaggtgtttaaacaagaaagaactgatcttgcaccttcgaaatctgtcaaagcctaattttgctttgttttcctcctttagtgatctgtttgtcaatccctgaagtttgatagaattagttctagatatgatatttgagaagcttgttttgatttggttttaattgtacagcagaga

SEQ ID NO: 21465 - DNA, 673 bp, Glycine max
  Intron number 1 from transcript Glyma04g03470.1 (locus Gly ma04g03470) derived from phytozome v7.0 (chr-ID Gm04; pos 2524829 to 2525501 reverse strand)
ttattattacagaacacagaagaattttagttcgagtgagtgatgatacgttaatatctatatttttttgaatatttaacaaatacctgttttttctttttatctctctttatatcatgtttataatacttgtattttttttttaatcttatttgtgtttttttcatcaagtgtccattcacatattgagtgttgatgtataatttttctactagtatatttatctatatgtatgtgtgtacatgggaacggcaaagattggactgaatgaacaaacagagagggagaagatcatagattatttaaacggctcttgagtttttctgaattgtttattccattgaatgaaggaccctagttattaattttatattccactatatagttcagaagagaagggtgcttgtttattttcataataataatgtttccagaatctggattctggtcaaagatatatcacagaccactacttgctcttcacatattcagatagagagagagagagagagagaggaaggttttgcttcttagtactagtactttttagtattttttatgttgtcttcccctaggtttaatgatgtatgaaaatttgatgatttagagatattatcggtgacagagtggttggaagtggttgctattattattgtttgatagagaagtattt

SEQ ID NO: 21466 - DNA, 528 bp, Glycine max
  Intron number 3 from transcript Glyma04g38640.1 (locus Gly ma04g38640) derived from phytozome v7.0 (chr-ID Gm04; pos 45004771 to 45005298)
cagttagcaccattctaggtatgatacatatacacattaatatgaatagcaccataagacacatcttttattttggaattcaactattcaagtttaagtgatgtgattatcttctttactaacaaaagtacctccttttgactattttaaggtcatttacttgtgttttcatttcctgttttcactttttaattacaaaactgtcactttgttttaatttatttcttgtttccaaatatgtgtacaggaaacaaattgaaaaataaggtgacagttttataattaaaaaataaaaacagaaaatgaatacaaaagtaaatggagccttagcatgcactgaccattcaaagtttcaagtttacatgtttgtaattgaatttactaaaaactttcacgtggattaacatttctgtatatacattgacaatcataatctttttaaaatgaagtgcatgtatgatgtgccataacatgctttattattgatttgcaggcgggtacagtgttacgttctgtgggatagttcag

SEQ ID NO: 21467 - DNA, 523 bp, Glycine max
  Intron number 1 from transcript Glyma03g06300.1 (locus Gly ma03g06300) derived from phytozome v7.0 (chr-ID Gm03; pos 6507104 to 6507626 reverse strand)
aggtggcagtgacacgtgtaatcctacttaggcaacgagtacacatggcacctcacatgacatacctacatggcccgttaatagtcacgtaagcaaataacggatcccaactaatagcagggagttgagacaaaaaatttcaaatattagagacccgattcaaaagaaaaatttatcagggaccaaacataaaaaacacgtatttatcagggaccaaaaatatatttaagcctactattattatatgctgattttttaaatagaaggaagacatgacctttactatctaaattgactttacaatagtgtacgtttactagttgcttcttcatcatatattagaaatgacataactggctcttgctgatttagaagggacaagcatactataaactatgttagtccattgaatttagtaattgttaacttagacccaattaatacaattcagtatatttcaatttttaatggatatattttttggatagacttctagaatcatacaaggccaccctgttttttt

SEQ ID NO: 21468 - DNA, 819 bp, Glycine max
  Intron number 1 from transcript Glyma01g32890.1 (locus Gly ma01g32890) derived from phytozome v7.0 (chr-ID Gm01; pos 44505178 to 44505996)
aggaattgcaaaagctggtcccaaattccagtaaggtaaagaagaatatatagttgtaactgagccaggattttggtacaaaattatgttcccagtcttttttcaaattctctattatgtgagaaatagtggccatacgtaacatgatacgtaacatgataaagctgcaacattgagatcctccttaatttctttccctggtcaccaattaattaatctgtagtggtccctgaggatacaatgccatgaaccccagatcacatcgcatctccttataatgtttccttttgtgtttagataggattgaattggcctagcttctcataaagcaaacgcccttcagaaatcaaaaggaatccttttatatctctttgaagaacttcttaaaggaatatgtgcctgaaggaaaaaattcagtttacatctttaattaagttttcgtgaaataaaaaggtttcaatttttttatcaataaataaatgttaatctgttaactttgttaaaaatattaattggaggattccaacttgtgattttttttctcttctccctttaccctactccaataattggatcaatcttatatctccaaaaaataattagcctctatatctacactcagcattagagagaaattttgccgtctataataatagttttgtttgacttgagtaggattattttcaacaaagaataaacatatgatctattagaataaaaaaaattaattatatatatatgccatatatataattttaccatattgataatgagagcttttttattctcttgtttatgttgcagaccgataaagcttcg

SEQ ID NO: 21469 - DNA, 511 bp, Glycine max
  Intron number 2 from transcript Glyma02g46900.1 (locus Gly ma02g46900) derived from phytozome v7.0 (chr-ID Gm02; pos 50717410 to 50717920 reverse strand)
gagtcactgctcttgatgtcagtattgactacttcttaggctttcttcgctttcaatcttctttgttaattctgtgttttgatctcattggctggattgttagaatcatattggctgaattggattgatgagctggccattggaacgttgtttcttgttatatgacatgctatgaatttttaaagtttacatttgtgcgacaaatttacttctggctccatttcattgtttgtattgtttagctggctgtttcgttgctctacatcaaaatataaaaaagaagtttttttttttattattgatttcgtaaaacacttcagtgatatcggattaaatcctattattttgcttcgtggaaatgtcctcagtggaccttactgttacttaattttggattcggcctggttttgatatgataatgataagtttctaaagtttaatttatggtaaggtgacatgttctagtccatattttgtgcagaaatttcaaggtttgctatactcaactgca

SEQ ID NO: 21470 - DNA, 635 bp, Glycine max
  Intron number 1 from transcript Glyma01g30920.1 (locus Gly ma01g30920) derived from phytozome v7.0 (chr-ID Gm01; pos 41697832 to 41698466 reverse strand)
cctctggaattgctggtttcactgctgcttactgggtacacaaccatccttcactctgttcacaatcatttattaaacttaattgttaaaaaaaaaaaaaaagaagttagcaatgatggtacagagatgtattaaaatgctgttttgttgatttggtcaagtgatatttggcattattggttgatttgattttgctgcgcttgacattattgaaaatattaatttggtactttttaataccaagttacttgaggagaaacaatcttacttaaattaaatagtactattatgagttttatacatttcttcatctaagtatttaatcaaccgaatttgaaattgcatttaacaagtaaaatcaatttagcacttcaaaatttcatttcattaatttttggcatccctaaaaagtaaacttgatttcatgctgagaaaaaaaaaattcttttcataactactactagtagttttttttactattaaaaactaaaatattcgatagtgtcatcttaaagatatgaaaagatgcttaatttatgtatatttatgcataagactgagaatttacttgaaaaatcataaaactaaggatggttttaggttgggccaaggttgaagagtgacagggagaggtt

SEQ ID NO: 21471 - DNA, 941 bp, Glycine max
  Intron number 2 from transcript Glyma02g12020.1 (locus Gly ma02g12020) derived from phytozome v7.0 (chr-ID Gm02; pos 10232527 to 10233467)
actgtgaccctgacagtgtctttgataaatctcaggtattttgaaaagcataaaaaaccatatatatatatatatgtgtgtgtgttttgaaaaaattgatgataaaagatgaattggcatgcaggacaaattattaggtagccagatcattgtgatttcaattaatctttatatgacacatgtcatgttgagattaatcagactatataaacacataatagttaaaagactatttaataatttctctttcagaagtcgaggtataaattatttacacttaaactatgagccaatgaagggttttcaagtaattaggatttggtaaccagcacaaatgcaattgattgattaagaatgcttttagtgtacagaagtttatgatggactaaaaattgtagtaataaaaaacatagatcataataactagacggattattaaaggagggtttaggactgactctgtgcatagtaatcttgatcatctaatatgatatattcatgatatccagagcaatgctgtgtttggccttaaacaatctgaaaaatattggtgttggaagagacaaaagttaatataagtaggcaaaccatgtcatggccctccataagtaaatagcttaatttctgttgctctgagacatttattttggtaaccaactttaattagtgtgatggaaatttaatacctaggcatttcatcaattttcttgatatacatgaagttgaatcagctaaaaagtatggatctagatctcgcaaaagagtaaaattaaattaaaataagctaagctcatttttttaaaaaaaataaaagaaataaaagggaaggaagaagaagaagatacctaatcaataaccttatataatcatatcactaatttttaaaacgagtatgcatttgaatttaataattggtgtagatctcagacctcattagcaac

SEQ ID NO: 21472 - DNA, 631 bp, Glycine max
  Intron number 1 from transcript Glyma02g08110.1 (locus Gly ma02g08110) derived from phytozome v7.0 (chr-ID Gm02; pos 6347637 to 6348267 reverse strand)
cttcatccttgtttactgcactgctggaatctccggtgtgttatcacttttcaatctcatagacacccttttaatttgcttgcgtggacttcaatctcttttgttggattggcttggtttcctttctatattctgatttcttagcatccaaagagggaaagttgctttcttagaactctaatttaaggttttaaattgcagtcgcgctgttatggtttcatcgcaatgccggaaattgcagacaaatatggccaatgtggcaatgtggttgcaattgaccaaaattatggtcgcagactgttttttaaaatcatagattgttgtagaaatatcaagcatacccccatttagacaattagcattctcggtttggttttgagtgcttatgaaatgatataatggtgttcgtcaaatttaactggcctttcatgtttaataattccccttttctctcaagtttctaagcctccaaactgaggaagctggtgcatttgtgcttcttttcttggttggaagtaaacaaatatccatggcttgatttgtttgcaaattttggtttcctattctgaaaactgtaatttttctatccaatgtagggggtcacataaacccagcagtgacatttgggctc

SEQ ID NO: 21473 - DNA, 736 bp, Glycine max
  Intron number 1 from transcript Glyma02g09860.1 (locus Gly ma02g09860) derived from phytozome v7.0 (chr-ID Gm02; pos 7778070 to 7778805)
aaatcagagcccggagttcaggtttatttccctcccctcttctaatttatttgtttatactccctctatttttaattacaacatcatttcaattaatttattttaagaaaattaatttatttaattaatcacattaaatctatcaattatttatattagtattttaaaattattattttcttatctttttatccacttaattatttttcgttaatgtttgaagagagaataattaagtatgaatatgtagagaaaaaatgattaatacatctaaaaatttaaaaaatagttttataaaaaagaacaaataaatttttgaaaatgataattacttaaacaaatggatagctactaattttatgttagtttttcttctattaagtgtcattggaattttgattgatttatattaattcacattttccatgaaattagataccaaattttctttacaaattttttaaaataaaaacagtagataaacaatcaacaatttgaccatttaaaaaactatttacttgtttcattcactaccaaagtgagtatttcacatttttataccaacatttcattaattaggtgaggccacttgtgtagttcgatcttcaaattaattgatattgcatcttaaaaatcatgtgtaattgttattattttcaaacaacactgttgtaattattatgtgactgagaaaacattgtaggcaactcatgatgatgaaatgtttactaagcag

SEQ ID NO: 21474 - DNA, 407 bp, Glycine max
  Intron number 4 from transcript Glyma04g05810.1 (locus Gly ma04g05810) derived from phytozome v7.0 (chr-ID Gm04; pos 4421490 to 4421896)
agtcaaaaatttcaaaagaagatcctccacaactggtaggtggctcttgttcttctatctatcttctagtagttagaaaataaatattaatatactttttcactaatgctattttataaacaaaatgtcaacataactctaagtgagcctcttaaaaacaaacataactctaagtgagagtggctttcaaatgagatgttttattaatctgctaatggttacacaaatatggctaaataaagaaaaatataaaatatttttttgtattttcatagcgttaaatatacatttttgatttataaaatattaaaaacattattaagagaattttgtcgcagcatatagcttaacatttaagtacactaattgctcgagtaaatcctatttttgatggcaggaccccgagg

SEQ ID NO: 21475 - DNA, 502 bp, Glycine max
  Intron number 1 from transcript Glyma01g37940.1 (locus Gly ma01g37940) derived from phytozome v7.0 (chr-ID Gm01; pos 50177832 to 50178333)
gattcgtcttttccttgttcgcttcaatttttcaggtcttggttctttctttctcttttctttttttaccccttagaaaaataaatttatgcttcggcattctgcgttccggtttattctgagaatttatagatcgctgaggacacagtgtctgcaatagagtcttcgctttgttttttaattttaaaaaatttaatatttttggggagggagaggaaaaatcaggcttttccttagttctattacttttttatattaaccttatgagaaattagggcaagccttgtaattaatgggctatgatttatgaatgtgttttgagctggaattagtttagttatggtttgaatgcattatgctgtgttaagagcaattgttggtgtctgaaaaattgaaaaggtgacattgtgatacataggcttattttgttatccttctgagtggagagttatttggattttgtttaggtgattgcagttttgtggtgtaaggaagattgata

SEQ ID NO: 21476 - DNA, 1023 bp, Glycine max
  Intron number 1 from transcript Glyma0165s00200.1 (locus G lyma0165s00200) derived from phytozome v7.0 (chr-ID scaffo ld_165; pos 18997 to 20019 reverse strand)
cagtgccaccaaaggaccaggtttgcttcttttttttttctatgcttagtttcacatttttgtttttctttgttggaactatcataattcttttgtttgttcttggtcttctttgggtgtttcttgtttgcatgttaggaacatgattgctttcaagtgggggtgattcttgttgggttctcaaaatatgcttctttttcttttcttgttttttttcttctttcctttttctgaaatttcgtgtttcctagtagcttgcccagtttcttctcaccttttggtttctttttatacgctaaatattctcccttttgtatgagtatgcgtagatccaaaacttgttacgaaacatttcgtattactgctatgctagacttcttggttctgattccattttcactttctttttttgtttcccttttatgggaatggttatttcttgaaatgtttggcgacttcaacaatttactttgttttttatagcttggtacgattctttccagcatatttcgggtttgaagttttctctgttgctttggtgttactggtggagcctctttactgtcttgagaatttatttcaatgattttgtataattcaagaggatatgagccaaatgaaagacaaaacttagatgcaatttcttaatacttttagtactggttttcaattggagttggagtttcacctcaataattcgtgttataaattttgcattaagaattagcatagattacctaattaaaactccaattctgattggagaacaacactaaaagagtcaaattctgattgcagaacaacactaaaagtatttaaagatctaaatccatgttttgttcccaaactaattggcttttctgttatgtggggaaattcgttaagaaatggttgtctagttgttgtatttacattaaataaattgagaacgtacaagattttggcatgtttgatgagacagtctcttggcccgaataaaatgttgcaggtggacttggaaactgtggagcctcaggctcaaca

SEQ ID NO: 21477 - DNA, 869 bp, Glycine max
  Intron number 2 from transcript Glyma03g29000.1 (locus Gly ma03g29000) derived from phytozome v7.0 (chr-ID Gm03; pos 36952801 to 36953669)
ttcctgttgttgctggagttgtcattgcaagtggggtatgcttttgttctctttatcttaatctctctgctttctattgatttgttgtatttgaatgttgtgaatgatcatggaagtgtttctttttgagatcgggatagaggtcttgattgattcatattggtgtgtgaagggcatttgtgtaacaactatagagacatgccaatgctgcatcaagttccttgtgccactccagatctggagtggtgttggacagatttggtggtggtggtggtttgtgtgatttagttgatctgttattgtttggaaagtataaggatttttgttttcatgaagtgaaatctgtttggaagttaatgagatctcaacttttcaagaactgcaagtctatgacaatcactgggaaaatgattcttcttgatattattctttgttgtcttcttctttttggatctgcactgtactagtttattagcttataagttatatcagagagccatatttttgggattttttttataatcaactagcattgaagttacttaattatcattttatttcatctaatcgtgttatatatatatgattatgatgcctcccctaaagcttgtcacgaatttggctctttgtagttacctacttatcaaatgttgtggtattctgtgtattgcactattgcacaccacaaatataatttattaatttgttatatgactggcaagtggcaagaaatagtagttcctttagacggggatggtgcatattttcctttctgttttcccggtttattcattttgtttctgtagagctacaagattttcttggtgattgcagggcgagccagggtttcacttatttggattcattat

SEQ ID NO: 21478 - DNA, 637 bp, Glycine max
  Intron number 2 from transcript Glyma04g36930.1 (locus Gly ma04g36930) derived from phytozome v7.0 (chr-ID Gm04; pos 43423848 to 43424484 reverse strand)
tctgttgcactctacactgacgtaacaaattcaaagttagtctctctctcaacttgtcatgggaatgttaccattaagtgaaagccaatatatttagcttgtttgtcatttagaatcaaatttaagcttttcttttgttcatgccaactgtgaagatgttttgctattaacttaattatgtttaaatcaaatttctttattatggtattaggctaaatgtttataaggtgaatgattgtttctggataacttttaaatattgccttctatagacacaagtgataactttgtctcaaaattcagtttaaacatagttagagtttgatatgcttatttttgcttgtgacaacaagtaataacactaggtgctagtagtgaagttacaaatttacagttagttaatttatgataattgataaaccagttgctcctatataattatttctagatggtgtttggctgtttgcaaaatatttgctatttcttgtcatatgtcagtctataaaagtaaatacacagcaattgtaaaagaatttatctatttatttgtaaattgtaattgattcaaaagattgggagcctgctcttagctaaagtatattatgtaattgttattctcagagaactcttggaaagt

SEQ ID NO: 21479 - DNA, 940 bp, Glycine max
  Intron number 2 from transcript Glyma03g21680.1 (locus Gly ma03g21680) derived from phytozome v7.0 (chr-ID Gm03; pos 27474012 to 27474951)
tgacggagttgcaaattggcgtgaaggtgtagcctttaacctattactttgattaagatccattgcatcttttatagtttaggttaaaggtttcgattaattaacatttgccgatctaaaaaaaaaggtttcgaataatttgtacggaaagaggagtttgcataaagtgtttttaattaaaaattaaaattaaaattcgttgtcttggtatattttttaagttgatgctggatcccgatagaatgtaatgggtatattgcttgatgagtgcaaccacattgagcagtctggaaatttgttttgaaatgtaactgtataagtgtggttttcttctcttggttcagctgcaaagtcaatgggtattttaaaaaaaaatatgtaaaataattgcatggaaatcttatggcatcacaggtgcttggatatttatgtattgtttcatgtaagttgaattgtgtaaaagtgcagtgaaaagccttgcactggggaggaagattatgttactgtgttatgcatttgaaacagctaaaataattgttgatcttttaggctatattactatattaggtactattttcattctcaagaaaaaaaaaattgtggtagtagtatgctactatgcttggcattttgtgtttcaactttcaaaataaagtgtaaattcatgattggagtctgaatataaacagtgtcctttcagtgaaggaaagcaaggtatgtttatgggctttacacatatatgtggtaatttgttgtggagattgaaaacagggaaaatgttgttttccacggggaacagtgcaacattgtttgtttccagcgatactgaagttttgacttgtcaatatgcattagcaatactatggtgaaactgagttttatgccctagtttttgcttactattgatgatctctgtctctttccagcataaaccagcatc

SEQ ID NO: 21480 - DNA, 610 bp, Glycine max
  Intron number 1 from transcript Glyma02g44110.1 (locus Gly ma02g44110) derived from phytozome v7.0 (chr-ID Gm02; pos 48778065 to 48778674 reverse strand)
gggctttattagcgccacacttagttttcgtcgctgtaagttatgactacctccaatttctcgtttaacttttacaatgaattttgttaccgttactgtttttattgactgcttttaacttttgtgtattttacttaaagttttgcaacttttattggttacttcatctctaggtatgcgttttgacctatttgtgataattaatgttgataattaattgaatattaaaactgtgtgttttagttatgctgtttatggtatttagcttaaacctatttgacattgaacttttgttctattagcattgtttttggcgatgtaaaatttctgatgatgcctgtcagttttgaattgttaatgaacactttaaataagattcagttttgatgagaccggattatttttgtgtcacttcatatatccttaatttggtaaatgggaattttcttttaatctgaagaagctcaattttttttttcttttctggttcttgtcttagttatgctacattccattattgagaatatttgaggtgaaatgctgcattgtttgactttggtttacttggtgcataggcaatttaagacaacccatctttctacctgatagg

SEQ ID NO: 21481 - DNA, 363 bp, Glycine max
  Intron number 1 from transcript Glyma04g12060.1 (locus Gly ma04g12060) derived from phytozome v7.0 (chr-ID Gm04; pos 11022795 to 11023157 reverse strand)
gttgcactactggttgtgttcaaagcgattgtaagtgattatgattatggtttcttcaatatgattttcctctgtactattttttatattaaatgttcttttttaataaaaaaaacaccttaattcattcatttactttgaatttaacttttattgttctttaattatgcaatacaaactattttcgtattttcatcacatctttaattcactaaaattataccaaaaaagtgtgatgcttggaaaaataacaggaaactagtagaatgaaattagatgatataatatgatttggatgtataatgtgagctgaaaatgtcacatgcagtgaggcttcaagcacggtgtgatcgcaagtgcaac

SEQ ID NO: 21482 - DNA, 496 bp, Glycine max
  Intron number 3 from transcript Glyma01g00800.1 (locus Gly ma01g00800) derived from phytozome v7.0 (chr-ID Gm01; pos 454732 to 455227)
aggtcatctttctcaaatgtttgtttcatttgtgctatattgtacttgcaaacaggatatatgtatctttagattgtagttttaatatagtgttataagagaaattattagatggtctaggactaggaccattatgatttacattaatatctatatgatgtgtgttattaattctttcccataaattaaaaaacttgagtatgctctattagagattatagaagatcaataattcagttagtaagttaattagggataatatgttctataaataagagctctcatggtataataatcatctttttcgaacaattcaatatgttaccatatgcgtatcaatattcatccctttgatccatggatttgtaacagttacatagacattagtcggaactatgtatacatggtagtcctagactacctcataatttctccttgttattcgatagaatgcatgcatttatgtggatcattctgaatttctttttctttcagg

SEQ ID NO: 21483 - DNA, 721 bp, Glycine max
  Intron number 2 from transcript Glyma01g34360.1 (locus Gly ma01g34360) derived from phytozome v7.0 (chr-ID Gm01; pos 46746084 to 46746804 reverse strand)
gcgtattcgatttgctttatccctcaaaggtttttttttacttctttattgtaatttttgttcccaagtcccaacttcccatattaacaattacactcggtttatatctgtgtttgacttattttgagaaaatagctttgtcgccaataacggtcttacatgactctgagcagtattggctccggcaaaagatacctgttaaagatatcaatggtctttaacaacaacaaaaaaatctatatagctttagcttttgaacttggtgttttttttaaattggtaaattatttctcaacattaacctatttctccacatgcacttaatttgtttacttcgaaaaagttgctctcgttgatttgttcttctttctctgtttatatttaaccccttgttcatttcaattgtaattttatttttcattttcctttctgggattttagtaaattctgataggatgatcccttccccctcttcacacacacaattctttgcttcagaatgatctccattacaacattgcttctttttattttattttattttattttttcaattgagaataactatatctgatataggtgtataacgggaattcagaaatttgatttgcgttttggatttggttatgactccagaaaatgttgaattggacacaaggaacttatatttcttgattgattgatttttttaatatgtatctaatatgactagggatcccat

SEQ ID NO: 21484 - DNA, 404 bp, Glycine max
  Intron number 2 from transcript Glyma02g35640.1 (locus Gly ma02g35640) derived from phytozome v7.0 (chr-ID Gm02; pos 40723787 to 40724190)
attgcgctgcaccgaatttctcgaccttcacttcggtaatttccatcttttgattggtttttttttttctcccttaatttcatgcttgtgttgtcttgcgttttaatgctactaggtttcaccgatttgattgccgctttcttcgagtattcttgggtgtggtaaaacaacgttttttctttctcgcgttgaaccctaatgtttgctaattcgtgttattgttgctgttgcgcagatgcgtgttttgtgaacaccaaatatgaatatggatcaccacgaggataccatttatctttaatttgctactttgtttgaaatatgttatatatatatatatatatatatatatatatatattaattattttaggcagaaaaaagaagaaggaagaagagaagagaaag

SEQ ID NO: 21485 - DNA, 371 bp, Glycine max
  Intron number 1 from transcript Glyma02g43130.1 (locus Gly ma02g43130) derived from phytozome v7.0 (chr-ID Gm02; pos 47992274 to 47992644)
cttcttgctcgaaaagcaccactcggccaaatgtaactccgtctcgatttatttcacgcttcttctttctgttttaagtattgtttccacgttactctgttttctgtgagataactggtttctaattttggtcaccatgcttgtccatttcttcgtttctgcaaaccatctagcatacatggagcttcaaacgtgaatgttatgaacttatgttgaactaaattaatcatggttttgatttacgaatgctttttctaatttgttttctgtctccgtgtaaccttatcggtgattctggatttcaatttcctttaacttggaagtttatttctaaaatgacgaatgaattctcacttggtccttgatgaagg

SEQ ID NO: 21486 - DNA, 963 bp, Glycine max
  Intron number 2 from transcript Glyma02g26860.1 (locus Gly ma02g26860) derived from phytozome v7.0 (chr-ID Gm02; pos 27967369 to 27968331 reverse strand)
ataagctggtaaatgtcttatatatgcatgtcttctttcactacatcaaaagtcggttttttcagtaattattgtatcttttagcaacaatatatacaaattattatctctaaaatatttactagcaattagattatgattatcgtaattggttgataaaaatattacctgcaattatagtgattaaaaaagagaaaaagaaactccttttatcaccaaagtaaaaaaaaaaaaaaactattttagaagatcctacactcattatatccatacaacaaaggttgtgtttgaattacactttggaaacttaagtttggatgaaattcattttgcaaactcaatttgcaaaagcaactctcctctaccttgtatttcaaactgagtttcaaaggaaaattacaataaaacttagtttaaattctgactgatcacctgaaaatcaaatgagatgcttttttaatttttctttttagacatacttttagacctccaaactgaaaatcataaagtcacacaatccaagaaccgtttatacacgaaaatggatttggaacaaatttaattatattttttaaaaactttaaatacagtacatttttatctattaaaaaaaatgcaaagttgtattcactaatttgtgtaatatgataaattattataaagattttgaagaaagtgtatgctttcctaaattgaataagttcaattgaagagagattgatacatacaaacccatttatctctttccactagagttctcttttctcttcagtcttagattaaagagataaacatcgtacttttgtggatcttgtcatggtggacccacaaaagtttttttatcttttctagtgatttggtccaattttggcatctttgaaggagagtacaggaaaatgatttagtgaatcaaatatgatgccccaatgaaaatgcaggtgaaaggagagagtattattcttc

SEQ ID NO: 21487 - DNA, 642 bp, Glycine max
  Intron number 1 from transcript Glyma03g39240.1 (locus Gly ma03g39240) derived from phytozome v7.0 (chr-ID Gm03; pos 45396891 to 45397532)
cgtcaacttggcatcaagaaaagctgaagaagcttgtatatatcatcccttctctccattcttttctcatcaattccatttttttactttcaaaatatcattttgtaaattaatcttttttttttcttggccaagaatgttggtttcgagtttcaacctgtaattgacacttgtttggttgaaaactatattcttttggcttcaacaaaggatattgattgtttcttgaatgatggaaagacaaatttatataaccaaaaattgttgacaaaagtgattcaatacttgggtgtcttaactaaggtctgagatttgatcgctgatttggacatggaatgacaatcagaaatatcactttatcccaaaaattaattgatccggtgggaggaggaatacaccgttataaaataaaaaaagagacaaatttataatggacaaaacttagatgcagtttcttaaagcttttagtgttgttctcaaatcaaactccaattatgatcgaagaacaacaccaaaagcactaaaagaattgcatggaagatttgtccattaaataattgcatgaaacattgaaaatttgaacgatcttcaagaaagaataacatggattacgtgtgtctcgtgttgcagccttgagaaggt

SEQ ID NO: 21488 - DNA, 636 bp, Glycine max
  Intron number 5 from transcript Glyma03g10920.1 (locus Gly ma03g10920) derived from phytozome v7.0 (chr-ID Gm03; pos 13478964 to 13479599 reverse strand)
cttccatcaaccagcagccacattgtgctcagacggtaacatgaaaaccgaataaagtatagaggataaaaactcagtcaaatagcattcctagaaaataggaaaaaaacaaaatttcaataatatctccaacgtaaaataaaactgaaacatcccaagatgtaaaagcttataacagttaggaaaataaattgaccaagtaaaagaaaagttcctaaaagataggaatggaagaagatacaagggtgcttttagttttaaggaaaaacggaaaaacaaatatgaaaacatattagatgtttaaaaaacaatgctgaaaaatatgaagtatgacaatattttttacttcaaattttaaattataatgaaaatattttccaacagctatatgttggtatttattttgtcacatcaaaatagtccccgtcatgcatgatgcttctgcttgtgctgctaagaatcacagttgattaatatgcttttttaaaaaataaatctaaaagcactgaaccccctgttctctcttccttttatctgtggttctctcccactcaaaatgatggtagttcctattaaactaccatgagcaattgagcactagctaattgccgttagaatatcagttattctgttaat

SEQ ID NO: 21489 - DNA, 574 bp, Glycine max
  Intron number 1 from transcript Glyma01g03830.1 (locus Gly ma01g03830) derived from phytozome v7.0 (chr-ID Gm01; pos 3283884 to 3284457)
tggcccggttagtaaaaaccctctcttttttctcttcccttgttcactctctaccttcaatttttaaactttctcaaacccttttcaggaaccgtgtgtaaaataatctcaaacccttttgttgatcgttacctgttggttattgtgtgaacggaatgttatataatctctgtgtgtgctttaatgctttttttcattgtgtttttcgggttctgttttattagattctacagttgttggacccttgtgtcttgggattttaaggatgctcttatgtcctaatgttcctaagtagctaggtggaagagtgatttggtactaactgattggtcgtaagtttgtatttgttaaagattttacgaggagcgaataaaaaatcagtcagaaatgtatatattggttaaagggtgcatctgttatcggttacagaagtgaatctttgagttttttttttaaaggctcttcgagttgttgtattatactcttggcttgtaatgtttgtacttgtattttgtaatgccactcatgagttggaatctgattgtgatttgcaggggaggcacattccttgaag

SEQ ID NO: 21490 - DNA, 959 bp, Glycine max
  Intron number 1 from transcript Glyma03g41590.2 (locus Gly ma03g41590) derived from phytozome v7.0 (chr-ID Gm03; pos 47017013 to 47017971)
tagctttccattaatactgcagcctttactgaaaggtatttgtgaaatctcactctctaaaacaaggaaacggtgaagttgaactgtgttgtgttggtaccttctctgatggcccggtagtaccagtactgtttaagcatttactctgtctataattaattgtgaagttatgtaatttttgtccactgttggacttctcgtcagtatagatcagtcggctattctgacatgtggttttgaaacttagttcactctgtcaactccatcgtgaatttgttatagttagctataccatgattgtcttctttggtggatgttagattattcactctgagactggttgaatctcttgtaaaggttatgctggagatgggaaattaaccattcaattttccatctaggaaattagaatttttgtgtgatgctttcatatgctagcctagaaggtgaaataaaaagcaaaagtttttttttgcaatatttctttgtcgttgaatctgtctgttgatacgtagtttttacttttttatacatagtgaaccagatttccagctgcttttatgtagttgctaaaacatctctaactactttgatgtaataatgatgtattttataaattcctgcacttatgttaaaccctccctctcctttttatttttttttaaaaacaatttatcgagtattaatttgaaattgctggacttgcccccttccgcttttctagtgtgttacttgtataacttatctatgacagtaaaatgtttataattagtaaagattatgttatgcaggttaccaagattatataggatcatgtgtagattttagatggcagaaatcttggtttatgaattttgtcttgtcccttgcaatattttcatgccgataataattaacaagctgacatggctcctgttaatgcagttgagacatttttcaagaagtagtaaagctccttc

SEQ ID NO: 21491 - DNA, 765 bp, Glycine max
  Intron number 1 from transcript Glyma01g21570.1 (locus Gly ma01g21570) derived from phytozome v7.0 (chr-ID Gm01; pos 26771791 to 26772555)
gtggtaagagtatcatactttactatatgtacacttgtttgactctatttactctttataactcctcagagtgtaaaatttactacttcgattcttatttataagatataattatctaatttatcatgataagacacaattatctaattcatcatgatgaaagtgattaatttgtacaaaactaccattggaattaattctcttctatcacttctaaatgtttatcaatacaactctcttcttttaattagggataatttaattctgtaaaggatattattgactgattcttataaaatagaagaaacactattttttatttgaatcttataaataggaataggtagtacgaaccaattgattcttagtaacaaataaaataaaagtcatttaatagtgtgctttttgattggttgataatgttggaagattgtcttaattgtgatcaccttttgttgtggtctctttggaggctgctggaattggggccactagagtggtggtttagttttacatctactaaaaatatgaccaaaataaaatatataagtgagtgtcaactcctattttagaagcagattttgaatattgaattaaatattaatccaaattttaagagataatgtaagtttttgtttttacactgacaccatacatatcattaaactccaataaataaccataaatttgttgtatattagtatttattttgtattgtttgcaattgcaggattaagaataactactcaaaggacaattcagata

SEQ ID NO: 21492 - DNA, 873 bp, Glycine max
  Intron number 1 from transcript Glyma04g22190.1 (locus Gly ma04g22190) derived from phytozome v7.0 (chr-ID Gm04; pos 25469208 to 25470080 reverse strand)
accagctacttgttcactggtggtgtcaaaatcaagttaagttttgctgtagctatgtacattactctggctcttcagattgttctattgttttactctttatttgtttattgaagatgatgatgctagtagtcttacatttttcttgatgaaattcttgacagttactcattttcatactagtcattttttgttcgctttgtggcaattaatgtgttaattttttaacaaagcttagattgaattttgtaagtactagttttgttctataatcaaaattgaggttttattgcaagaacctacattgatctttagtatatacctttattaagttgattatctaaatgaaactccgattttgatttgtttttttttttgttttcacttgagaaatgctaataatacacgcacttttgaagacactcctttttattaatgaaaatttattggagattataaaattttgtgggatcttatttattgagtctccctcatgattttgtattttcaataaattttaaatagtactaaaaaattgtgttaaaaggaccgtgataaataaataaatatatctttagcacttttttcacttttattctcaaagttatggatggaagaggagtttgacacttgatagttgataccgtgctttttctaaggcatattcagtaaaatgtttcaattggatatgcctctggctgattttggtggttcaattaaggaatgtgaataataatattccttatgttaattgtgcttttctttttatgttttcgctggtcgtttgtaatagcttttgttgtatgtttaaagtcatgctttaactgttcctcactctgctatatacttgctatgtatgctaactttgcaggt

SEQ ID NO: 21493 - DNA, 495 bp, Glycine max
  Intron number 1 from transcript Glyma01g34890.1 (locus Gly ma01g34890) derived from phytozome v7.0 (chr-ID Gm01; pos 47380473 to 47380967)
atcttggtgtttcaggtgagttctagctatcttgcattcaaaacaaaaccatgggaaatttagcacattttttattcctttcacttttttgatttaaaagtggcgttttcttaaacaattctacattatcgagcaatcaattttctcacctaaaatttatcgaattttgaaaattattttctaaacaaccgtttaaaaacaaaaatatattgaatcagcggagagatatatattttctcattcttttcttctattttgttcaactgctttgggggctagttgatcaaacaatatcatcttttaggactatataggagcatcctcttcttggtatattttagaaaacagaactcttttcaaaatatataataatcaaacaaagaccttaatatagcttgcacttgttccctgcatgttttattaaattttgaatgataaaataatgttgaaatcttttatcacttattgcttggtaatgcaggtggagttacctcc

SEQ ID NO: 21494 - DNA, 999 bp, Glycine max
  Intron number 2 from transcript Glyma01g34890.1 (locus Gly ma01g34890) derived from phytozome v7.0 (chr-ID Gm01; pos 47381242 to 47382240)
tccttcttggtgttggcattggatttggtaaccaagtaagtttaaccttaaccaaattaataaccatattctcaaattgaaaaacggaaattgttattcattaaagcctttacaccccagattttggctcttctaaagtagtaatctaaatcatctataagaaaattaatagttaatattctaacaaatgcatgatgtgttatgcatgtgcgtataccacctaatattgctagtgatattctaacacatgcatgcgtacctagtcctataacatgcatcatgtgttatttatatgtaagtatataatattgacctttgattttcccatctagggatgagcaaaaataggtgattgaactgctaaactgaaatgtaaaagcggaatttggacgaactgaattgaactgcatagtatgtatttagaaaacagtcgaattcaatgccaacgatctttcaaatgaaagttacaacctagttgcttttgaatttttgttttgaaaagttagttttttccgtcaaacataattccaacgcgtatccaggcacccataatagttcgaacgaactaaactttccaattgtttcgaattgttgaattatcctcaattaacatatttttagaagcatattcttcatatttttaaatttcacaagttacagtttagttctttttcatgcaatttaatttaggagcagttcaagtttttaaaattgaatcaaagaacatattagttcaattttctattcaaaataattcagttttttttagtgcaattgagttcagttatatatgctccacatataagttcagtttagtttttatttttacttttaacagccctaatcccatcaatgactgctattgcatactttattctttttaaaatcaaaatctcacttcagagagaagttaaatccttacaccccactggtgttaccaattttacttgaattgtttttctaattattctgcaggccgttcctctctatctttcagaa

SEQ ID NO: 21495 - DNA, 839 bp, Glycine max
  Intron number 1 from transcript Glyma03g26850.1 (locus Gly ma03g26850) derived from phytozome v7.0 (chr-ID Gm03; pos 34395069 to 34395907)
attgccaggtagataatttattcaagatacgctatttaacactccatccgtccctaaatagaagactctttttttagttttatatttccttttttctaaggtactattttcaagttgtttttttgcaatatttatttttagacccaaataacccttattacttttcaataaatgatatatatttaaaagataaatacattatctctcttataaggaatggctaaaaacactagcgtaaaagcaattaagtgaaaagagagatattgtgagtctcaataaacttaggataattttgataaaataatacaaattgttaacaaatttaatgttactaactatattaatcaactttcttaaaaggtgtgaattaattaaatagccttatatttagggacgtggggagtagatgataagtggatttttaaatctcaattaaattacaaaccataatagttgcccattactttgtgttgaggaagttgttaacatatatatcttaatttcttataggcagagtataccattccaagaattggtcacagtgactcccctcatgttaagaaagcaaacatcccaatgaaaaaaggtggttatcttatatatggcacttctcatatgcatactggtgttgtcaatgcaactctctatggacaggtgatattttatatatgtattcattcctatataatctttatgatttgttgaagataaaattttattaaattttatgtgcttcgggtattcttaagtaataactattttcattaatactatatctttgtaagatgttcactattataatgcatcttctctaaacttatgtctttgattaacttagg

SEQ ID NO: 21496 - DNA, 491 bp, Glycine max
  Intron number 3 from transcript Glyma01g36290.1 (locus Gly ma01g36290) derived from phytozome v7.0 (chr-ID Gm01; pos 48768623 to 48769113 reverse strand)
tgaggtaatgctttttgctgattgattattcagtcaacattcaacatttgttaagagctcatgtaaagcctaacgttggtaggaatatacattttgatttgtaaagcattgcgtgctccgtaattattgtcttcgaagaaaagattgggacattggaacgcatgtgctagtttacggctcttttggctgttcatacttgagaaacaaattattatgtactctctttgcttgtttcatacctgtcattgatatttgaactacataaatgggtgttcgtgatgaaaataccttacttcaaagtcttgtttttggctgccaggttatatctaacttgttttcagctcatttaactacacacttgcttgtccttcgtagtgactcttgtagcccagcatggtttttctgtatttgagatactattaaattcttattttgtctctgtatactttggtgcagtggaaaagtcatccgatactttgttcccattgaca

SEQ ID NO: 21497 - DNA, 380 bp, Glycine max
  Intron number 4 from transcript Glyma02g39310.1 (locus Gly ma02g39310) derived from phytozome v7.0 (chr-ID Gm02; pos 44567201 to 44567580)
ggtcaggggaaatcctctcagtcttcaaattcttggtgagtccaatcaaatttttctgagcagtaaatgagtaatcatggcgatacttgacatttccattcccagtaagatttaggtcctatttggatacaaacacttactgaggaagaaattagaaggtaaactgaattaaacttctctcatgagttaaaacaacctatgcacttttattgaaatgaaactctctcattttaacttatgaaagaaggttaatgtattttataaaagtgttttttgaaaagtttatctaaacatgaccctagactataaagccacttacatacttcttttgtgggtaagattcagatttggtaggtcaataagaggtaagaacaacatag

SEQ ID NO: 21498 - DNA, 824 bp, Glycine max
  Intron number 1 from transcript Glyma02g12730.1 (locus Gly ma02g12730) derived from phytozome v7.0 (chr-ID Gm02; pos 11000687 to 11001510 reverse strand)
aggttagtgcttctaaattttcattggggccaacatgttttgctatttcatgccactcgtatatccggccgaactgatctcttgataattaaggagacattttggttaaatatttaaagattgcatcaactatgttatcgaggccagtttgcaatatattcaatatgaactatttgtatttgaatttagatatctaattaaccaaaaattattgcatggtatgaaactgtcatagtcccagacaattttcatgtggcacagtaaaattttattgactttttagaaagccgattatatgaacctatagcattggtgcagtggtgtaaggttttattatattcatatacaggagacaatccatttagcaggaaaatcattgtttggttcattgtttggttcttttcttgtgtaaaattcccttagattagtggcagtcacacaccactagtggaattaatttctgactcgggaggttgggggcacacatagtctttgactcaaaaaaaaaaaaaaggcaattacatgacatatcatgtaaaaattagccaatacaataaaaacaaagtataggttcagaaccacatagtaatttctcctttatcaacatgatcattttacataaaatttcgtttctctgcggtctctcttcttgtgttagtagttggatgcatgctcataatagtagctgcataaagtagtttctcgttcaactaatatattttcacatattctataaaaccacgattaaggtgctcacaattgctatccgtttatatgaacacttaccagggattcgaaaataacatttcagaagactcaatctt

SEQ ID NO: 21499 - DNA, 1041 bp, Glycine max
  Intron number 1 from transcript Glyma02g06830.1 (locus Gly ma02g06830) derived from phytozome v7.0 (chr-ID Gm02; pos 5493528 to 5494568 reverse strand)
gctttgcccttgccacctctgctctcgttgtttctgtatgttgccttgcttttcttccaaattccaatttcatactataatctattatcattaactatcacatgaactcacaaatattaaggttaggttaggcctaggagcacccatgtcccttcaccttcgttgtcaaattttgattttttttttctctttttctttttcgttattgtaggatttgttctatgaaggatcttctggtttgtaagtggtaaccgtcaatttgattaaggatgccaatgacatatgttgtattagaattatcaaatgatactaatatcattaattaaattttgtcttataacatcccactaacaaaaactagcaactaatatttgtgaataaaaaaaaaattgtcttatgacaatattcagcataagagctttatgatcccaggcctggggtttgtagtctaatccacatatctttaccaaagccagtgcaaggaattcactgccagtgtcaagcataggactcaaccttgtaaataccaacttagattactaattgatttgttgtagttgatgagacgaatttactaatggcatgctgagtttatttacgaagtaaatagtcaaattagtccgtataggatctaaccctagtcatattaaaccctcaatgacttaaattacacttgaagtccttgaatatgcattctttggtccagtcagtcctcatgtaacaagtttaggagactaattgaacagatctaatacattcattgaggattaatttaatgattaaatgcatatttaggagccagatatgtaatttccatcataagctagttattgattgaaatttattaaaactcagcaaatcatatatataatgagtctaacacatgatttggtaagtcctggaaaaattttgaaagctttagaaaaaggtgttgttaacaacatgagtgagtggtatttctgttcattactattggcaatgtacatgaatgactaagaaaattcagggggcaagtgctgaaggagtaccaaagcggctaac

SEQ ID NO: 21500 - DNA, 917 bp, Glycine max
  Intron number 1 from transcript Glyma02g29580.1 (locus Gly ma02g29580) derived from phytozome v7.0 (chr-ID Gm02; pos 31346332 to 31347248 reverse strand)
tccattacaccgagtgtaagacccctcatccttcgaattttcgttctctccctcaatttgaatgaattagtgaacaactggggttttggtttcaaggattggttggttgcatagttatatttttactctttatttttgcaatcaataagaggcttgatgagtgggcgaagcttgaccaatttgatcttaatttagtggaggctgttcttgatgagaaagtggaggagaagataatgattatattttctccaaattgcacgacaacattgtttgaaagcatgctcaaagaggtccaattgacgtagttgtcatacaaggtttgtagggcctataagaggtccaattgacgtagttgtcatacaaggtttgtagggcctataaggttgttgatgacgagggttgttcactggttttaaaattatatttattttattttctaaatttaaaaataatgaaaaaatataattgtgatttgaaacaaccactatttaacaaccaccgagattcattacctaatagacatctattccatttgacataaatgacccaattgggtaaaaatagaaaataaaatttagcatgtaaaataaactaagggaccaaattaaatattaaaaataatgtaaaaaaagaaagagatattgaatgtaattgaagcaaatcatattagagtccttgtaatttattctttttttttttttactataaccaacatttattggaaaaagcaaccccaaagatttgggacaaaaaatgattagcagtaaccattgaataagttcaatcaacccttcaattaactctacgttaatctctccaacagtccttgaagtcgagggtgttgctccctttctagtttctaccacgtttttttacctcttttttattttttcaaaatcacggttacatatgcagga

SEQ ID NO: 21501 - DNA, 831 bp, Glycine max
  Intron number 2 from transcript Glyma02g46110.2 (locus Gly ma02g46110) derived from phytozome v7.0 (chr-ID Gm02; pos 50168157 to 50168987 reverse strand)
gcaggtataccaattgtattttttgaactcctgacaagttggtaggcctataaatttatgtttttaatgagttttattcagtcttccaacatatggtactaccatcatttgtatgaattgggatttaggtattattaggtacacattctaggaatgtttggatcatagtacagtacaatctaggtcagagggaaggagtactttttcttgctagggcatttttttagtggtaggaaggaaaatgagggattgcatttaaccgtctaaaatgtttctgaggtctgctgcaatttatgtcaaatacatggtattcttctatcataaaagcaaaagaatcattcactctatgatcattccgaggatgcaaaatctctgtaaatttcaggctttcagttaaatatcattgttaaattgtaatgttaataatttttttggtacaaattgtaatgttttattcatcactccatcccctccctattgtatttctttaggcacccaatcaagggagaccaagatcttcaatacaccccccccccccccccccctctgtttcttttataatttgatttcatcccttacctttgggatgccaagaaaggtgaaggaaggatgggagtaaaaatggagtgagctggaaatgttttgattttcactttcactctttgttggttgttagtcagagagtgggaaacagaaacaaagttacttccaactccacaagcacacccttagtgtagcctctctttgtcacacatcttaggctatggtttttccttctgcattacaacctattcaaactgctgaaatataatttttttgatagaaaggtgg

SEQ ID NO: 21502 - DNA, 606 bp, Glycine max
  Intron number 1 from transcript Glyma01g03730.1 (locus Gly ma01g03730) derived from phytozome v7.0 (chr-ID Gm01; pos 3190224 to 3190829 reverse strand)
ttcggatccctttcttctctcacaccaatttccaggtagcattccaatcttcaatctaattctttccttttcacactcatatctggattttcatgtgaaaaaaattcactttttacttttgggtttctcgaatttttttctagtttttcccctttgaattttgtttgaaatttcttaagtatgtttgatggaattggaaaattggtatgagtttggatctcatgctttatccttgttactaacctaatatcattattatttgaccctgagatgttgaaaagttcaaaactttcttacccctttaagctggggttaggttaggttgtttacatgctccactatgttaattgagtttccttgcttttgcttgtattttagttctcatgcgttaaactaggtttttccctcagctgaaaattttggatgaaaaagttgaataagggagcatttcatattcaaagcctatgttatgtacaaggaaaaggttcattaaacctttgattctgagctatgtattaaggtcttcaaagatacgcatactgtcactgctgcggttttttgtgctgtcttattggatgttcttgtggtttttgtaggatttgaaac

SEQ ID NO: 21503 - DNA, 791 bp, Glycine max
  Intron number 1 from transcript Glyma01g44940.1 (locus Gly ma01g44940) derived from phytozome v7.0 (chr-ID Gm01; pos 55408554 to 55409344)
tgctactaagaacttccaagttggtgacactatcagtaagtcccatcactccaattgtctatggttttatttatatatgttcattaatactagttagcagataagttcaaaacttaaaatttttctggaaagtagaaaatcctttcagtagtacctgcaacctcctttcataatcaaaacaaactaaacagtcttactagaaaaataatggctccattagatctctttctagccatgcacaatttggtgttcaaaaattggaaaattctaaaaaaaatatgaactattgttctctgaccttggactcaaattccacgttatattttgcttcaaggctatgaccataacattccacatccagggtgaaaaatagtgtttataatcttgctgctctttattattagaaaaaattgagagaatgtgtttagtgcccaacataagagaatctattttttaatcatccacccaatttgttttgtcatgtggattttattttattgcaagcagcatttagatacctgtgttgtgagatagtttttaattagcctggctcacaactttcatttgcattagcttggttttcatggtgcttgcaccttttgtttttcttttattgatagaatgatggtgcagaacacacaatgaggactcataaatagtatattccataaacctccacgccttaatgattgtggagcatggtctttttatttctctattattagtattaataaaagtggaagaattaaaagagaaacattggtaattcgtgtgatcagtttttgaatata

SEQ ID NO: 21504 - DNA, 797 bp, Glycine max
  Intron number 1 from transcript Glyma02g10970.1 (locus Gly ma02g10970) derived from phytozome v7.0 (chr-ID Gm02; pos 9133127 to 9133923)
caggtaaattattagtcgaccacaaaaataaacaaaagtaaaatactgtaggatatatagctattccatcataatttcattaccgtttatttaaggcctaggtaaaaaggattttaaagaagaagaaaaaaagtaaaaaaaatccacttctttctatcaaagatttacgtatactgatatacaaaaaaaaaaaaaaatgttatgtaaccgttacactctctggttaaagtttgaatttaactccattaatttctttgaatgcttttgttcttctttctatctttctttttaagtgtaataatacctctaatttattttacaatcactttacaaatctctctagctaaaatctctagttcttcccttttcatcacatgtaatgtagtcatgactttgaagtttaataaaccctttcacaccctcaaaagaatgtgaagcattcatgaccaaaatatttatcttttttcctttttttatccccctcttatctcttcacctcaacccacccccaatttaggtgtatgtttatcaacaaaaaccatttttgaaaaatcttagaatgtgaattggaatttaaatcaacttcaaaagttaatttttaaaacaagagttacatccatttatatactcaattataatcttattatctctccacttatatactcaattataatcttattatctctagttcatgtgggatttaagttttttctaaacagcttagtgtcatttgttttcttgcaccttattattaattaacaacaaaaaaaatctcttacaaattttccctaatgcag

SEQ ID NO: 21505 - DNA, 539 bp, Glycine max; identical to SEQ ID NO: 20306
  Intron number 1 from transcript Glyma02g43320.1 (locus Gly ma02g43320) derived from phytozome v7.0 (chr-ID Gm02; pos 48102514 to 48103052 reverse strand)

SEQ ID NO: 21506 - DNA, 733 bp, Glycine max
  Intron number 2 from transcript Glyma03g34130.1 (locus Gly ma03g34130) derived from phytozome v7.0 (chr-ID Gm03; pos 41608150 to 41608882 reverse strand)
gcgctacttggtatgtatgttgctacttctccctaataataatgcgccagttcttattgttttaaactccaggtgttcgatgttggatctattcgaatccaatggaaagttcaaactgtctagttctctctctggtcgagattttgtttacatgatgtttggatttggaagaatggaattaaacatgatatgtagcataagggatggctggaaattattatatttatatatatgggttagcaagtctgtacaagaaatacagctgcaagattatatacaaaaggcctaaccaaaattgagaatattatatgataataatcacaaaaagaggatcctgtaatattatatgtgttgactcataatcatatctcttaagcatgtaggtgtatggaaggatatttattgaaagaaattaatcccttaaatgaatctttctatcttcagaaattagtctttaactctcaaaattattaggtgttataaaatgtcatgactatccaataatttcttcttactctcggtcgaaaataccctggcttctaaaagaaattactttgtctttcatccaaaggaagtgaaattgtaaattagagctgtaatgtgtgaattataagtttataacaatgcattcaacaccgtaatttttttttttgagaaaaaaggaatacattattgactattgtttcttagtttttcaggtgtcccgtttgtatccaaattctcccagcattct

SEQ ID NO: 21507 - DNA, 746 bp, Glycine max
  Intron number 1 from transcript Glyma04g41310.1 (locus Gly ma04g41310) derived from phytozome v7.0 (chr-ID Gm04; pos 47165956 to 47166701 reverse strand)
atagcaccaaaaaactcgttcaaaaggaatacaaggttggtttttgcatacccatttcccggtttgttatcttcactgcttaaagtaagcaacttagtttcttgcaattggtttttgtgagctgttaggagaagggttacttgattgtgctttggaaagtaaccaccttcacttacccatgtttgctttcttgttgttttgaacttgtttgttggaaattttgcaacttttgatgtttttaaggattgggtcgggtttgcttttgaggatttattttatttagatttaatacaatgcgaatgatggtgaagattccgctaaaactggaattttgcttttatgtttaaattttttttgtcttctgtggattcaaaattgtctcagagaattgtattttatatggatgctcatgtatactatttcggacaactatatgctttgtaggataatcagctttcagtatcttatttgttgttagagaagaggctgtctcctttatctgtcttattaacttgggttgttatcattgtgtaatttatcaagggtttttagctttcactgtcttggtctaaaaaggtggttctgattttaattttgattttgatctgtttctctttttctttggcaatgcctttcctttttaccctcttcactctggcaacttgactatgaatttgcaatcatttttattttttttttatttttcctttatggattaggtggtccttcttcctttagtttcattc

SEQ ID NO: 21508 - DNA, 938 bp, Glycine max
  Intron number 1 from transcript Glyma02g39710.1 (locus Gly ma02g39710) derived from phytozome v7.0 (chr-ID Gm02; pos 44928278 to 44929215)
ttttgtttctgctccgggtcgcagaattcttgctggtttgcttttcttattccaactttgtttttgtggcatctgtttggttttgaatatgcttattagcaaagccttgaattgttcttttgctgttgttgctttaaaataaaacagagaaatgcaaaaggttctgatgaatattatgtagttagtttttggttttaccctaggtaggacccggcaggcatgtttaaagtttataattttggctgaatgtttggaactgtttaatttgcatggtgataatatggattatacactgattttgtgttgctttgaaagtaagagactaaggtcaattgaatgtttggtttttgtgtttgatcttgattccatgtgtatggaaaaatattattaggaggagtgtcgatcttaaacattggtggtttgataatatattagtcgctaacaatgtagatcatatggactatgactttagaagaagaataaccaaaccttatatatgcagcttaatgatattccggttaaagttgaagaacttaagtgttgacctaccacaagctaatgcctaaatctgtgtttagctttgtttttgaaatttttctatgcaatctctagcatatcgctcccagtcttatgtgtctctagtgtttcctgatggatactctatacaatcacaaatgctgaaatgcacttctttactagttactaataattgtttttgttgacttttgtagctcctatggatagttattttcgttctctatatagccttatattctggaactttgatataaattgtcgcaatgaaagtgatgaagagtttctgtggatacgatggtgttcttgctgatcattttctaaccttgttttgattttcattgcatgttgtctgtcatttatgtcttattaaagctaatttccttgcatagttggagacctac

SEQ ID NO: 21509 - DNA, 485 bp, Glycine max
  Intron number 2 from transcript Glyma03g24450.1 (locus Gly ma03g24450) derived from phytozome v7.0 (chr-ID Gm03; pos 31255530 to 31256014)
attgagtttgaacaagttgatcgagaaagcaattggtttgtgtgcttactatctttatcatttattctattatttttcataattacacacacacccacccccccccccccccccacacacacacacacatatccacaagggttttaaaaatgattcctaatcatgattttattcggaatggcatgtgcatttttaaattgtagtttataaaagtattttaatagttggtctcaaacattgggaagaaaataaacatgatatcaaacactctcaaagtttttgattttgagatcactgtgatgtgattgtaattaaaactgcatcgactgcaattatatgcaatttctcgcaatataaagtattgcaatgaaaattacaactgcaacctaatttaaaatcggaatcttctatatgtaatgaacctattatttctcttgattttctttcgatcttaattattatgtaaatgaaactcttttgcaggg

SEQ ID NO: 21510 - DNA, 1026 bp, Glycine max
  Intron number 1 from transcript Glyma02g36310.1 (locus Gly ma02g36310) derived from phytozome v7.0 (chr-ID Gm02; pos 41727717 to 41728742)
aactcaaccaaaacgacaccaaagaagttctagcagtaagctctttcgtagtaatattttttaatgttttcacttttcacacctatatcaaccaaaacgacaccaaagaagttctagcagtaagctctttcgtaataattttttttaatgttttcacttttcacacctatatcagtatgcaccggtgagagacgagtaaaaccaaaaaagagaagataatgaacgtaataaatgtgattggtagataattgattgttaatatgatgaaaaaaaaaataaaggaacatcggtaagtgtgcaaaaattagaatttatttattgcctataattacttttccaggagataattgtgctgactttctaacacgttttggttggttgaaatttaaccttatgtgaaaactaattaagttctatgctatgtgatattatgtttcttacaattaggtataaataaagattctcatttatttttatatatgggattagaagtaatacttgtttaaccttaaatttgtcatcacatcttggattatgttctccatgtgagttagaaggatatatatatatatatatatatatatatatatatatatatatatatatatatatatatatatatatatatatgtttcttttcctcttttttttaagtgatatatgtcttcttaacatatggtcctgtcatattagtgctgtgttagaatgttagtgaaagatatttgaatttataattatcaaatcaattttatataatttctgtcagttctgtgtcttaatgaaattaaaaaaaaaaaagaaatatttcaccatgaaacaaagaatgcaagaactaaaaaaataatttttcaagaatttcaaatcagcagtactggtcatgttttgatggggaaaaggtgaatttaaccaattgtagaaaactatttatgtgagtgggtgaaaaacttgaagttgcagtaagtaaccgatggatcatgtgaatatatttcaggggtgcaagtggagtgggattaaactgtgtggggc

SEQ ID NO: 21511 - DNA, 599 bp, Glycine max
  Intron number 3 from transcript Glyma02g28840.1 (locus Gly ma02g28840) derived from phytozome v7.0 (chr-ID Gm02; pos 30053992 to 30054590)
tataagtggaagccaaaggggtgcagcctcccaaggtatacgagaacttggtgaatttatgttgttctagaacatgatggtattgttctctaatcagaattgacttttatcacagcaatataagttgacatttaatgcaaatctttattgtgcagattgctgaggtgaaacactagttttgattaagaaactgcaactgagttttgtccaattttgatttggttgaattgaaattggaatttcacctcaatcatatgcatagtgaagttggccatttaatatcaatattagtttcctagttataacttcaattacgattagataacaatacaaaaaacacctatagaattgcacttgagttttatccttcaatttttaaggttttacatttcatgagtgctcttgttctgtccagatttggcaattggtaatattttgtttttcatattaatgttggtgtcttgttatgatgatcttcaaagttgctttgtgaatgtttctttggtattttgccttaattgatccattctctttgtttctttggatcctagtttgttgatttgctataatatttgttcatgtatttgctaataggttgg

SEQ ID NO: 21512 - DNA, 754 bp, Glycine max
  Intron number 4 from transcript Glyma01g44090.1 (locus Gly ma01g44090) derived from phytozome v7.0 (chr-ID Gm01; pos 54882578 to 54883331 reverse strand)
aaagcctgcagaccaaatccggggcacgcatccaggtagttgttatcgtttaccttgaacctttttatttttatactaaacatgtgtggtttaggcaggatctaaattggaaaaggattaagctgctaatattggtctttatattgaagcttaaaaatttaataataatgacaatatttgattctctgtgatgctaaaattagaatataataatgaagggattcctggtttcctttgcatccggaaatcattcttatttttgaaatttaagtttgttctgctgaagtgttgctcacacttgtttcttgtgcattgagtttcttttgagcttagaggcttaaacttattttattgcttgatgtctgttgtaattgctttgtgtgtttagcttgacactgacttttgaatcctgattatgtatgtatttaatttttgatatttttctttattttttagaatttatgtacatgtataatgaattatatcaaccatcttgctagcctagcagttttgggtgtggctgctttgttttactatatggaattgataactcccctttaataatttaataatctcttctatttaatcttaattaaaacattacagaagcgtttggcacttgagagagagagttgattgatgagattcttgtatattttctcctttcattctcctcttttgaatttagcttgtgtattttgacgatgttcttttttcatgttttagttgatacctcaacatcttccagaagggg

SEQ ID NO: 21513 - DNA, 1051 bp, Glycine max
  Intron number 1 from transcript Glyma01g06870.4 (locus Gly ma01g06870) derived from phytozome v7.0 (chr-ID Gm01; pos 7344523 to 7345573)
aaagaataccataagataaaaattgaaaagaaagggtgggtaattgggctccacttttttccttttttctttattgttttcttaaatgatttatgcttgcacactcttgaattttttttgggcattaataagattctaaccacttgcagctttatggttcgaattattgcatgctcatttttacattcgaatgtgaatgacagggtttttgctttctatgtatgatgcttattcaattcagtgttatgaaatactacggagtagcacttgcattaattagcattttgtgctcgtaattatcatgcattcaatataagttgcatatgacataatgcttattcccctaaatattgattgcgtgttttcattttaaggcttgtggtccatattttatgtccattattttctaattaaaagaaaattaatgttcatttaggactcagttttacgtaccagagtcttatgttatgggatggtatacaatggagaactatttttgtgtgttttggcctcaatgcaatgtggatctcattgttttggcctttgcacataaaatgattttaatgatgattagaaaaatctaaattggaattaatataacgaggcttttagtggaatttccatcaatctccagcctctgctcattttttatttagagactattaatgttgaaacttgaattaacgtgtatatcgaaattgtcttaacttggttcctcatgtgattcggattaatccgtctgtgtctctatgaaacccaacagaagataaaggaatacaatcttataactagttttactttttaaaacatatgcttcaaaacatttacatataaaatgtgtatatattgttgatatttctctatacaaataatattgtgtatgattgataatgggatgggtagcgatataaaatctgcttctgatttaggttaattatgacatcctttttcttgttattttgatgatttctgtatgctgcttttttctgataaattgtaggtgaaatattttgtaggagtaaaggtaaaaacaaggggcaaaagcgaatac

SEQ ID NO: 21514 - DNA, 856 bp, Glycine max
  Intron number 1 from transcript Glyma02g43180.1 (locus Gly ma02g43180) derived from phytozome v7.0 (chr-ID Gm02; pos 48019337 to 48020192 reverse strand)
attttgttcaggtttgtatattttaaataattatttgtcccatgtttaattcaatttctcttgtttgcacgttaattagagtcatatgcttaaaccatgagtgcataaattaatttgtaattagagtcatatacttattagatttcgaatttctccctttttttctatataaaaaaaaaaaactattcgtcggggaagagtttatctttagggttggaaattggaatgatccaaatccgttataatattgccatcaattaactgtagatgtattttatttattttttcttccaatttattggcattttcagtttacgtctcttgaaataatatattcataacgagacattgacaaacaatcattattcttattaatattatcttatagaaagtatattgttcataaagaaatattcaaaacaaggcaatttaaattttctttcgtctgcattcccttataaattaagtacaaattctacgaagcttcacaaaaatgaaaccactttgatttcctaacttcttctcttgaaagcaaactacatattaaagaatgcatgcatttttttcatacatactataggcatatctttatacaactcatttaaccacattgcatatgtcactcaagcattgtgtttatgaaaaaaaatctgaatttgattctgatataatatatttttttaaaagagttgatgatgtttaaaattaaacatcaaattaagaattagtctcataattaatcttaaggatcaaagttaatgagaatatcttcaagttccacccaaaatcaaagattttaattacaatggttaaaaaataatttattttaattaatgttggatattgcagacacttt

SEQ ID NO: 21515 - DNA, 625 bp, Glycine max
  Intron number 3 from transcript Glyma04g38360.1 (locus Gly ma04g38360) derived from phytozome v7.0 (chr-ID Gm04; pos 44751882 to 44752506)
aggtatgcaatgtagttatacatatatgcttctttatctcctattattttgcagcatgttttgtcgtttcgtttctaacttaggtgctacaatcagatgtaacacctatatggacttggaatggtgaaacttaagcttcttgtctatgttatcgtgtagtgatttcaataatttattggcataaatagcgtgttttggaagatgaattgttttttcgacacaagaaactgaagacagaggacgggcaacaaatttgggtggcattctatttgattcccgccttctttttttagtctccatcaccttttgagaagccattctggaaaatttattatcttcgttttttttagctaattatgcgaacaaaaactgctttaaaatataaataaaatgcattaaatccgtagcatttcagaattcagaattgtcatttggtctttctgaatgatatttccctctcaattgagttcaagtgttgcatgtggttcactatcttaaattcaccccccaccaagaacattatcttttttctttctttttggggcagttaagccccccagaacatcaatataataatatgattgtgactattcatctgtggccaggtttctcggtcactcgctgc

SEQ ID NO: 21516 - DNA, 1056 bp, Glycine max
  Intron number 1 from transcript Glyma04g41600.1 (locus Gly ma04g41600) derived from phytozome v7.0 (chr-ID Gm04; pos 47454637 to 47455692)
cgccttcactctccgacattcacatcattcatcaggcaagcaacgcccttctctttcccatttcttcttccttccactgttctctccactttatgttttctattcgttattttcggtttctgaaccctagcgtttcactttcacgtggctttcttattttcatcgctgcacgatagtgttatgtcgtattctgggctgctgcatgttcttttttttttttttttttcttttgttctgtgtaacacacgtttagaactttctagcgaaactggctattcttcgttatttattatttaatttgatttgattatttgatttggtactgtattatggaaaagaaaacctggaaatggaaggaaatataatttatggattatgatttgtttccttatttagagcgtataatcagaggtagccaggcttaaatacgggaaggataaatttatttaggtatcatattttgtcagagatagatttgattgtctcgtctattttgtacagtgattgtttgatgctgcaaatactatattttattgctgtttttttgaaactgatatcaagctgcaaactgttctgattgttgcgtatacataattattttgtgtaatttattatcacgttatgcccaaagtggaattttaattttgtttttttctctcctttttttcgatggcttattttcttaatcaatatctccctttatttgattgacgatatgttccgttccgttcggtactttactctgtcagtgtccgaaaggccaaacttaatttatatattcaaataaaattttattccaagaccaaataaaataggaaaggcaattttttccaggtttggtcttggggggggggggggagggggtgcttttaaattgagattcttcttacttggccattgtttttccactttactctgctatttagtctggttttgtaagtgctgctattttttatttttatttgttttatgaaatatggtgggatagttttttgtttgtgaccactcatgtgcttattttacagagactggagcctgcgaagaaaagaataattt

SEQ ID NO: 21517 - DNA, 743 bp, Glycine max
  Intron number 1 from transcript Glyma01g01300.1 (locus Gly ma01g01300) derived from phytozome v7.0 (chr-ID Gm01; pos 939084 to 939826 reverse strand)
cagtcacaaagcttggtggccccgatagtatgtataatattttctttcatctcctttcatcctatcctataagttggtattaattaattagttggtatagttgtttttttttagtgtataatgacgacaaagaaatttgaatctaaaactttgtgtaaattatccaaaccttcactaggccaaccttagtaggttgtatttgttggtgttgttgatacacaagagctaacttggaggataagtttttgttggaactgatgttgaaagaagggaagaaaaggttaaataatggggtgttttcagaatctatatttacttgctgcaccaaatgaagaaattggtctttcacaaaattatgtattatctagcaaactggtattcgtgtaatatgcattctgatgtagcccgacatttctgcatatgatgaattaaagtagtatttggtattttccctcatttgtacattccttttccttacaaatctttgatccattagaagaatgaaagggtgcaatggaaatatccaatcactttccttcatgtttttgctctaggggttttgcttccacagctaatatactctgcggctaatccaatattgttttactaataagcttgtcataaaaaagattctaatcttctggcttaatgcttgtggaggttttcgcttgtcagaaaacgacattaatctgaaatggtttgttttgtgttcagaggcgactcccaagtctgttctgaggtta

SEQ ID NO: 21518 - DNA, 1031 bp, Glycine max
  Intron number 1 from transcript Glyma02g38870.1 (locus Gly ma02g38870) derived from phytozome v7.0 (chr-ID Gm02; pos 44223373 to 44224403 reverse strand)
cgatcttgtcctctctctgtctttcttgccatgtaattttcttgccttctgctcatctctcttctccctcctccctgctgtatctttcgtacaaatactacatgtcttcttttttgtttttttaatattaaaaaaagtgttttttttcccttctttttgaaagttcatgtttttctgggggtgaagacttttctgggaggttcagataaggaaaagttgagaattttgataaaggggtaattggatttgattagatttgttgttgttttatctgcttcatcttttgttctcttctgtgggtttatgtgatgatgtgtttggagatgtttctgactttcttgtttgttgagagttgatctgtttttctcaattaattcgtattaaatttgagttaaatttttgtttagtgaattttctactacgattcttttatgatggaaatgcattttttttaaaacagaaaatagatgtctggttggttcctttgcctgaaaaatgataattcagttgtttaattttttttactcttattttccaaatctaaactcgtattttccttgtgaaattcttctcaaagtattgtcatgaactaatgatgtcataattatttataatttaatttaaacttatcttttatcattcttctttagatagaatagtgtgctgttttgtgtagtttcttcttgctgtgacatagttttgtgagtttggttgtcaaacaatttgtttaactttttttacttttttttcttcttctttcagttggctctctaatctacactgtttgatcttggctgcatgttttcaattcatactgtttcattccatgtcgataaattactagtcatgggctcatggcatgacatctatacattgttcatagtttgcattagaattcccttttcatttctcttttatctggtcttcaatcttcatattactaagtaggtataaattcttatcaaaatgcttacttttatcatctctttgcctcagctgagtttgctgaactgaattgaattgtagcttcc

SEQ ID NO: 21519 - DNA, 930 bp, Glycine max
  Intron number 2 from transcript Glyma02g15540.1 (locus Gly ma02g15540) derived from phytozome v7.0 (chr-ID Gm02; pos 14031705 to 14032634 reverse strand)
ccactaccaaggtatggttcatgaatatgatccatgtggaagtgatttaccgattttgcttttgattgaaatgaatcatgacggtttagacctaaacgaatctggttgccaaattagtatataattatgctgcgaaccgttactaaattaatcttctagtgttgattaaaagcattttgaaaggaattgtagtgtctactgaggctatatgaaaatgtaaggatctgtgtggtttgagaaaaaaaaatgttttctgttttcattcccggttatattagtttacaaaaaagatcaccttttatttactatattttctctttttaaataattttataggaactggcgaaaacaaagaaaaaaaatgttattttttaaccactgtttcatgtgcaaatgtttgaaaataagaaacaaagtgataacaatataacctttttttgttgttgtaattattagtaattagggggaaatgaaaacaataaacattttttttttcgtttggtttggtgtttgttttcatttgcagttgatatgttttaacaaattattacggagttgttatattgtttttacattattgcttattttcaagatttttccaaaggaattgtgaaaacaacaaaatgttggtttcgtcatttccttgataatgtctgagaaacatgaaacaaaccaattgctacctaggcaatgttatcttaatatttgtctaagttgcctgatattggagttttaagttgtaaaaaactaggatgcttcatgagtgtgtgtttgctgcaactgcatttgtttttctttatgacatttcaacattccaccacatatcccctctcaccaacacacacacagaaaagatgataggaaggcaacatcattaattctttttaacttttagattacgtactctggagctttgctggaagtctgcat

SEQ ID NO: 21520 - DNA, 590 bp, Glycine max
  Intron number 2 from transcript Glyma02g33910.1 (locus Gly ma02g33910) derived from phytozome v7.0 (chr-ID Gm02; pos 37846694 to 37847283 reverse strand)
cattttcttcttttagttctttaactaataaccaagtatactaattagcaagtcccttatgattatgatatctatgtattaatatttttctattatgatcttctttttcaaatgcaaactatttgacaaatggtcatttagactctgccatagattagattcctagcttgaagaacatcactctaagggaccttgctggcatctatcgtaccatagatccaaatgatatacttttggttcgtcctttttgaatttgaaaaaactggtgaatgaattgttgtttgtcaagacttaggctacaagaaaataagttgacattggttagctaattttgacttccaagcttgtaagaaggctataactgatgattgtaatatcgttgctagaacttataacaatttcacctccatgtgtcaagaagaggctacccttgctgaatgctacaaataactcttcttcaaagggatagaaagcacttcttaaatttcctaacagtgttgagtccttttgttttggggtaaaatgaaaaatttgttaatgattttgttttttacttttttcaagcaaaacaaaacatgtagagcaaatta

SEQ ID NO: 21521 - DNA, 715 bp, Glycine max
  Intron number 2 from transcript Glyma01g33620.1 (locus Gly ma01g33620) derived from phytozome v7.0 (chr-ID Gm01; pos 45804557 to 45805271)
ggttttgctcaaccttgtttaactgtcaatttcaagtaagtcagcagcagtttatgcttatgatattccattctcgagagaatctaggacatataatgagatgactttagatatatgttgcatagttggagtttctgtaccaattaccaaataaatgctgacatggagctcagatgcatagttataaattataatacaggattatattataaagctgtctttgttgttagacagttctactctagtgttttttgggttagactttccaattctttgattgggtgtgattaattgaaagtaataagaaaggatctttttaaggtctttaacagatgatgagaagaggttttttttttttttttttttttctgatatggtgcagttatcttcataagatcgatgaaatgcgttgcattacaaaaatcttaatagatttaatttgatgagaaaattataaagtaacatctgtattcttccaaagattgtattctaaaagggtaggtaaatgttgctttatcataaaaaaagctgatatttttcagctattttgagatataaatatgaaacatgtacatgtctggacgcaaatgcattctgtttgaaacacttcaaacactcgggggtaaatatcacaagttaattatataaagagaatcattttttattgttaaactttttcttaggatattaagtctttttgttcctcttcaggagg

SEQ ID NO: 21522 - DNA, 828 bp, Glycine max
  Intron number 1 from transcript Glyma01g44280.1 (locus Gly ma01g44280) derived from phytozome v7.0 (chr-ID Gm01; pos 54986149 to 54986976 reverse strand)
accaaatacagatctgaaacaaacaaacaaaagaggtaagcttcatctttcatcttttgctttgcaccaccacccttttctgtcacctgcttttctactccaaggcttcaactttactagaccagttttcctgcatatctgatgatctgacgttaaaagggtaggaaagcagtgaaaaatgagaattgggcatctttttttttttttttaagaaaaaaaatgtgatttttaagatttatgatggtttatgggttcattaaagcagggaagtcaaaggggtttatcaacttcagctgacttgttaatgtcgttcttgctggttaggggcatcggtgtcaaaggggttgcttttgttgctgagatattgtgagagtgaaaaaaagagagaatatttttgggatcttctacttctagtaggggtttatggaataaaatgttcatgggttgagtgtctgcatctctgtgcagattccactgaatctctggtccattgtcttttcaacttcttttttttttggggtggcaaccacgccccgtgaaattatgtagacatttttcgggatttcttttatttatttttctctgatgtttgtgtggacctgttgaaattatgtatacattcttcaaggttttactgagatccatccagggcttactgtcgaataatccagccagcgctatagattcagattcatctttgatatttggtttcagtctttaacttttatgttatagatttgtttctagtggattgaaatgactatagttttttatgacttactaaatttctgattttcaggatattataatcagccttagtcgtcaaat

SEQ ID NO: 21523 - DNA, 480 bp, Glycine max
  Intron number 1 from transcript Glyma04g43070.1 (locus Gly ma04g43070) derived from phytozome v7.0 (chr-ID Gm04; pos 48703541 to 48704020 reverse strand)
ggcgtcaagcacggtgttggctgttaccattttaggtatctttcttgtttttaatgcactcgattcttgcgtcattgtgtcattcaatctctctctctgccctgctcaatggctttctttatagatcccattttttgtttttgcttctgttttgtgaaattagggtctccgcagttagggcggtttttccaacagttgtgccaagttgaaacttgttttctttctcttctgtattcattgacttgtttcaaatttagatggcttggcttgtcatataaacgattcactgatctttctagtactgatttatgtcgctttttcaaagatattacctgatttggtctactaatggtagaattggcaagttttaatttttttttcttttgagttagcatttattatttcagtagacaataaattgaggttttggatgtggcttttcaaaagtctaatttttgaagtaattgttgtgctgcagaa

SEQ ID NO: 21524 - DNA, 678 bp, Glycine max
  Intron number 1 from transcript Glyma01g42780.1 (locus Gly ma01g42780) derived from phytozome v7.0 (chr-ID Gm01; pos 53959166 to 53959843 reverse strand)
cataagggcgcttcttcctcatcgctggcaaagtacgtatttgattatccattaatataatagttgttgctgcttcgtgaattatcctgctgacaagaattgtgttcttcttaccctcgttccactttttggaaaattcggacaatctaccttcgaatgccaatattatcaccaatccatattcatatgatttcttgtgtgtgtatgaatatatattacagctgaatatttcacatttcatataattaggatggtttttgacgtacgatgatgaaacttgagcttcagagacattgattaaactgaaaattttctatcaaagtaggagctatgatatgatcgatcatgtctgggagaatgaaaaggcatttcattatgtgcatgcatgccccctaaaacaaatctaggatgataccaatttaaaactttctatgtttcttaatgtctcatatgaaggttacgtgttttatgtgtcctcttaaaaatgggaattggaacacaagttgggaatcagaactacatacaaattctaaattctcaccttaactcaaaacaacataattttttgcatgttgtgacctgtgacaaagaatgaataaaattcttgaattgtaatggaaaaagtgtggaacaacaaatgattgaatcatttgatgacaaacactatggggcaggcaa

SEQ ID NO: 21525 - DNA, 396 bp, Glycine max
  Intron number 1 from transcript Glyma01g05890.1 (locus Gly ma01g05890) derived from phytozome v7.0 (chr-ID Gm01; pos 5669726 to 5670121 reverse strand)
tgccacagtcaagagtatcatctttcatcacagtagtaagtgaaacaaaaaataataataataaagctttttaataactagctataatatgtggttaaaattttgattggattcacttttttcatgagtgcttataggaaaaaaaatagaacacattaaatttcttctatcggtatgtacttcagcttccatagacactctcgtagcttttccaatagctgatacataaatcgattctggatttgagaaaaaaattcaattcattttacattcctattttcttctatgaatatttataaaaaacattatctgaatagtgcttaactagtttttttcaatcaccaattcagtattcaatcctgaattttgaccactcaactgctgcaggttacagga

SEQ ID NO: 21526 - DNA, 493 bp, Glycine max
  Intron number 3 from transcript Glyma04g01690.1 (locus Gly ma04g01690) derived from phytozome v7.0 (chr-ID Gm04; pos 1132415 to 1132907 reverse strand)
cttcacagattgtgcgcatcactacttcactaaaggtgctcaaaatatctttcattttctgtctttcgtatatttagtgtaatttcttcatttattcttgaatttttttctgtgtgagttttgatcctacttgtctccaaaacattgtaatttacctcactaaactgttaattacaaagacacaggtactgtaggtggtaactgacaacctaacttctggaagaaacacttcataaactctagtttggaaattttgactgaataataataaatgcattttgagcttgaaccgattccttcttctgaaaattagaggtttaaatttgaaagaaaaacttttgttaaagccacttaccaaataataatttttcttagcatgccatatcctatctcctctcaactttcattttctaatatgattctctttcttattttattcgtttttatgtcacactttgtgtccattttttgcaggtacagaatacgggatctg

SEQ ID NO: 21527 - DNA, 514 bp, Glycine max
  Intron number 3 from transcript Glyma02g35780.1 (locus Gly ma02g35780) derived from phytozome v7.0 (chr-ID Gm02; pos 41064580 to 41065093 reverse strand)
ctacccgttggacttcacctttgtctgccccacaggttagtggacattttagctgagtaaacaaggttgagacatacgtgcaatttgtttgtttggtttaacttattacagaaaaatgagggtttgtttggtttaacttattacagaaaaatgagggtttgattggtttaacactttaacttattttagaaaaataaggtttggtttaaaaaattgtttgctgattatattttctgtttttatttttagtcacaaaattgccatcttgctttgactatgttttgtgatttcaatttttctatttttttatacatgttttttaaaacaagaaacaatagaaaacattttttgaaaccaaatgacccctaattatttatttttgttaatttattaagagagtcttttatgaaaaaaaatatgttatttccctggagaagacatcaccaaaccttttaactccctaacaataacatctgctacttgcccacagaaatcactgctttcagtgaccgac

SEQ ID NO: 21528 - DNA, 470 bp, Glycine max
  Intron number 1 from transcript Glyma03g27600.1 (locus Gly ma03g27600) derived from phytozome v7.0 (chr-ID Gm03; pos 35337667 to 35338136)
gactctcaatatcatatcttctacttgaagcaaaggtgagttgaattactctctctctctctctctctccatccatcttcgttttcacacaaaatattagatttttgttcaatgggtatgccgtgttcgatttgaaatccaggatattaacatttttatgaacaaattgtcagaaattgaagcatttcctaagaaaaagaatgttttttgttttgttttgataagcataagaaaaaaaaatgttacttgagttttgcttaatcatttccttttcttgctggtgtgagttccagagaatgcgagcttagtgcctagagctttgtaactttgatactttcaaagtttcaatatattgtggattagtctgatctttcatcagcgctgataattgcactttttttgttatcaagtctctatttttggccagaaattaagtgttttttgctctgtcagtttccttcttggaagat

SEQ ID NO: 21529 - DNA, 335 bp, Glycine max
  Intron number 2 from transcript Glyma03g32220.1 (locus Gly ma03g32220) derived from phytozome v7.0 (chr-ID Gm03; pos 40019242 to 40019576)
gagacttctatagtttcagtcaatcacacccacatgtcagatttttaactaacactctgatactatcaatgtctcggtcaatttttaactatcatgcacgtgccatgtgtcacttaaaatttgacatgtgcgtgtcaattaaagattgacctgagactatagaaacctagcaactcaagatcatctaattatttctaaaggtttatcttctttgatttgatagtttgtaattgtatttgataattgataatagtataaatattaagttgtttattttttttctttgaatatgaaaatcaggctgctagaagtggtgtcgttggtgagttgggttc

SEQ ID NO: 21530 - DNA, 531 bp, Glycine max
  Intron number 4 from transcript Glyma03g32220.1 (locus Gly ma03g32220) derived from phytozome v7.0 (chr-ID Gm03; pos 40019692 to 40020222)
aaattctctggaactggaccagggaaaagagttgggtagccctgagggtagtgtttgtgctcatcaaactttttttgcttctataatttcttcttaagggtaaggttcttcactagttttagtaagattaattcaaaacatggttgagttcaaattgcagaggactattttttttttttttttttatctttcatagtaggcattgctgtatatgtattttttttttatcaagctatcttccacatttgatgatatgataaattgggaaatacggatacacatgcttttggtaaaaggaaggagcccatgattgcgtagttacttgaaaaactttctatgtttgtttttgtttacttgacaaatatagatagagtgatagacccgctgagatatgttcaaaagtttgactaatgacttgaatatatgaaaggactgataaagaataaactgaaccaatgccaaaaaaaactgaacctattaaatactagtcaaacaggttttgattttttatttatttttatttaaccaagg

SEQ ID NO: 21531 - DNA, 944 bp, Glycine max
  Intron number 1 from transcript Glyma02g02740.1 (locus Gly ma02g02740) derived from phytozome v7.0 (chr-ID Gm02; pos 2091026 to 2091969 reverse strand)
aattcgggtaattaactaatccatgctgttctaattagttcattgcatgtagaggtttatgttttttgttgtaaaattaaggtgcagaattctgtggacaaaatttagatactgattcttaggtaggttggtgcctttttccaatcagaattgaaatttcagaggtagtttatgttgattatatatatatatatatatattattgacaaatgttaatatgttagtttttttttggtaaaaatgtcagatgggacccgatctctccttcctcccttctaactttatccttgcctaccattgagagatacatacaactagtgtcattaattaacatcgcaagtctgtgttgacttcaaggctatgtaccaaaacaaaatgaaaatttgctgctagtatggaattattaaagaaaatatgattttttttgtaccttaaatctaggatagtttacatgggaattgggttgaccccttggccatgccttgggtgtctgtcattttgtttggtagtcattatcatgttttggtaggttttttcttttggcttaacgcttactttgcttgatcatgcacttttgtgcagtcacgcatacctaaacatatatctgtattctgtgcccacaagtgaagaaaggaaggtgaaatttaattgttttggggatttgcgtttgcccccttgatgtcatgtgttactagtatgaaaaatatgtttcattggtttgtgtgaatatcaggcttgtgttatgtaaaatatgtttctttggtgtatgcttatttcctgttgaacttggctatttggatcaaatttgtatcaacaacataaaatttggagcatatatatttttcatttttgcctcctcatttcaagttcactaggagccctcttttttctttttttttgttttggcagagagttaaggtctgtagaagaaatcttgaagatag

SEQ ID NO: 21532 - DNA, 776 bp, Glycine max
  Intron number 4 from transcript Glyma01g22490.1 (locus Gly ma01g22490) derived from phytozome v7.0 (chr-ID Gm01; pos 28189502 to 28190277)
atagagtgtctctggccaacaaaccctcttcaaaggtattattttgtattctatttggatgctcctgaagaaatatttgaaaacttccgcttgttcttttggacttactgattcttgtttgcattttttatgaactacttcacatgaacacaagttaattttcaataatgaagcacagacacttctcccacttgaggtgtcacggaggtgtgacatgtttctgacactgacactcatatggcacatatcccctagtgtctttttaaaaattgtttttgctgaaattgtttagctgacaccagtgtaggctaggctagacaattaaaggacactggtaatataaaaagacattccatttttttatcatccataacagtcagattgagacatgatataatacaaagtatcaaaaactaatgtctcattgtcaatttaattcttttgtctgttgatatttaatttcttttgtcaagtggtgtgctataatatgaacattaatcatattgaagtgcccttgtccacgtcatgtctagtgtctgtctatgttagtgttatttttgtttataaaagttggatatctgtattgttttcacttttgattgctttgagtctcatggttttaggaaacaaattgagggacccgcatgttgatatggcatatgtgcttctgagatttcactgtgttagacagtttgactcgtataattatgactcatggttctttttggttctcactggaaggaaggtgacttagtcttgaagaaggcaactgaata

SEQ ID NO: 21533 - DNA, 404 bp, Glycine max
  Intron number 1 from transcript Glyma02g06200.1 (locus Gly ma02g06200) derived from phytozome v7.0 (chr-ID Gm02; pos 4948224 to 4948627 reverse strand)
tgctatactgctccgaaactagtaaactttacctggtgtgtagtttttttattatttcagctagataaagctatatagcgttttataatctgcataaataatatcttaaacaactaaggaatggggacaccatttcttctttgggaaagttcaaaatttttcaaacaaattatcttatgttgtactatcatatcagagacttaagcaaagttttggagaaataagtttatgatgcgtaaaaaaatattgagcaactgacgttacatataatatcatcattgatgatcaaaaaaataaaaataatatcatcattgattatatttgtagcatgctgcatgctaattcagctggttctaatatcactttcaggcaataacaggggattccatactctcaaaattcca

SEQ ID NO: 21534 - DNA, 770 bp, Glycine max
  Intron number 1 from transcript Glyma02g01100.1 (locus Gly ma02g01100) derived from phytozome v7.0 (chr-ID Gm02; pos 828368 to 829137 reverse strand)
gtgtctccctacacaggtttcttcatttccattgttattttcttgattttcccatgtatactcatagttggtagcatttcaacttgtcaactgcgttcgtgcttgtgtgcgtgttttctaaccatatgatatggtgtgaaactttgacctttaagaagtgcagcatttttctttctctgcactttcaccgtcatcacaatcacattcccgatttcctggttataagagagtgatcacgatgagccattctctctctctctctctctctctctctctctctctctctctctcttttattaaaataaaataagtgtggtaggtgacagaatccatcaacttttccattgtttttcctgtcttagaatcttagaagaatgggagtttagtactaactcaattctgaaaattaattcgattgtctcacacttatataatctatcttggatttatctctagctgatgtgagacttggatttttgacttggattttttccaatatcctgcaacttgattttctttcaaactactctcaccgattcttcctttagcacgaatttagtttcattccgaacaaggaaaaaaaaaataaagctaggaaatctgtgtagtgtgttgttcagctttgttccaacctttcactgattccatagtctgcgtttgttaattgcaagttattttgtttgtgatgctttgaggtgttaatattttccgagttgttatatttatttttgaaattttgaatagttggaagtagaaggcagtgatctgac

SEQ ID NO: 21535 - DNA, 822 bp, Glycine max
  Intron number 1 from transcript Glyma04g35810.1 (locus Gly ma04g35810) derived from phytozome v7.0 (chr-ID Gm04; pos 42291374 to 42292195)
acgaggagtgaagggagagaaaagagcgtgttcatgtgacatattgaataaaaaataactgaattgtaactgagctattagaacataatctaaacttaaactatttttcaaaatcaatttataaaactgaattatttcagattcccatccagaaaattaaattatttttccttcgaaacatgttctctatactccacttcttttgttttggttttggttttaattttgtgtatctataaaatatgtttttaatctttacattttctatgaattttatttagttttcaaactttcataacatataatttaatttctgaactttataaaaaaaatatctttttagtctatccttagttcttatcaccaaaagttaaaaaattacgtaaattagaaagtaagcccatgaattatctagaaagcacatgaccaaagttatcagactcgtgattttacgtagaatcatggaggttccataaacttgactcgtagaatcaaatcgtaaactcgtaagaatttactcaaataaaaaaatatattaatattcctttatataaaattataagtaaatatttcaaccctaaataaaatgaaaataataaactttagcaataattcaataaactagcatagtccacaatccacactcaatctaacataaattcatacgatacaaaacttaagcaaacaaaactcaagttattaatgttcaattaaaatctctccgtgaaaattagaatcaagttattaatttgatgcacttgatttgatgcaaatttgtttctcaactaagcaaacaaaactcaatactctcactcacccttg

SEQ ID NO: 21536 - DNA, 815 bp, Glycine max
  Intron number 1 from transcript Glyma01g30320.1 (locus Gly ma01g30320) derived from phytozome v7.0 (chr-ID Gm01; pos 40984316 to 40985130 reverse strand)
gatcgcttcggccccgttcgcaaattcctcaccgagtaagtacccctattccccctaatcagcatttgaaaaattgatttttggttaaaattgattttcgcgcgaagcggtttatgtttggattttttttttaatttttaattttatcttgaaagcaagtttgctgtagaatttcagtgtgaacttttcaaagcgatgcaaaggctaccttttatcacttatacgaggtctagtgtgtttggattggattcagttttcccataatcaattccaattccaattccaccttgaaagccaaagcaacatatagttgcttccattttttcaaatttttagcatgttttttgtgccaggattgattctggtagctatccttccctttactcttcctcttccgctccaacgcttcggccccgtttgcaaattcgtcaatgaggacaccttttccccctttgggctcttcgttattctcagtgtgtgtttcgatgagtggttctacaattgattttgaatgaaattgattttcaagtgcagtaatttatatcttaaaagcaaacctgctataaaatttagtgtaaatttttcaaagcaacgtcaaaactactttttattacttatagtcaaactgagggtttgaggaaaagtcaattttatctggcaatgaccaaacatctatattttttgtaaaatcaattctcgttatttccaccatgaaaccaaattcactcccaaactttgaatatattgaattggtgcacggaattgaaatttgaggtggacctctttttattttaattttattttttggtttcagg

SEQ ID NO: 21537 - DNA, 628 bp, Glycine max
  Intron number 3 from transcript Glyma02g39130.1 (locus Gly ma02g39130) derived from phytozome v7.0 (chr-ID Gm02; pos 44395687 to 44396314)
tgtttgaacgccagctacgaccatccctaccttcagtaagcctaacttatttgttttttttttttttagtttgctcagtgtcaagaatcgagtttgttgtgtatgtttattttgctgtttgctttgttactatgatgtttatactttacttgtgatgtggtaatacacaccatatattagtttggctctttggtctatctaattaagttagtcagtattgtcaacttttaattacaacattgaaattattctaaagcaaccttgatttgccgagttttatctgttattctttttagttgtttctggcatttgtaggtatttataactatgttgctccttaacattctcacctcaatctacttttgcttcaagagagagtctagtatatccttttagtcttacccagctaaggatctgcgaattatgaactgaactagtgaactatacatgcttcaagttgcaacaattgataaaattctacagacattcttggcattaaggcatctatcattccataatgtttatgtttctatgtctcaggttatttatctcacatcctagtattttggcattctgattgtgatgatttttttttgtttttcttttctacgctagatcaagcccaaat

SEQ ID NO: 21538 - DNA, 761 bp, Glycine max
  Intron number 2 from transcript Glyma03g33260.1 (locus Gly ma03g33260) derived from phytozome v7.0 (chr-ID Gm03; pos 40899555 to 40900315)
gaaggtaattcccccttttcttatcattccatcgtcgagcatggtcttagttatttgctatgtgcaatcacagcattttctgaaagttgtaatttgcatgcaattcctaattgtttattcttttttgtatcttttccttgtatgttctattatatgtttattgaatgatttttatttgtacgagtcccgcctttctttttgagatccgacaggaaatttccgtaatcaatttgtattgttttatcgccatattacaaaattttgtgtggggaactaattgtcaggtctccttgattagtttttattttttgaattggcaagagagctagctaaattagtgacgagtagacatggggtgtccttcacgagtttcactgaagctcgggggataatatacaggtttttcccaagctttgttttgtgcttggatttattcgtcatgttatgtctgggaactgtaccccctaggcgtcatgtttttaacttgaataatcttattgaaggtttctggggttttggctaaacctggagaggtctgtggtgggaggtttgccatggtggaattggtggaaattcctgtcgagtgttgactttggcgattctttctgtaatgttattgcttgtttttatggaaatggcatcaatcacaaactggtgtttagttcgtctttgaggggcgaagtatcatacagttcaagtagttaagtaatgatggccttactgtttctggaaaccatttccgcagagttcggggtgtggat

SEQ ID NO: 21539 - DNA, 644 bp, Glycine max
  Intron number 1 from transcript Glyma02g40230.1 (locus Gly ma02g40230) derived from phytozome v7.0 (chr-ID Gm02; pos 45414894 to 45415537 reverse strand)
ggtgagcttagcttctatctttgctaacaaattttcttggttttttatatgagaatcgggttgtttacagaaactattatgggatggtgtggttaattcaaaagttcttaaaattcttgtgtagccaaaaaaatgtgactaagtatcttcaaagaaaattattgagtattaaaaactattacaaatatgaaacactgacaaattaagacttttattcaatattattgtgtcttcaatttcctacacatatattggtcttgactatcttagtaaatatctttaagggaaaaatttaagtaattttgatattgttttctaatttgaattggagttttacccgtataattcacataataaaggtttgcattacaagttagcataagttaccaatatcaaactttaattcaagttagagaaccgatgaggtttaaatcagttggttgaggagtttgcccgagttgttgtaaactttctggtagctaactattaagtacgattcctacggaaaaagaaacaaacaaatctagtttgagagtaacacaataaaacatttaaagaattgtatctaagttttgttctattttctaagtttgcatatggtaaaggtttactatacccttttgtttggtacatgcaggaggtgc

SEQ ID NO: 21540 - DNA, 193 bp, Glycine max
  Intron number 1 from transcript Glyma03g35780.1 (locus Gly ma03g35780) derived from phytozome v7.0 (chr-ID Gm03; pos 42886536 to 42886728)
ttccaaaaacacttcctccacccaccttaaagtgagtgatcaaaatcaccaccacctccttcttcttccaattttctttctttttgatcatatgattagacctttttgtttattatttatatttgcgtgccttatatatattttttttgttgttttgtttttcttgtgtggttgcagaaaacagaggacagcc

SEQ ID NO: 21541 - DNA, 741 bp, Glycine max
  Intron number 5 from transcript Glyma04g32630.1 (locus Gly ma04g32630) derived from phytozome v7.0 (chr-ID Gm04; pos 37583726 to 37584466 reverse strand)
ttgaagactgtatgatctctcctctctctctttatctttatattgccactatatttttgcaaggagttaacaacatttccctttgagctttatagataatcgacctttttaatcaagttttttttataataaatatcataaagaatcagtttgtagattgcttgcgagcaaggttcttgtcattagtttgtggagtataattcctcattttttaatatagcctattctaatttataagatgcaatgcttttaattatctttaggtcgtttagtgtatctactgtagtatctcccttttcatttaacactttataagatattaggaagattaataggagaatattacaagagaatataatgttactcttttgatttaacctatctagtgtaacttaatggatagttaattagatcatttgttacgtatcccttgttttataattggactgcttgcaaagatatactactcactattcgtaagaattattgttataccacgagttaattcattgaacatttaaataaattcaaatttaatctataagtgggaaaaaagtaattttaatgaacttgtaaagtgagttagggaagatattttggtcaatcagcgtataacatattaatcaattttgaatatgttgattgttgtaacaaaaataatttgttgattaattccataaacttttattctctttagctatttagttgttgaattaaattgtggcagcatattcgaagaaa

SEQ ID NO: 21542 - DNA, 919 bp, Glycine max
  Intron number 2 from transcript Glyma02g10380.1 (locus Gly ma02g10380) derived from phytozome v7.0 (chr-ID Gm02; pos 8281200 to 8282118 reverse strand)
atatcaaggttcatcatcatctacactagaaattctgttctgctttatttttcccctacttttttactgttttactttgtatgtgttatgatccatttttctttgtacgtctcgtgacaatagtagtaaatgttctttcatcagggtgatacaaatatagttttaggtccttcagttttcttttcagtcaaatttggtcatgctccctgtacttgtattttttataagttattttattattaattaatttcttcactcgccctagtgtcttatgtttcataaagagagatgaaaataacagattatcaaaaaaaatatgagaatcaaagttattggtctttacagtattggaacttaggtcaatttggactgaaaattgaaggacctgaaacacgttttaccctataatttttatcattttgattcttggtagtgtttatgcttactatattttgtttattttgttttttttttcaacttttgttcttatccgtgtcataattttgctcctaacttcaaaagtgtagcatgcttgaatctctgtattccgaaagtttgcgtctgtggagaggtgcagaaaatgtcacaacttgctactgtttgctacgtattcgattggtttctatatctttgttaatgttaaattttatgtcatttctgatggcaaccctgtcattcttctggtttatgaagtcaaagttgtcacatctcagttttttcccctccttgtctttggttgaggtacatcgggctacatacccaaatggcttgtgtcaaacatcaaatatacattgaaaaagggaaaacacaaattgtagtagccctatttcttttggtctgtcaaataatgcaaaaaattgaaaaattgtgtctgactttcacagctgctgttctcggaagagggtgaattgaaaagcta

SEQ ID NO: 21543 - DNA, 484 bp, Glycine max
  Intron number 1 from transcript Glyma01g22850.1 (locus Gly ma01g22850) derived from phytozome v7.0 (chr-ID Gm01; pos 29076619 to 29077102)
ttcttcagcaatccttgcgccccgttaccctcaaagtactcatcatcaatttctcatcacacacaaacatatttatttttttcttcacctttaatttcttcttttttcgtgtacttttttttttccattgtttcaatatttaaaataaactaaatcgaaaggcataggaacgacacttctatttgaacaataaagtaaataatatatactctattaatgtaaagattttttttttaccgttaattacaaattcaaatgtatataataacttttatactaaatatttatcttaaaaatcatatctatcataatttttaatttgcagtgtaaagtttttttatactaccagtagatattaaactcttagaataactcaatcaataggtaattaattaatcatgtgtacatgtattttagttagtcagataattaacgctattttagtttctctaacgttgtaatatttttgcatgctagtttgagg

SEQ ID NO: 21544 - DNA, 691 bp, Glycine max
  Intron number 1 from transcript Glyma01g04710.1 (locus Gly ma01g04710) derived from phytozome v7.0 (chr-ID Gm01; pos 4324156 to 4324846)
agaaggtactccttttggttttatgttattcttattcctactaactaatgtcacaaataatttatatgaagagtttaatttctaacaatggaaaaaaggtttacaatgtgaatcaattagaaatcattaatcacatgacttttatttaagataattattataaaaattaatatctttaatcaatattataaattatgttttattaaagcttgtaaacttaagtttagatgaatcttattttacaaattaagtttataaaagcgactctccttttacttaagtttcaaattaagtttcaaggcaaaattgtgacaaaactctttacaattaggctcaactgaaaaccaaacaagatactttttcaatttttcttgttgaagatacttttgagccttcgaactaaaaacgttataatcctcactaatcttcacccgtgacactacgttgttaattcttttaggtaaactataaaacttaaatgggttatgtagatattagttgggataatacacatgtaaatggtgtgataatcctgaactgcttaataacttttctggcctcgggttggtgcatgcatcatttgttcttttattatatacaattaataaagttatttatctaattattttttgtgtgtttttttctactgggagtagtggtttacgtccttgagaagtgttctagtggctga

SEQ ID NO: 21545 - DNA, 798 bp, Glycine max
  Intron number 2 from transcript Glyma03g40350.1 (locus Gly ma03g40350) derived from phytozome v7.0 (chr-ID Gm03; pos 46146251 to 46147048 reverse strand)
tttcaaggattctcccactctcctgtttttacctggtaaaaacttacgcttctgctgcaatccatgcatttaatgtcttgcagattttaattgctactctctctctctttctgtgaattgtatgtgtatgagacttttggggatgatggagttgtttttcttgtggagaaagttagcaactcattctttcagacacactcttcgttattagctaaaattcattagaaatcacaagactgtagaggtcatctcattgtttaatgaacctcacttttgattcataagtttttttgttttttgtttttttaatataaaactaaccaataagagaggataagtcagtaacttataaggagtgcgttgctacttgctagcaccttttcttttttatttcttttcttttcttcatgctattctttgagtggactgaatgattttcttttgatgttggttctacttctattcaactttgcggttgtggttgattgttttcaatcttagattaatctacaatttggttgaaagctgcaagttgcaacttgtgttacttggttccctcagaatgcaggtctatgtaaatttgaccgtaaaagtgtgaatgggtgtttaacttaaaaaaagtttcatcctaaaacaccgatttgtatagattaacacttttagttttaggtgacagtgtggcagaaattgctactttcaggcaccaacttgaaattgtgtactaactcaatgctattatattgaatgctaaaattaactatgcagtgttaaaatttctttagttttacttatgcaggg

SEQ ID NO: 21546 - DNA, 575 bp, Glycine max
  Intron number 2 from transcript Glyma04g05260.1 (locus Gly ma04g05260) derived from phytozome v7.0 (chr-ID Gm04; pos 4011346 to 4011920)
ggaattgattgctcgacgactgttaattttgtaaggtaacattcagtttttctggatctcttcttaatctcaatcgctcacaagacaatatgagtgtcgctttgaaaagatgagccttccgagaccagttgaattgaatcaatcgatgcctcgttttcacattgtcttagctatcctttcaaaaacattgaacctctttttccatgtatatattgaatctcaagataatatagtatactgtatatcttagccagaaaattttcatgatctccggttctccctctcgtaactgtcatcatccatttttgtcttgacccagatatagaagatgctcacagtgcacaattccctttctttttcttttttaattttcggaatccatgaaccgtccgatgcacacatcctgtaaccatagagccaatttcaatttgagtttgttggataaaaatgtatcaatatatttaattcttaatttcaattattgttgttctacctaagagttaacaattactccagtaaatttatcttttcgatgatgatgatgatggtggtggtggcaggcacgggttcaagag

SEQ ID NO: 21547 - DNA, 548 bp, Glycine max
  Intron number 1 from transcript Glyma02g41440.1 (locus Gly ma02g41440) derived from phytozome v7.0 (chr-ID Gm02; pos 46568666 to 46569213 reverse strand)
tgaaggctgttggcgttccattcctaaagctgctggttagttttttatttttattttttattaacaaacattagtcttaatttgttagttttttttttttttttttttaacgagaaacattcaaatttaccacgactttttcctctttctttctctattcaaccaccatgagttaattatattcattcttcatacagttctctcttagaagattacactaggtacacccaatcaattaactaggtagcaaaaacttataacttaactcatgagggtgtatcatattaaatagagagctgttatagtatccaaagagggttttgatatacaatttttttgctgtcaatactcaatagttaaatgaatttagacatactaaagaagaaagagtttcattgaatagaaattcattcaactattattagttaaaaaaataataataccaaaaccttaaattaatttcttgttatatcgttttgagtaccatttataaccatatgtcattcaacatatatatagggctgcatcgttgtggcaaaagctgtagg

SEQ ID NO: 21548 - DNA, 1035 bp, Glycine max
  Intron number 1 from transcript Glyma03g37910.1 (locus Gly ma03g37910) derived from phytozome v7.0 (chr-ID Gm03; pos 44362716 to 44363750 reverse strand)
tcaattggtaatgatacgttttctgctcttcttccttcgtttgactgatttatgctttcttgtagttatttacacgaacgagtatgcattggaagtcaggagataatggaatcggagctttgttttgagttagatttgtttaagtaactaagaaacccaagagagttacaatttgaagtctcgcgtgcgctgtcatttcctcttgagaaatgctgctcaaccatcaataggtgctgtgctttcaacttgaaatcgacgcaggaagagtgtataagtttttgcatatgtgctgaatggacaagagcttgttctgtagttaatcttgtaaaatctgttaatatggtgcagtataattgaccttgtcagttgccactataggcatgatcctgtgattgaagaatgggaagaaaaccgattattgaaactcggataaccggaatgaggattttttttaccttttggataggatctagttgaggttttgttcattctataatcagtttgtgctaaccatcttttgattaatattatatttggatcgagaggtatgtggaagggaggttaaataatttcaattttcaattaagagagttatatatatatatatatatatatacatatattttcttttttagtttttataaagatgagcaaagaatgactagaaagattacatggcaatatctcattttgttcctttcattttgaaaagtatttgaatcgtaaaatattaattcaaattgaaaatttaaccaatccaaattcaaaggtcaccagaaggaacaaaatgctagtagttcaaactttggaacattatcctgatattaaatgaagatactcattatacagctttgccttttgtcaccgattttacttgagaagcaattacaattcatttcagcctgcttttcaaaagtgatttttattttttatttttttgcattttacagtcagtaaagtgttcttgatagttggttttggccttttgctaatgatgcaggtatattgaaaaaggttcaaggcttggtgctgaaa

SEQ ID NO: 21549 - DNA, 681 bp, Glycine max
  Intron number 1 from transcript Glyma01g44390.1 (locus Gly ma01g44390) derived from phytozome v7.0 (chr-ID Gm01; pos 55072527 to 55073207 reverse strand)
gcttcaaagtccaggtatgtcaagctcggtgctttgttttgttggtgtctctatttgctgtaagatctgatgtgggtttcttcaacttcttcggtgctccgtttcacatttccttttttgttctgggtggttttctatttgatggtttttttgatctgctgcttgagcacatttttaattgaatttcttgagctatgtggaatgccctttgcttcatctgtttaaatttcggtgctttttttgtttgctataaggtgtgtgcgtgaaatttaaagatgggcttcacttcatttctatttttggttattgttaagtctcgatcttcttctgttcttgttaaattatgttatttcattagggattgcatctctatctgtgtttctggccctaattctcactttttgttagcagtgactaacttactatctcctttttctttctcttggtgatttttttttcatgtttgatgtgtttggctcgacaatgcttttagatgctgagtttggaataaagagttggtttccgcgggcttagatccatctgtctgattggatacaaatatggcattttgttactttttagtgtcttgtcttttcttttcattaaatgcattattgatatgaaattgacattgtgaatctgatagatccagtttatctgaaactcccaacaaagcaaccc

SEQ ID NO: 21550 - DNA, 382 bp, Glycine max
  Intron number 2 from transcript Glyma04g43550.1 (locus Gly ma04g43550) derived from phytozome v7.0 (chr-ID Gm04; pos 49093021 to 49093402)
ttctggtattctaaactccccaatctcatttattagcttgatgtttcaattgaaactgtctaatgatgctaactaataagctagttaataaatgtacaatgaaaaacaaagaacaaaaattagtagagttaatgtttgttagtaaacgagattcgaacccactgcggggcctctctctccttcttccttcaaccacaccaagtcaaccttataacttcttaattagcaacttgttagttacagtggcttgccaaacacattcaaaataaaataagcaagttgtttgatttgaacttttattgttccctcatcttgggtggctaacattagattgggatgaattgcagggactgagcctgctgacgttttcgactatacttcc

SEQ ID NO: 21551 - DNA, 657 bp, Glycine max
  Intron number 1 from transcript Glyma04g05040.1 (locus Gly ma04g05040) derived from phytozome v7.0 (chr-ID Gm04; pos 3785097 to 3785753)
acttgccaagcttccaatataggagcactgcagaggtatgaactcagattctgatgtaccctcacatctgcataagtacttttagaattattattcaatcagaatcatcagaatgccactttatcaaactttgttaaccttaatttattatacgaattattgagataaaacttcaattttaattaaaaaacactaaaaatattatatttaagttttgttcaaaaattatttatatatatgatggaaagtaagatccaagttagaaactgcataatgcatgtgtagaaaacaactgatttttaaaacagttctataatataaattgtagaatgacaattttttttttttaaataactgcttatagttatgtattataagtatatatcagattctgagttgtgtaattaagcaatgtgaagttatttacggtcttgtttgctgggtatcatgttataaatgtcttgatatccgaatttgattcttaaaagaaaatatttgtttatgagacagcaagtgtattgatgtgttgtgtatgattttaatgttcaatatcatattttgttactttatcattcggtcttctatcaatttaaccaaaaaaaaagtgtattaattagttttattactgttacaaacaaagccagcaggctaccgaca

SEQ ID NO: 21552 - DNA, 632 bp, Glycine max
  Intron number 1 from transcript Glyma02g25240.1 (locus Gly ma02g25240) derived from phytozome v7.0 (chr-ID Gm02; pos 25964295 to 25964926)
aacaagtaattattgggttttcgttttgttttttcgtgcattcgtatacccttctgggtttttactcatacacgatagattttttttttatttgttgggattgttggggagcgttatagaagaagttcttctctttatttagcatgagaaagcgtttatttgattcaaatgttacgtttttgttagttctatgtagttaggtttgtttagggagatcagagaagggctgttgggtttgtcccagagattgtttttgagttaaatagaaagtgttttttttttattataaaagtttgcttatttgtttattgggtatgtttaggaaagattataaggagtgcttatttgttttagaggagtgatagtaacacactttatacatgccctttttggttattagatcatgagtggggggtcattaaaggagtgaggcctatttaattttgtgttttccaataaatttgagcttataattgtgtgtttaaaagagtgtgttgctaacatttctatgtttcaggatttgcattgtgattcatgataggaaatagtgtttatttgtttcaaaaattgattttgttttcttttttaatttgttgggtttgtttaggaagattatagaccggaggaagaag

SEQ ID NO: 21553 - DNA, 622 bp, Glycine max
  Intron number 4 from transcript Glyma04g03880.2 (locus Gly ma04g03880) derived from phytozome v7.0 (chr-ID Gm04; pos 2828437 to 2829058)
atccttttggtgaggtaatggttattgaatctgtctattccttgaggggaaagaagttctttctctatgttctgttctgttgtttaatttaactaagaaatactcacattgagttttccattggtgcaagaattgcaaaagaatgtctttcagccctcctgttacattcttcaagtggttatgaggatttgctttgcagacactcaatctttatgtacaaacaaaatcaaaacttttcagccaaaagcttcccattgcaaacttttcaaaacataaaataagttaatctaaacatttattaaaatgttatattgattgtgccacctctcttttcagatgtccttttttactgataaagaagtctcagttgatgaggctgagttctgggagaagagttatttgttaagaaggctacagcatagcaaattagattcagaattcttctcttccacgaattatgtcaatgatcctgtgccagcatcaaatgacaaggaaatggataggagaattccatctctttgtctagtacagttaaaggaaaagagcagggcatttgagatcgtccagcctgtcctttttttattaaggatttaactaaatcagtagtttctgctggaaaaca

SEQ ID NO: 21554 - DNA, 996 bp, Glycine max
  Intron number 1 from transcript Glyma02g15050.1 (locus Gly ma02g15050) derived from phytozome v7.0 (chr-ID Gm02; pos 13595323 to 13596318 reverse strand)
atttgagtgaggtatgtatgcatgcataggttgatagtaatgaaagaaaaaaggtgttgggatgtgaatgatggaattaaagtaggcaatattgtgttatcaatgcccaaggaggcggtccacgactaaacttaagttagttgataaaattcttatcgttgatcgtgtatgcgtgtatgtatggttaaggttaggatgtaaagtcatgtgggcttgtgtaacttcaaattttggtcagctaggtgagagattgaattttcaagtttggttctttttgttgataaatataagatttggtgagttgggtcttaggggggctcgccagggtcaaggcaggcttcgtggatcaaagagtggtttcctgatagtgctgtcacttgatatgctcctcacgcatgtcataaggactaagaacccgtttggataaataacttaattaaggtcttattaatagttacttatataaaagtacttatgtatgagtttgtttttatatttgaaggggaaatagggttaaattgtttttatacaatctataagctgctttagctatcctagagaacttattgaaataagttgaaaatagcttatggacatatcataagctattgtcataagttttcccaaacacatacacaggtgcttgttttatatgttaagtcaaaataagttgtgcataagctcttccaaatagagcctaagtacatcaaatagtgctagttgtaggaatagtgtgaattcttcatgtagggtcggaagtttcatcacaatgtaaactctaagattattttatagaattggaaggttttctcagctgaaaaccatcaagagtaattgttttattttttatgtagggttggaagttttatcacaatgaaaacttaagattatttttatagaattggaaggtgttctcagagtaattgttttatttttttcattagcttattgctttcctctgctaatgtttaacagtttggcaagacatcatcctta

SEQ ID NO: 21555 - DNA, 420 bp, Glycine max
  Intron number 2 from transcript Glyma02g07140.1 (locus Gly ma02g07140) derived from phytozome v7.0 (chr-ID Gm02; pos 5699615 to 5700034)
acctcaagaaaatcttgacaagtgcaggtaagtatttttcttttttatccacaaatattagttattgattgttaatttgttaattggatatttgaatccacaatcttttttttttctttcatactttttcttctttcatactttattcacggtcaaaccaaccttatatattataacctcttaggtaagtacatatgaaattaaattcactcatgaaaaattaaggcctaaagaattaataaagcctaacttggaatcctattatattgaaagtgaggaatcagtttcttcatattatgtttctatagaatttatcattgaaaatttgacttctaatttaagtaacatcctaaacatgagtatttgattgtgatctaattgtcaggtattgttgcaagtggaaatccatatccaacccgt

SEQ ID NO: 21556 - DNA, 899 bp, Glycine max
  Intron number 3 from transcript Glyma02g03750.1 (locus Gly ma02g03750) derived from phytozome v7.0 (chr-ID Gm02; pos 2991066 to 2991964 reverse strand)
agcagattgaggctggagcattgaaggctgttgcggtattcttcttcttcttgttatttatgtgtttctgctttttcttatttatgttttttttaaatatttactccgtttatgttgatttattgggattatatctggttactgtgatgaacaatagttataatgttcaaatgtttttctgtttatgttgatctctcctcgtagtcttgtgtttttaggacttagagagactttgtatttaaacagttgtgcggagtgtagtatcaagctgtattccaaatttaggcgcctttgtgtatattttctttatctggaagtctgattttcaccaggagtgtatttggaatgttttaaatagggtttgatttgtaaaccaaatcttgggtttggaatgtttagagaaaaggaaatgatttagtttttatggaaaatgctcttctaaagacaatttttctccaatttgagtgcaagtaatggtgtatccatccttgaattatagtaggttaaggtctcaatgcactttaaattgaataaaaggtagatattcatacactcttactcattttagagacaacttcactttagaggggtctcattcaatttttctaaatcccatggatttcattgcttttgttttagtagttgtctcaaatttggaatgtttcattcaacattgatttgatttttaaatttaattattatattgattgaccattcaacaatgtcgtttgatctattttgctaggctcacgtagtgggataatgttattattactattgttgttaatatatgtgttgctcattattgtgataaacaatacttgtgttaatatatgtgatggaagatgaagattggatttacaggaaaagcaaccctttgagcgtattgaagttacacg

SEQ ID NO: 21557 - DNA, 606 bp, Glycine max
  Intron number 4 from transcript Glyma02g10690.1 (locus Gly ma02g10690) derived from phytozome v7.0 (chr-ID Gm02; pos 8595904 to 8596509 reverse strand)
tagctgaccgcattcaacaggtagtagatctgcaaaaccaatctcagaccatttttactttgacaatttttatgcttgttcatttcctgtataatttggcattgaaattaggatgatgtttatttgatatttttctttttatccccctaataacaacattcaattatgagttatcatggtttctttatgcctttatgctgctcaatttttcaattttcagcttagagttgtgtgaattcatgaccttgaatatctgctattcaactattggtcgttatctttgaatggaataggagatggaaaacaaagggaagaggagtagttggttggtgattgtttggtctgcatataactccaagaaaggaaataaagcatgactctgtttaatgatctttcttttcaacaaatcaaattaacaattagtttgaaaaagaaccagacaaaacaagaaggactagtttgttttcattttgaaacttgaatcagcaattttactcttgcttgtcattactgtctatggatccatctgaattactcaattcatgctgataattcttttttcttgtttcagtcactgggtccaagagcctctagttttcgatcctt

SEQ ID NO: 21558 - DNA, 784 bp, Glycine max
  Intron number 1 from transcript Glyma02g09140.1 (locus Gly ma02g09140) derived from phytozome v7.0 (chr-ID Gm02; pos 7129542 to 7130325)
gatcccaagagagctaagaggttctttttccttttaaaagaaattaatagtgataaattgaagttatttttgagtttgtgaccttaatcttgtcataaacttgatttaattttttatcttatgttatttatatttagaattgatagttttaaataagttgtttctgcttaaaataatatggctgcaaattatataaagctttgagctttaagttattcatattaaaaacaagaagaagctttaagttattgttattggagatggcgaagagtttaagtgactaaactctagactgagaaatagtctcatagttggcttaaaagacaaatttttttagcgacatctcggggtcccactagatagccaaagaacttattgttattattagtattagtaaggggtgtttcgattatgagaaaactgggaaagaaatcttggttggatgcactgatattggtttggaatgttgtgtgcttgtaggatttttgttggttggaattggtcttgtaatgatctagatttagtttttgtgtgtgcttttttatttcgtaatttttaattttaaataggttgtctctgctgaaaataaggtggttactggttaggaattacatgattctttatccttttctataatattgataagaaaagttgtgttaatgggtatatggattgtgggaaaactggaagaaaatgattggtctgatgcactgatattggcttggatttgggatattgtgggcttgcaggattcttgctaacaggcaatctgctgcaagatcca

SEQ ID NO: 21559 - DNA, 672 bp, Glycine max
  Intron number 2 from transcript Glyma05g04130.1 (locus Gly ma05g04130) derived from phytozome v7.0 (chr-ID Gm05; pos 3256407 to 3257078)
gtacaaggtccctacaagtacctacaggtaacaatctgataccaataccatgatccagatgctaatatgaggactgtaaatttgtatagtggcttagcatcttataatccttgtgtgaatcaaagtagtatcaactgattagtttcatgactgcaattttggcatcatcaatttagaatgaggtgctcataatattgtttgatatgtaatccatatttatgttgcaattgtctcttgtgctatggtaattcctggtatgacctgtcgtttcattgtttccaaggattaactcttccaaagcttaaggtggagacaatgtatgatcccactttaccttttgctgatatttgattttattatgatgaatgatggtggaagggatcaaattcctgttgtcatttaggttctaatactatgccaataacttactctcccaaaagcttaagctgttaggtggaagtacttgagtttatatgtttaacgcatgacattattttttactctgtttctgttatttatgacattatgattttgtgattctctctcattttctctatctatctgcctttatcctttttccctctgcctcaacttgtttattctatttctgcttgacatgtattttgtttttttctaggacttacctttggcagtaagacaatcagcaacaat

SEQ ID NO: 21560 - DNA, 383 bp, Glycine max
  Intron number 3 from transcript Glyma05g04130.1 (locus Gly ma05g04130) derived from phytozome v7.0 (chr-ID Gm05; pos 3257151 to 3257533)
aagcaaaatcgcccttctaaaaacatcggttcaaggtgatgattaattagaataatttttttgtttttagtagttaaagagacatggtttttttcttgggtgggagaagtagaatgacaatatgaattgccatttattttgaattgtaacattttattgcactatactacattatctctgtttgctctaaggggtgcattaaagtgctcgctaacttggatgggcattttattcattaagtcatattcttttaataagtacagctattggagtattattactgtatatctttgattttttttttttctggttctggggaaaacccatataaccttatatttgcaactcttccattctcagatttcagaagctactaactcgga

SEQ ID NO: 21561 - DNA, 519 bp, Glycine max
  Intron number 1 from transcript Glyma03g02260.1 (locus Gly ma03g02260) derived from phytozome v7.0 (chr-ID Gm03; pos 2034393 to 2034911)
ggggaggatttcaggaaatttgggtaagatttatagaatgcagttttctttcatattcagttgctcagtttcataacctctaaaagatattaaagctcattttaaaggtattgttgttattaacttttcttcttttccacaacaaaaaaaaaagcttattttaaattagcttttttttttcctttttaaataaatcatatgaattgctatgaaagctaaaccagtgacaaatcttatgaaaagcattttaaacacatataaggtaaaatccttagttaaaaacttagagttagctgcaacacataactaatacttttccttttttttttctttctcatctctctcttagtctctacacacatgcacacacaggaaacacacacacatatatataaaagataaatgtaaagcctccagaccaatttttcttattctataattacactaactttatatatatatatatatatgtttcatttgatttgcaataggagtgtgttccaagaatactgtgaagcc

SEQ ID NO: 21562 - DNA, 619 bp, Glycine max
  Intron number 2 from transcript Glyma04g35890.1 (locus Gly ma04g35890) derived from phytozome v7.0 (chr-ID Gm04; pos 42413083 to 42413701 reverse strand)
tacactaaaggtagcttccttatttattggttgatttcttaatttctacattctgcattaagcttccaacttaattctttattcatcctttaaagacataacaattttgaaatgaatggtttcaagcatatttcttgaataaatttgttatagaaatttgaatttttgtgtaaattgcagctcacccttgaactatagcccatgtgtggattagaccttaggggtctaaaaaggagcagataattgctgaacttcacactgaaaacttctctatttagaaacccattaactatggtatattgaagattaaaatctgaaagaatactgtactttagactaggatcacatttgcaatttcctcacttttttttttggtggttgttgccatgtaacagttccatcagttggttaacagtttgcctaatttagggtgtttttctcagtattatattcccaggggtcatttgcacacttcaaaccttaagatctaatgtgcacgtggaccaaagttgaagggtgtgtgagctgcaatttgtgatatattttgtataacctcctttgaatatgtcgtttttaatattctttttgtttttgcatttgtattccggttagacaaatc

SEQ ID NO: 21563 - DNA, 972 bp, Glycine max
  Intron number 4 from transcript Glyma01g28040.1 (locus Gly ma01g28040) derived from phytozome v7.0 (chr-ID Gm01; pos 37595169 to 37596140)
aagaaggtcaagagctccaaatttggtcttttagggttgataacaagttatatcttctcctaaacaaactgtgaatttcattaaaatcgtttatatttttagttttcctttacattgcttagggtttgcaggaagtcttagattcaaccgcagttgctgttcctgtaaaatcacaaaaaagaatatatgtatatatatatatatatatatatatatatatatatagagttttctggttgataaaaaggcatgctgaataatataaccatgtgttggttcatataccttcccgccaaccctttcttcagtaattgaattatcattatcaagatcgcattcattgatcacgtacacctgcttcgttcaaggcaatgtgaagcctctgaacattgtcgtttcagttgactgaaccgtggtggagattgttaccgattattagattaatttagataatatgttattagattagctcaaataaaatattatcaaatttgattagataattaattagtaaaagaaatatttgacagaggatgatattgtgggtgatcgggtctgcttataatgaccaatatatgtaagtgtcagacatcgtttggggagcaaacagagggaagcaacaagtctatcaagtaaattataatacgcgtgtggcaaatttttcagatattatgtgttactgttagcttgtccttggatgtattagttttacttttatcagatgttcacacatgtgcgcagaaggaagctggataggaaccaaattggaattatatatgtgcagctagctgtggtgatgccaattttcaagtgtacagatctctaatttttgtgtgggcttggtgctgataaaaagttggagggtgattatatgaaggcttcgtggtgggttaattactacttagtagtgcctcttatttccttcataaggtttaaggggttcggcgtattttgtttatatcctgcggaggg

SEQ ID NO: 21564 - DNA, 825 bp, Glycine max
  Intron number 1 from transcript Glyma02g02560.1 (locus Gly ma02g02560) derived from phytozome v7.0 (chr-ID Gm02; pos 1890102 to 1890926)
cttcccagagatcatcaattcaggttccattttatttgtttgattttatttatagcatcctagaatttcttgtgacatgttctaattctttttgaacccaaaattctgctatgtttgttgtgcttaatgttataatatgatgtactcccccagaggacttgatttattgttggataaaagatcattttggtcctgaatgtgcaagacctaattatcgcacttttttacagattgagtgactaaatcagaatttcgttctttcaaggctaaattgttatcaatttacacgttaagggaccaaaatgatcattgtgcttgattgtttcttctgttaattttgaagagaaaaatgaatttgacacttgattgtatcgccaatggatatccatgatgcttatagtgatagtaaggccttgtttgtttactgttttcaaaaacattttctgttttccaaaagttgtgtccactttgaaagtgtttgtccctgagcatatttctgttttctaaaaggttgtctcctaaacacttgaatcataaaagaaaatagaagagggtgagaaaacatatcctagctgtttacggttttaggtttttaaatcacttgttttggaagcaattttcaaaacaaaaaagatttaggacgagaaattgattgctgcatggtgtgaaattggtttacaaagcagtttttgaaataaaaaagtgagaagggaatcaaacatgtcctaactattgagattttggtctggattctctgtttctcatgagaatacggtttctcttcatgcaggggggtgaagcttttttcaggggtgtgttggaaag

SEQ ID NO: 21565 - DNA, 811 bp, Glycine max
  Intron number 1 from transcript Glyma03g26680.1 (locus Gly ma03g26680) derived from phytozome v7.0 (chr-ID Gm03; pos 34157920 to 34158730 reverse strand)
ttgttggcgtcttttcgttgtaagtctttctctgcatcaaaatcttaattctctctttgaataccaccttcatacctctccatgttctgtgaactatattggttttatgcttctttttaattttaaagttgatatagtgttggatgttgtaatgtgatgttgtaatatatgatggtagaatatttgattagtttttttcttcttttttttttttatggtcaaatgttaattgttagtattgttagtttttgttagtggaggggatcaaacccacaacctttctcctcttctcttctcccttaaccatccaaccaaccatatatctcctaaaatattttgttagtagtcagaatcttctaattctgaactgaaaatttgaattcccagttgtgggttggtgtgagtggaaggaaattgaatttaaataaggtaggtctttgaagaatctggagctggcattgttgcattagaccttgtttggaatttggataagtttctcgataagaatttataggaaaagaagataaaaaaggtgaattaagttgattgcacaagttaaaactatcttttggagaagttaaatgagagagcttttatatacataggctaattttaactcatggaagaagcttaattgtttttattttcttctttttttgtaagtgtttattgaaaagtttatcccattagggccttaaggtttacatgattaggcaacaaattttgggaatggaagtttttgcaggtactaaaagggttttacttttttggggcagcgaacttcccttgtgctgtacaaggaactgtattt

SEQ ID NO: 21566 - DNA, 467 bp, Glycine max
  Intron number 3 from transcript Glyma03g34270.1 (locus Gly ma03g34270) derived from phytozome v7.0 (chr-ID Gm03; pos 41749272 to 41749738 reverse strand)
gccgcaggttatttcccttcatcacaaccacttcatcatcttcttaatttctttcttaaatataaaccatcacaatgtttcattttaaaaccatttttttaacttgtatgaaaaagtatttgtttatccaaggatatataattaaataaccatgattaatttaggtggtacgtgtttgattctccttaaatttgtttgttttctaataaaaaaagatttgattttctaattgtgtgtgtgtttataatctttatttgaagagttaatcctgttatatggtcaatgttgttactcgaataaagttgactttcataaaatatacatgtcgtcatctaccatatatataattaactgccctcacatgatattggatcgaactgcaaactaaagtacgtagtactgcagtttaatttttccattgatcacaattaattaagttctaagttttgtttttaatatcattaggt

SEQ ID NO: 21567 - DNA, 473 bp, Glycine max
  Intron number 1 from transcript Glyma03g31440.1 (locus Gly ma03g31440) derived from phytozome v7.0 (chr-ID Gm03; pos 39350386 to 39350858)
ccttcgtgagttcctctctctctctcacttctctccctgtctccgtctaagtaaagcacagttagaatcggtgtaaaacttcgtaaccctccaaaattgttaagagtatcttcctcttttgtcatttgtcattttatattctctctggttggattagttacttcctcctctctggatgcagaatgccgtttccaacgaatattttgatttagttttttgaaaaaattgcacttccaggaacttgagtctagttacacatagaatgtatacttagggtttagggttttgttgcattgcatgtgcgtaaactgatatgggcaagcttaagttccgcgttcgataatgtggtggttttttaatggatatgtaattgtggcgattaaaagctggtttttatggacattgataattcagtgtgtttaaatgcacaactctggctaattggctctctgttttaataggggaacactggc

SEQ ID NO: 21568 - DNA, 953 bp, Glycine max
  Intron number 3 from transcript Glyma03g31440.1 (locus Gly ma03g31440) derived from phytozome v7.0 (chr-ID Gm03; pos 39351174 to 39352126)
taggacagcggagaattttcgggcactttgtacaggtatctctaaattgttcaaacaaactctctcttaccatcattatcattttttgatagtttggttgttgcctgggaagcatgcacttcctatgtaatatgtatattgggtaatgtgagactggagcttcttgtcaaccaacaagaatttttggtccagctgtaaggtagacattaattttattgggggttaggaagttatctgcatactggatcaatttgccaatgttgctcaacttatgagcaaagttccttctttgccttgttccctgttcttttaccccctgtacttccgtatgtgtgggtgtgagaggatacctgaatttgaatatttatgtgaatttgaaatgggtatttttggctgaattcttatcccccaatcccagcatacatttatagtccctttgttagttaactgacatgaagcacacagtcctaatttgtatgaaatgatgttattgtattgggtaatatttgattaagagaaaagacaaaacataagctctatactcgttttagtacttatttcaagctttatctgcagaaaacatggggtaaaagaatcaaaatctttatgcataatatcttcacagaacttgtcctcgttgcttttgttcaacttgtctagttgaatatgaaactggtctgtgtgcatgagatactagtcatttgtaattcacctatatcagtacatgttacctgcagttgaaacaaatatcttctagcctgcaagtgttaaaatgacttatattctataaatattgctaagctttttgcttcaaaacctattagaatagactctagattgatggtatgttttcatggtaattggttctttaaacattgcactctactttaactgtaactgtctgctttttgtttgtaggtgagaagggcattggagaatcaacggggaaacct

SEQ ID NO: 21569 - DNA, 757 bp, Glycine max
  Intron number 1 from transcript Glyma03g36050.1 (locus Gly ma03g36050) derived from phytozome v7.0 (chr-ID Gm03; pos 43047105 to 43047861)
acagtgaattcgtcgagaaagtcaagtctagcttggtttgtgcttattcctcttctagtgatttgcttggtttcaactgcattatactgtttccgtctgtgtttttgcttttgcttcttcccccccttgtgtctggttttataacaaaaatttgggtaggggttttcattgtggcttaagtcattatttctttggaggttataaatattaggttataattagaaaacacttagattgttgaggttataattagaacttgggaggaagattgttccctggtaaaaaccccttttatgtgatactaactgttagtaggagtgaacttgcttgttgtatttggttgttcttgttgctggatgttttaatgacttaaatgattcattgaaagaattttagaaaaaaattgacatgatttttgcaagagcctcacattttggggatgagtccaacagtagtaaggttgagccatttgttggttgggatgtgtgtggatattattgtttattggtttattttccgtgaatcacgtgttaggctcatgcatgtgatttaccaccattaaatgttctttgtatgaatgaatcaaaaaaatgttctatgtatgatgagtgttccagtttgtgtttttaactggtgttgtactgttgtaattggtgatttatgttttttttttttttgtgcatttgagcataaatttgataagtgcttttgttctgagaatttacatgttcatttcttgactttcctgcagaaatca

SEQ ID NO: 21570 - DNA, 340 bp, Glycine max
  Intron number 1 from transcript Glyma03g27900.1 (locus Gly ma03g27900) derived from phytozome v7.0 (chr-ID Gm03; pos 35685518 to 35685857 reverse strand)
tctccctctctttctcccccgcttccactgtctcggtaatcaccaccatcatatcttcattctttctcatttctctattttaggtttacttacttactcatcgcaattgctttctcatgtctctctttatgttgttcaatttttattttttttaagaattaatgttaatatcagtttctttatttatttttttggtgctcatagtttcgtgttgcgagattggattctttgtgacgttggtatgcttatttcacagttttgattgatttgcaggtgtctattccatcttccggggagaaaagttcgcaattgcatagctttccccttgcttcgttagctg

SEQ ID NO: 21571 - DNA, 301 bp, Glycine max
  Intron number 1 from transcript Glyma02g45330.1 (locus Gly ma02g45330) derived from phytozome v7.0 (chr-ID Gm02; pos 49624986 to 49625286)
tggaacagaaaaatcctgagttcctcaaattacaggttcagctcctgctcttcttttttccttttcattcttgttgaatatgatcggagtcttcaagattatttgattctgtattttctgattataatgtttctttattcgtaatatctgcggccctttggatgtgttcctgtcattaaagatggagattacaccttatatggctacactttgaactcatattttgttgcttcatgattaatgtttccccagtttaattttgtttcttctcttactggtaccagctaattcgagtgttttc

SEQ ID NO: 21572 - DNA, 609 bp, Glycine max
  Intron number 1 from transcript Glyma03g35700.1 (locus Gly ma03g35700) derived from phytozome v7.0 (chr-ID Gm03; pos 42814108 to 42814716 reverse strand)
gcagccgccgccaacccaacccggtccccgctcacgttagcaccaccagatcctccgcttccttctactctgcgcacccaccttatcctgcgcaccacttccccttcccataccaacctcactctcttcatgcaccaggtacctcatccatcatcactaatttaataataatattctctgttatgtagtagtaacattatttcttgttaatttcaggacaaaacttaattaaaacgcggtttcttaagtatatttttagtactataattggagttttatttcattaatctgatatttaatgcagacatttattatgctaattaattgacatatgaaactctatttctttctacccggacaacaatacgtccaaaatacatattcattggaacaaatgtgtgagttaggaaggactaaagagtgtttttgtacggtcagatttaggaagtcgcgtgagagacacgcgcccttttctttgaattaaacgtgggaaaaatatataggattcacatactactactaaaaagcttgttaagtattgcagcgggtttataaataaaataaaatggttttgttattgtgtaatttgaatgtggtatagtatagggt

SEQ ID NO: 21573 - DNA, 887 bp, Glycine max
  Intron number 1 from transcript Glyma02g45040.1 (locus Gly ma02g45040) derived from phytozome v7.0 (chr-ID Gm02; pos 49454944 to 49455830 reverse strand)
ctccaatcacaatagtgttggaggtaatttcttaattgcctctcttcctctcttgcacacatagtgtttgatgatttcactttgtgggttggtttcaaaatttgatcttgtttatgcgtttgttgggtttgggcattttgattgatttttgttgtttgtattaacatcctggttggttcagtctgtatatgtttttcgattccctttctttgtgggttgcggacaatgaagaggataagagagaccacttggtttggatatacatttgactttgcataccttaggaagatgttggttatggcttttagacaatttggtgaacaaaaacatatcttgtaccggagggaagtggctgttttgttatattatgaagacaaatgttttgttatattatgaagacaaatgtttaagctgttggagattgatggtttaggaaaagctgcaatcttatggtacttttttttggtttgagttgttaatgtctttaaagagtacattcttgtgataggatctgccattctaaagaagttttgacaatagtgtttttgtctttagatgtgcctttttttatctcaatttcgcgctctttcccttatttcacaataatgaatttcttagtttaaccatccccctctccccaaaaaataaaaaaatggtgataacttatgtttgttgcctggtacatctgtagcatcaccagtggctagtttttgtgtgttaaatttgtgcatatacaacaaacaaaatttgatgtcttcaatagttttaaagaattatgcttgtcataatagaatgaagatcgcatttcaaggataatgttcttatcagatgtttcattaatcacttcttctacagaaattgctgcaagggaaacgatagagcaggtt

SEQ ID NO: 21574 - DNA, 666 bp, Glycine max
  Intron number 1 from transcript Glyma03g00740.2 (locus Gly ma03g00740) derived from phytozome v7.0 (chr-ID Gm03; pos 445187 to 445852)
gtttcagctggccacacacattcttaatttttttggtaacacaccacaatgtattttattttatttattcttatcagtcacgaaaagcaatagcaatagaattaagcaaccattttttttaattctgttttatcaaccctaatttttaattatttttgcatttccattcaaagattcctttcctttccctctttgaaattcaggtgtttttaagaacagcccaattcagttgatttgcgtttcatattattcggctcggtatcaatcgagaagaaaaaaagcttctttttttttttttcgttttaatcggtaaattggtcagttttagggttttgtgcaattttgatttatgtgcgttctctgttattgaaattcagttctattagttcgtgttgttttatttgagtaatctgatttctgatgtctcttgtatttggggttagggaaattagaggaaattacgcatgctttgatgtttgtcaacatctgaaacggattaaaataatgcttgtaagtgggttattgaaaaattatagagtcctagctggtgtgatgcatggaaattgaaattaatggatttttgattgaaaacattgatcataatgttattgaacttgatggtcctttattgacttgtaggctggcctatagtaaaaactcatatca

SEQ ID NO: 21575 - DNA, 499 bp, Glycine max
  Intron number 2 from transcript Glyma02g42760.1 (locus Gly ma02g42760) derived from phytozome v7.0 (chr-ID Gm02; pos 47743317 to 47743815 reverse strand)
actaccacgcccaatttcaagatctctcatacttggtaattacttattattctgtagtttctactgaatttgaagtaatactggagtttattagagagtgtgttgctacttaaacatttcacagttcttgaaaggagtttgccaaagtatttgtggagtttcctgtttggattggctatattaggcatatatgtatgaatgcatgaaatttcttagccttgtgaagctttcctgaatagattactgattcagagttatccctttttgtttcactttttttagtcggtcctgctttgcagttacaatgctttatacccttaacattttatgtttccttcgattctctgttggtatccatgttatggttggataggtccattatattggttgtcttcattaagggaattgtatttgatttttgctttttattgtctctttcttggaagttcttctatataattattgtgtatgattttgtgatgaaaaaacagtgagaaag

SEQ ID NO: 21576 - DNA, 660 bp, Glycine max
  Intron number 1 from transcript Glyma03g33620.2 (locus Gly ma03g33620) derived from phytozome v7.0 (chr-ID Gm03; pos 41138730 to 41139389)
gccaaaacgatcacttctgcagcagcgatctcgaagtttgtcagtccttccatctctcatctcacattcctgttttgacctaacttatgctccatttccattctctattatttttcctcttttcatttttcaccttgtgcaattgaatcctgagcgaaacaaaaaatacctaattagttagagtctatattggttcccttagaattggaatttaggattgattcggatgaatgtttcaatggcacgtgttaggtttccatttggttcccttagaattggaatttaggattttgtgtgtgtgtgtgtgtgtatgtgagctcagctgctgaaacatcagaatcagctatgagtagtttgtttagttgaatctagattgtaattttctcttaactaaatctttatgatatgagtatatgaccggtgaaatcatgtgttattaccttgtatcgggttgtttttaaattttaaatcaggaagaaacaaaaaaacaaaacaagtgctataattataaagaaaaattgcttgtggattataagcctcccgttccccttttgatgtgttttcgatttggatccatagaaagtttattcacttttcttatacttgaactgatgtcatgggataggtcttcttgggagtgtggctccttgtgtgctgtat

SEQ ID NO: 21577 - DNA, 763 bp, Glycine max
  Intron number 1 from transcript Glyma03g15800.4 (locus Gly ma03g15800) derived from phytozome v7.0 (chr-ID Gm03; pos 20045560 to 20046322)
tggcttctggtgctgttgtggaacacattttcaatgtattggctacttcattttctcatttactttgaatattgatagatagaaagaaacattcattgcaatatatcttgttattacaacatgaaacgttttatatatgttttctctagcttgggcttttgctcttatgcttgcttcttcgagcttcattggctcacgttgaatttgtggaacacactttatttttttaattttttttaatcaccataatattaatctttgattctctgttgacatcttaagtatttttacaaacttcagtccttgatttaaaactcttggttcttcggtgacttttttcttcttcctttcatgggacattggttcatggttctggaatgcacttttatttttagtttttttaatcattgtaatttggatttgtgattctccaatgagctagatctttaagtatcatatgtttcaatccatttcttaaaactcttcccccttctgtagtttatttgttcttccttgcatggactattggttcatgttgtgtttgtcaaacacacttttatattttcatttttttaatcaccataactaactttgatttaggatttagtcatatttaaaatttattatctttatccagttctttggtttttcttctccctttcatgggctaatcaaattaagtttgaaatatatttactaattaaaatcttatattgttatataaataggtggaaaacattactgtgcaacgtttgtgtcgtca

SEQ ID NO: 21578 - DNA, 843 bp, Glycine max
  Intron number 2 from transcript Glyma03g15800.4 (locus Gly ma03g15800) derived from phytozome v7.0 (chr-ID Gm03; pos 20046405 to 20047247)
ttcaacaagtcaccctataatcttactattcattggtatactttttctcctccctctcatatcaataatgaaacaatattaattaaatcatatagaaagcatgtggtacgataaaaactattataaaaagcacaacacggttttatcacaagagttaataatatattattgacttctgttatttgcttcatacgtattttttttaccgtccaatttcattcctagaagcaaagagtttttttattaattaaaagtcgaccatccctctcatttatcttttaatatttaggaaattcagtcttaagtgttttcgtaaattagaaacatgaaacatatttgcttttggatttttttagaaaagaaagttaactgttatgtgttatcataccacaaaataatatatatatatatatatatatatatatatatatatatatatatataaggtagaatcttaaaaaaatattaaattaaaaatataaaaagactttgtgagtataataaacagctacctaaacaaaatttatattaaaaatcaaagaagttatttaaaaaaaatataatcatatgagaattatatatggagattaaagaaagtttaacataaaagaagaactttcttaaagaaattattaacatttgagagtgtgtttttttccttcatgaaaaaaatacaaagaaactcaaactaaggaatcctaaaggaggaatttcagagtggttaagacctgtgtcttaagagaaatttggatatttttgtctacatgtaaaaactaaatttggattcaatttacaatatatgatacaggcacggaatttttcaatttttaacaccgtggtcag

SEQ ID NO: 21579 - DNA, 465 bp, Glycine max
  Intron number 1 from transcript Glyma02g38310.1 (locus Gly ma02g38310) derived from phytozome v7.0 (chr-ID Gm02; pos 43744070 to 43744534)
aggccaacaccgacgtcctccaacgcacaaataaggtcacactttatttcaaattataattataattttaaaaaaagaagaaaatttcacactcacttttttggtgtaacgtatatatttctttagaaacaatccagttcgtcaaggaagtctaactcaggtagttaaacactgtgcgttcatgacagtgtgttcgattgccacagataaaaaaaatcctgttaggagacactgtcggttagagtcattataattatagctatagttaaatttgaaaaaatagtgaaaatatgaatctttgtaatgtgacatggtgtttatgaattttgatataatgttgatagtgtttggttggtttctttttttgtgtgttgtgtggtacactactgatagattctttttttctttctttttttttggttgagaaaaggtggttgtacttggaggagggtcatttgggacggc

SEQ ID NO: 21580 - DNA, 718 bp, Glycine max
  Intron number 2 from transcript Glyma02g33350.1 (locus Gly ma02g33350) derived from phytozome v7.0 (chr-ID Gm02; pos 37145182 to 37145899)
gggtgttgccttggttgcccccgacacttctccgagtaaatcagaatgctttcatttatttatttattttctccgtgttattttccgaataaaacttgttattgcttctacttaccaaacttgattaacattaggctaaaatacaatttttgtccttatctacaatttttttttgtttcagtttggtcactataaactgtcagtcgatcataaaccaccgatcataatagtttgttaacttttataataattactttaaaattcatttcaaagatgatttcttattgcatgtctattaaactcgcagatatttttgttttgatcttcctgaaattatttttttcatttagtctcttgtaaacttttgatataggtcctcattggtagttttttattttagtccatgttaagaaacatcgtgcatattttccaatatctgtcaagtactcaagtcaggtcattacttagctgagaatcctaatgtcaaatacaaaaatgaaagtaaaataaaaaaattaatagggaccaaaacagaaaatttattttaagagggctggaatgaaaataactgtatattatacggactacatagttaatcaagccaatcaaaaaatatatattttaaccactataattaattggtaatggtctttctacttttccttttgttaagcttcaatatgttctcagtttaaacttgataatgcaggaggcttga

SEQ ID NO: 21581 - DNA, 642 bp, Glycine max
  Intron number 2 from transcript Glyma04g41940.1 (locus Gly ma04g41940) derived from phytozome v7.0 (chr-ID Gm04; pos 47735800 to 47736441 reverse strand)
ccttggaatcggtaagggatgctaagtaaatcccaaatactatgtgttctatctacatagcatctttgtatggaatctaaataattttcaacttgcaactcttttagttttgctaaacttttgttgatatctcattggatatattggaacttacctactggtgcatgctggttggttaggttttcagcttcactgctattaactaaaggactaattgtacattttgatgattaaagaattcatgtgtgtttgtcatggtcagactataatactgttttttcacttcttcataggttatatgtttcttttaagtttttttttttctttttcattttgataatgttccactatctaatagtgatttttatgatatctaattgatattgacattgaaaataaaactgcctctttttttttatctatatcatactcaaagattttgttcttgtttaattcataatataatttcagaaaagctttggttttatttccaggaatgtattaataatgtgcctgctttctgtatataatccagccttggttgtttttcttttcggtttctttttaatccagtaaactagtaagttctgatgtttttatgatgcagtttttgtcactattggattccagtgcagcatttaa

SEQ ID NO: 21582 - DNA, 480 bp, Glycine max
  Intron number 1 from transcript Glyma01g04890.1 (locus Gly ma01g04890) derived from phytozome v7.0 (chr-ID Gm01; pos 4509721 to 4510200 reverse strand)
ttgggctcacacctctaaccctgcttccttccaaggtgatggatgattcatctctcttccttctcaattcccttcactctcttcatactttttttttcttttactacttcccttgctcatgaattttcactacctcaacttttctgtcacatgtatacatacatacctaccaaggtttttaaaaaacggtctaagtcacaacatcaagcttcttgtggtttccatgaccatattctgaaaggatcgccaccgcaatttaaaaccttgatacatatatataaaaataaacaaactaaccaattggcttttttttttttatgggaaacttgaaagttggtttcgttcagtttagaactgttgtttgttctcttaagatgtttgatttttttttccttccttggttatgattgaattttaacatggtagttgttgtttggtggggttggttttcaggttcaaaatccgtggttgattttgaga

SEQ ID NO: 21583 - DNA, 531 bp, Glycine max
  Intron number 3 from transcript Glyma02g08540.1 (locus Gly ma02g08540) derived from phytozome v7.0 (chr-ID Gm02; pos 6660514 to 6661044)
gatccagataggtactgctcgagaaacagattaatgtgagacgatgaaataagttttgttagagacttggttgctttaagtggaatcaatgtttagatttacttgttcaattgcctttggcgtgtttatctttgctttgcaagagtgttatggtcttattttgcattttgatgagtttctttcttgtcttggttgattagatatggttaatgtggtttttaattgatatttttaatcatttgcattggtcaaagttttgttgcaacttttgatattgcggaaaattacaaacaaatgtagatggtgcgattacaattgtggtcccaatgccagtcatggacatcccgaaaaccttaatgttagggctgcaattgcagttgcacactgtttataaagccttagtgttagggttattgatgtgatctcttctgaaattgtaattcattgatttattatgggttgtgaataagttgggagtggaatctgtgttcgatggttatgacatccaacttctcatattttaggtttctt

SEQ ID NO: 21584 - DNA, 312 bp, Glycine max
  Intron number 1 from transcript Glyma01g42680.2 (locus Gly ma01g42680) derived from phytozome v7.0 (chr-ID Gm01; pos 53889041 to 53889352)
gtagtctccttctgccctctggaggagaaatacctgtctgtcacggtcatcttctctttctccctcacaattccatttaattcgctgcgatcacatattccccgattgctgcatcttttcaatcttccttttttactttacgaaattcaaaaccacctcttcgattcgttttccaataagatatacaccgattatgtattttccccaaataataggaaaagaagaatagatacaaatattagcggtgttgatcgatttgcaaatctgagagtaaatccttgtgctgcgattcttgttttttgtttatgtcag

SEQ ID NO: 21585 - DNA, 652 bp, Glycine max
  Intron number 2 from transcript Glyma01g33350.1 (locus Gly ma01g33350) derived from phytozome v7.0 (chr-ID Gm01; pos 45353923 to 45354574)
ccatactcatccagcttggtgatcaacttgaggtaattttattcaaattatttcctccttgatctctctttggtacacaattctatatgcagagaaaaagataagttattacatgtctaaatcatatggtctgactaatctccacataacttattatattagcttttttgtttcacgaattataaaatttaattgcaagtcatgtggaaatttataaatatttgtggaagcatgtaataatttctcttagagaaaaaagagaaagttacatactatatagtggaaaaaaatccaaatattcttattttatgtatactttttggtttattcagaatgtttatgtcatttctatacatattttttttcttcttttctccacagccaaacaagaaaacaaaaaagtttataaaattaactcactttttactttttttttctttcctcttttttttttctttcacttttttcttctaaaccaaacacaccatgtgtttctacccttagtgcacatgcaaatgtaaattcaggtccattcaatttaagtttgttataattattactacccaatatgcaattatttgaacatattttccctcctcacaaattgacttactttttttcttaaaccatactcaattgtagatcttaacca

SEQ ID NO: 21586 - DNA, 593 bp, Glycine max
  Intron number 1 from transcript Glyma02g40740.1 (locus Gly ma02g40740) derived from phytozome v7.0 (chr-ID Gm02; pos 45967915 to 45968507)
agggcattcttggcttcatattgagctccacacaggttctttgttttcactcttcaacttatatatacacggcaataataaataaataaataaagtggtcacatcattatcaactacgaacttttaactttgattatcaaagtatgattataagcatttagtatattattggtgggagaatgcactgatatacatgaggtcatagattctaacttaaatgcgactcttatacaaaaaccaaaagaaaaaacgttaaatatattgttgaaaagtctgatatcgtcagcctcaatagtcaattcctaggattatttatttattggacaacttctcttaacctaaatttaagaagaaaactaacataatatcaagagtttataaccatattgccttttcctattttgacaagcattaatagagggagtgttgcttttaacatcaattagttttaaaataacatcaatagataattttgatattgttagaatgagtgctgtttcgttatatgttccacattatatatatataatattgccagtggattttaatgttgtgcacctgaaacttgcaggaagctgttgttgatccaccat

SEQ ID NO: 21587 - DNA, 425 bp, Glycine max
  Intron number 1 from transcript Glyma03g40530.1 (locus Gly ma03g40530) derived from phytozome v7.0 (chr-ID Gm03; pos 46257764 to 46258188 reverse strand)
accaacaggcttctttccaggaagcagtttgtgagtttcccttttttctctacaaatctccacctaataacttgaaatatcactttcccagtcatatttgattatttttctgctttgttttttaattcgcgtatccttagcgagtgttatgcattctcccttatgagttgttcttgaatctcacttgggcgaactgagttctgttttttaagaggatcgatgcaactgttgttgttgttattagaattatttggatctgaaaatttgataggaattgtctgattttcactggccaacagatgtttctgttttcttagttgttatatgaaatttgaaggtttcttccctaattgtagtgtcagagattcctagcgttggctctcctaatatttctattataaactttgttgtgttgcaggtcgttg

SEQ ID NO: 21588 - DNA, 428 bp, Glycine max
  Intron number 2 from transcript Glyma02g04210.1 (locus Gly ma02g04210) derived from phytozome v7.0 (chr-ID Gm02; pos 3397066 to 3397493 reverse strand)
gaaacaaagaaacattcaaaagaaacgaagaggtaattgacttatctaaaaaatctgaaaccaataatgtctacctgcaaatttttagtttaagccaatctgagccaagtcaatgcaatttgagccaagtgaactcacttgaaacaaggttttctcggtgcttattttcttcattcacaaaattcaaaccttaaaccttgctttactaagtaccttgccacttagaccaccaaacattggttgtttctgttgcatatttatatgatagtccatgtcctctgaatcataaatattgtatatgaattcttttatcttttgaagagcttcaccttgtcctataaaaaaatcgaggaaccatcacgagatacagcacaacaacattaaggatatttactgatctcaatcttcattctggttttcaggttcaa

SEQ ID NO: 21589 - DNA, 161 bp, Glycine max
  Intron number 3 from transcript Glyma01g01120.1 (locus Gly ma01g01120) derived from phytozome v7.0 (chr-ID Gm01; pos 765242 to 765402)
gtattatagggctaaagacactgtaagttatattttgttctttgtttttaaatcttatgagatgtttgttttcaattattatttgatcgtaattcatttattttgaattcctcttctactttacaggtcattaaaaaacttgcatatctcattgaaccaaa

SEQ ID NO: 21590 - DNA, 691 bp, Glycine max
  Intron number 1 from transcript Glyma03g22360.1 (locus Gly ma03g22360) derived from phytozome v7.0 (chr-ID Gm03; pos 28662584 to 28663274)
cgccgaacgcgcctcgttcttaaggaatccgtatgtcccttcattttttttcctttttattttctgttttttatttattattttgttttgttttagataatagtatatagtttttttttttggtgagaagaattgtgcagcatagggcataggcagagtgttttttgttgtggattgattctccaagtagaagaaatagaacaattttcggttttaatgtttataacttttgttggtttttagtcattacattcaaggttattaattttagtcatggtcaaggtagcaatttggtcacaatccttgatattgtagaagattgtggagaaatggttgaggagactccaaaaaaccttgacatttcagtttgaaaccttttttgaataccagaaacttatgagaatgatgtagttttagggtctaatatttgattttgattttcaaaaactaattttagttttcaaaatgcagctaaacaaggttgctagatagttggtggagagtggtgtgagagttggaattgagggagaggtagaattagatgaaaaccgaaagaagataagaaaataactagctgtttttgtttctttttctattggaaatggttttcaaaactttttttatgtatcaaaaatgtgaaattcaaaatcataattgttgtctaaaatgcttgtcttgtactgaaaggagc

SEQ ID NO: 21591 - DNA, 484 bp, Glycine max
  Intron number 1 from transcript Glyma03g01800.1 (locus Gly ma03g01800) derived from phytozome v7.0 (chr-ID Gm03; pos 1539816 to 1540299)
ctacttcgggtactggagttgttactggcattccggttcattggaacaattcgatcgacaagtagaagaacaagcacaacaagcaaaaataaaataataaaagtgtgtttgatttgtatttttatttttaaaagattaaaattttaaaaatatgttttgtttgatttcttgttttatgactttaacaaataaaaatattgaaaatgtttttaaatgaaaatgtatttttaaattttaccgtattttcattttatttaaaataaaattttttatttcaactaaaaatattgaaaacgagattgtattattttcaattttttattcgtttagaaaaatattttcactaaaaataaaaatagaaatccattttctatgttcaataaaaatcaaaacagatcataccaaacattccgtgtaaactagataggaattgaatccgtactgtttcgtatgtttttgagtttggagaaaaacaatttggtgt

SEQ ID NO: 21592 - DNA, 498 bp, Glycine max
  Intron number 3 from transcript Glyma01g06170.1 (locus Gly ma01g06170) derived from phytozome v7.0 (chr-ID Gm01; pos 6072080 to 6072577)
gctctgctgcattgagcagtgcacagcaggtcagtgtgttaagtattgttggtgaatatattttatttggaatataaaaatgtgttgttggttatcaggaagtttgctaatagtttgatgtgaaagtggtcggatttaagtattcgttttcttggattagacttgtgattattgtgtaccatgttaattaactattcccagcattagggaaacttgtgcccatgttatgattaatgtactgatatttttttattcaagggcttgaaagttgggaggggcaattacgttacgtgtgtcttgtaaagtggtgtgtcagcactgctcaacttcacactatctctgtttctgccagaacttcttgttcttttaacctgtcttcttgaccttgatgccccatataatcttctctttacagtgctacatgcggtaaattgattgttttattttttgaacttttgtataggtcccttcattgagtaccaagggttctgcatcatc

SEQ ID NO: 21593 - DNA, 320 bp, Glycine max
  Intron number 2 from transcript Glyma04g40030.1 (locus Gly ma04g40030) derived from phytozome v7.0 (chr-ID Gm04; pos 46177053 to 46177372 reverse strand)
cactactaccaagcccctatctttgcttggccgtaagttgcttatatcctctacttgaaactaggttcctaccctgctcttctatttatttttttcttaatttgattttgaagatgggatgaggtctatattttttagtgttcctatatgctctaatgttttcatcctaggtaataatcgaagtaataaactaaaggcatagactttcaaatttttattccagacaaatataactaccggagtatttgctaggatttgattcatttatgagtagcaagtagacacaacttgatttccttgtttgaccaggaatcaccgac

SEQ ID NO: 21594 - DNA, 785 bp, Glycine max
  Intron number 3 from transcript Glyma01g02790.1 (locus Gly ma01g02790) derived from phytozome v7.0 (chr-ID Gm01; pos 2284419 to 2285203 reverse strand)
attgaagtgcgggctcaaagaaaatccggggattggttagtttgtgttcttctttttcacacttgatttgtttggttttttttgtcagtctatgttttagaatgctagttttggatggtttgaaaattttatggttggacttgaatgcgtgtggaaaaattcatgtctctagggagtgtgttttttttatctttataatttttgagctggataatgctgtatgttcagcaatgtgaatgcctgaatggtatgttgcttactacttcctatgtttggatgttctgaagcttgttagtaggttcatttatatcttcgtgaattggtctgtgggtgatgagtactatcttgtttaaaaatagggaggatggtatgagtgttatttgcattggattttggcttgaatgctatcaacttctttaatctctagttgctactgttcttttccatgactgattgaagatcccttccatagatgagagaatatgaatgtgaaaaaaattaggggagagagagagcgagaaagaatgtctacaatttataggaatttatagaattatttacgcaggcatggaaagctaaattccatgcccctcccccttataaacatgatctttatcttagaatatcagtcttcagatctgttggatacaactaggccaaaagttatggctgtaactaacaagatggggtgcttacatagtcatgttgctgtaacttgccaaattattattacctcgtttttacttacatactggcatttctaattgcagtatctcttatctatt

SEQ ID NO: 21595 - DNA, 784 bp, Glycine max
  Intron number 1 from transcript Glyma04g39130.1 (locus Gly ma04g39130) derived from phytozome v7.0 (chr-ID Gm04; pos 45374906 to 45375689)
acattggcgtttttcgatccattgacgttttggaggttcgttggtttccactttacttcttttttttttcctctcaaccctccaattaattaggagaaagcaactcctgaccaagaatcaaactcggtattaccgaattgaacttaacttccagcacattaactactttacctttcttatataaaaaaatgaaatttgtattttattaaattatgggtctgcgtttttgtgcctttaaatgacatggctatggattttacttttttttgttcttatttcaaccttcagttatgtggttctgattgagggtttttataatgcgcttgaacaattgtgatggctgaaaatttctgtccgggacaaaatttagatactatatcttagatgttttttttcttgtctgtttttctaataggaattagagttttgcctcgataattaacctaattaagctaaagttcaattttgacaggagagtaacacaaaatgtgtctagataattgttccaagatttttgggtttcatgcctagctagtcactgcattcattttatttatattgccatggaaagttttcggtcggagggaatggactgttttcttaggaaaggttccaagagtcgcatgtaattagaagaaaatattaagataaaatgtgcttgcaaatgaattttctgataactttggtattgaagcaactttttttggtgctgtgcctgcagattggtgccactttagtctcttacatggttgtttgattgcaattctaggtttcagcaggcatc

SEQ ID NO: 21596 - DNA, 750 bp, Glycine max
  Intron number 1 from transcript Glyma02g04320.3 (locus Gly ma02g04320) derived from phytozome v7.0 (chr-ID Gm02; pos 3494413 to 3495162)
tacgcttcacaaaaccttcaaacccaattccacaggtaacaatcatttctcatcaactgcactcgatctatatgaatacaacactaaatgacccacttgcggtaaaaaactaaaaatcgaattttttggctttcgtgtcaactgggttagtgttagattcttgtctctctcttaaaaaaatgatttttggtcgctaacttgaagggattttttttcaggaatctgaccctttttttgttttctattttctattttctttttcatcgtttcattgcagaaatttgactaggggtgaacacagattcctcagggcacagtgcacagtgcacaagcttttgcttttttttttttttttttcactgttatggtttaaccgtgttttctctattatcttgcaaactggttggtgttgcatttgttaagccatatgttatattcctttaagtattctgagtctacatatttgatgaagttatgattaaatcagagaagtctaattatggagctgagtctacatgtcagtctttacttcactagttagcttgaattctgttattgaagaaatctaatttccttaaccgaaacacttcacatgtagtagaatagggtaatcttatggtgctttgttcacgaggcatgtctgcgtgacagttctcattattttcccttttccctcattgaactgttctggttggcaattgatttttttttcttattctgtaatatctgcaagaattcttctgcttcacc

SEQ ID NO: 21597 - DNA, 749 bp, Glycine max
  Intron number 1 from transcript Glyma05g05270.1 (locus Gly ma05g05270) derived from phytozome v7.0 (chr-ID Gm05; pos 4600837 to 4601585 reverse strand)
cttgtattggttacccttttacttgactcagacaggtaatcatccactataagattttttaagtgtttatagctgtccaattaagattaaaaaaatgtatttttctcggtttttgtgtgaattaatgaaagttgaaaatgaaagtaatctgttcaagggagtcctttgatgtttggaccacccaaggttttgatcactgtttgtttgtttgtttgttttgttgagccaattttaaagttattttctcagcaatggaagcacattgcccagggaagagttattttcttgatatatcaaatgttcactcttacaagttgcaattaagttatggatatgaatgtgtttttttgatgaaaatttcaatctcagtttgctgtatgtgcataatttggtctggtttccaatgttaaattactacaatttgactgaaatgaagttatttgaccaagccttgagagataatagttttctataattattgttcacaagaactgttcacccttttagtagtgttataggattcctctttgaagatcaaaatataactaacaattgggtggactagtgtgacgccaatttcatgttgggtttagttctttggttaaaagcctatcaaaatttctcttctgattgtttttgtttaactgcaaaattttgtatttgatgtagatgtaaattgcatgggtcataaatctttacatcttaattttgcagaaattggtgggaagtatatctcggttaagtctgct

SEQ ID NO: 21598 - DNA, 608 bp, Glycine max
  Intron number 4 from transcript Glyma02g00910.1 (locus Gly ma02g00910) derived from phytozome v7.0 (chr-ID Gm02; pos 691530 to 692137 reverse strand)
actactggtattgctgaggttcagcttccaatcgagtaagcgttctcatatttgttgtgatgggctgtattgaattatctgttggagaagcatttaataatccagcattttctttcaagtcaatccttggctatctgttattcatctgggtgataaattgatctttattttatgattactatggtagccttttgtagacaggtttaaactgaacaaaacatataaattttattctctgtttggtgcatttttaaaataaatcatagtgggacatggagttacagattggtatagtttttaattcacaacaaattctaactcagtgcctatagttggaaagaaacaaccagattttaaggatattgggttttcaactgaagcttatatttttttccaatttttatatttaagatggttcatcttgtccttggttctttgctttttaactgtaatagtttctcttataagttgcaattacctgcttgtctttgtctaattttacttttatgagtctatttattgaggaagaaaaatggtgatgtgtcttaatggggtttgattcaatgtttgcagatataaattaaaaaatattgaagaaacagaggccg

SEQ ID NO: 21599 - DNA, 542 bp, Glycine max
  Intron number 1 from transcript Glyma01g41140.1 (locus Gly ma01g41140) derived from phytozome v7.0 (chr-ID Gm01; pos 52680475 to 52681016)
ggggaggtggctctggtggaagtatattggttcatgctgtaaagctgtgagtatgaactacttgttaatctgtgaccttatacctgtttttcatatgatcttctaaatgactgttaagggtgcttgtagctattatttgaagagtgaaatgcagtttttttatttttggcatattaagtcacttctattagatggtgagaaaatagcaaatgttcgtaaatttttttaatgatattactggcagagaattgtggcttttgttgatgatggcatactgtataatattctgttttcatggatctgctttgacatttggtccgtggtcttttacaattgcaatggtagtattctttttcttttgaagaatgtgaatgttttttgaaatgtctttcctttgttgaaggtttttgagttgtttctagtttttaaaagtgccatgtgtatgttgaaggttttgtagggaactaatacatattgtctagtgaattgtgcttgtaacttttcttttcaacttcattttttggttgagtgtaggaagggct

SEQ ID NO: 21600 - DNA, 489 bp, Glycine max
  Intron number 1 from transcript Glyma03g03230.2 (locus Gly ma03g03230) derived from phytozome v7.0 (chr-ID Gm03; pos 3014133 to 3014621 reverse strand)
gtaaccgtaagcgccctctgctatcttttcttctcaaaatttgtgatccattgtttcgattttttgcatcatcttcatgtaaatttcataggaattataccctgtttttcttgctaatagatatggtacacctttttttttttaattagtttgttcaatttgaataataaaattttcaagtgggttggttctatactagtaactttttgagcttagattcttatttcaaaccttacattcatgagctgactgggttaatgatattatagtagtgttatgtttattttatttttgataggcaaatgttagtttattagaatgttagattttgttggtagatggatcgaaccggcgacatttttcctcttcccttcttccttaaccacccaatcaacctcatatctccttgttatgtttgttgtatgactgacctgatttcaattttttattgcagaagattggttgagtagtagtgaactgaagaaaaat

SEQ ID NO: 21601 - DNA, 509 bp, Glycine max
  Intron number 1 from transcript Glyma02g44190.1 (locus Gly ma02g44190) derived from phytozome v7.0 (chr-ID Gm02; pos 48820315 to 48820823)
tatctatcccgtccttgaaatttgcctcctttgtggtaaatttcattgctttctgcatcttcacgcactcactgtgctagagcattgggttttgaacactgtcttttggctttcaactattgctatcttttttggatagtggatgctttattttttttttctctttgattgttttggagtttgagctggtttcccctcttcaattgttgctgctttatgcggtggtttcactaacatttttttcctcatcatatttctcagatcagatgcaatttttgtttgcttgtgtgtccagatgaaaattgatggtgacattccacccgttctttagatgttacaaatataatcatgtttcggtgtacctaaaaaaagacactagtgatctgcatttttcttgtggaagttgttgttaagtttgttatgttaattcatttattgtttatttaacacatttggtgtttgatgaatttacagttagaactttggtgaaggatttccataaagggaaa

SEQ ID NO: 21602 - DNA, 969 bp, Glycine max
  Intron number 1 from transcript Glyma01g42170.1 (locus Gly ma01g42170) derived from phytozome v7.0 (chr-ID Gm01; pos 53487641 to 53488609)
ctcccttttcctctccacggattcacaccaaacaggttacactcaactttactatacactcactcctttttattatgaaaattgaaatgattattttaaccaacgaacgaacacatgctactctgtctggttagtatatttatagcgtgtttgtgatagattcatggcgaacaataatcaaatattttttcatgataaagataaaataataaataattcttttaatttttttaccgtaccaccatgattttgaggaattgaattgattcttattgtcatccaaacgcaatactagaaggctagaatttgtctcattcggttagttaatttgatagtcttttaatttttacaaatccttttatacatgcctaacttatatgtttctttcatttgaggaaatggaatttagagatggcctaaatccaaaaaggaggttcagtataaacttaactcactctatttcatgatgcggtccctaattggaatggatcctcaagttatggcctaaattgttattgtttcgtaatgtttataatggagggagagaggactcttctgttttttcttcatttgtttcccgaacttgccattggtttatcttttattttacggaacaataagaatttgccttgagaggtggcgtgaaaatttaattcatgaagattaaatcattcattttaaaatttattcataatttagtcagaccaagcaagtttaaaataactttctttcaagcgtttttctttatcttccgaaacaaataatattttagaaaattaattacgatgtttgattaacacgggaggtcttttttgggggtaataagcatgtagtgtttatttaataataatctaagtaacacctcaggtgcaattggttgagatttaaataatagaggcagtaacgtattcctgttggtgatattttgtattagataataaaggggtacaagtacgacaaagaagcaaa

SEQ ID NO: 21603 - DNA, 569 bp, Glycine max
  Intron number 2 from transcript Glyma02g13730.1 (locus Gly ma02g13730) derived from phytozome v7.0 (chr-ID Gm02; pos 12056437 to 12057005 reverse strand)
tgttgcttggttttggcattggttgtgccaatcaggtatatttttctttagattttaatttctatacactcatagagtaaagtgtttttgagggcgagccctgacatagtggtaaagttgtgacttgttgaccgatttggttatggattcaaatccagaaacaacctctttgcatatgcaagtgtgaggctacttgcaatgaccctccctcagacctttgcatagcaaggagccttcaggcactagggtatgttagtttagttttatagagtaaagtgtttttactctatcaaccaatcaaaaatcgtactatacttttatgttgttcttactctatcgatcaatcagaaattgtattaggtttttactctgtcaatcaatcagaaattgtattaggtttttactctgtcaatcaatcagatgccgcactactgacaacttttaaaatagttgttgtaaaaaccctttatactatttcatattcttttcttaggtctcaattggatcctgttttgattatagtccttcgctaaccattaatcacttgctttttcagtcagttccaatct

SEQ ID NO: 21604 - DNA, 826 bp, Glycine max
  Intron number 2 from transcript Glyma02g41180.1 (locus Gly ma02g41180) derived from phytozome v7.0 (chr-ID Gm02; pos 46343764 to 46344589)
ctcaacttggcaataggttatttcctagcccactattttcccttgtttgctttttctgcatgtatatttttccttgaagaacattactaataattataatcagtgattgttacagtgcttatttgaaatactactagactaggcttatctcaggaaatgatgaaaagctcaaaagatatcttaagtatcaccaaacgcaccaacctaattgaatttattattttcataatacatacaccccaagttgtaattctttattcatcttagggaaaaagacgtggtcccatgtctcaaacctggtagggaaaggaggcgtacataaattgtagactaagctcttttattttcatattatttttccttttttcgggattaaaaaaaaaacttctcatgattgcagttaaaattgactaaaatggaatgtcattgacgtagaaaagtaaatatgggccaaatttgtcttgtggggattttttttctgttttcgtaacttgcatggcatatggagcattttagtggctattaattcttcctttcaagtgatctccgcatagaccttatgttaatgaaggaatctttgtttctttcgcgtgttttcttttgtaatcaatactgtataatactatatattattctactaaggcaaatgttaactaatccaccagttaaaaaatttaaaataaaaatatttttattagaaaatataaaattctgctattcataatttttttcatgtttttttatgacttttagattaaaattcggttagtcatactcttttattaattattgatatttttttcttgtcatttttttttttactcag

SEQ ID NO: 21605 - DNA, 731 bp, Glycine max
  Intron number 2 from transcript Glyma01g43280.1 (locus Gly ma01g43280) derived from phytozome v7.0 (chr-ID Gm01; pos 54326917 to 54327647 reverse strand)
ctttaaggcaacctagagttattgcagaaattattgtaagttcatttcttttctttgaattttaatcaatctaattaacttagcttatattttctggttcataatataaataaatagccaacaggattgacacatctgatcgagttttccactcttgtgatttggattcaattctcagatttctccggttcacaagtgatatttaaattctactataaatcctcgctaagattagtggtcttctttgaccttgtaaggaggtgtgccttcccggcttcccctaaacttttttcaataaaataataaatattaattatttgtgttagtaagatctggttctttttctctgtttaatggttacaaaggagtccctagcaaatagggctaagagtcagtaatatgactccctagggatgaaaccaatcatcatttgcttcctaatcaagttggattgctactagtttacgaggcaattggcatatgacaagagctttttgtgtttcatttctatataatttcagtctctagatttcactgtgtttcactagtctaaatgagtctcatatttaatgtgaaagttatggtgtagaatgcaatatgactttaaacaactcataagtcagggcagatgttagagaaacacacatgccaaaatatgtacaatgattttaaaatgtgtgaaactgctatcgacagggaggaataattctcgggccatcagcacttggacg

SEQ ID NO: 21606 - DNA, 560 bp, Glycine max
  Intron number 1 from transcript Glyma01g43280.1 (locus Gly ma01g43280) derived from phytozome v7.0 (chr-ID Gm01; pos 54327825 to 54328384 reverse strand)
ctcttcttccttcaccaaccattgacgttcaacaggtgctcttcttttatttgcttcctctctttctttggtaatcattgcctttggtttaaaatattcctaccgattatgcgcactacatgcaactaaatgactggtaatgctgtgcctcctttttaacatgttatcgttaaattcagccactttccaatcaattttcttattattattgtttacacaagacaagtttattagtatattattattcaaagacactcaaaggcttgtggttataagactcataacaaatcgttgagaaatgagtgatgcatttttccaatacgttcatcttgctggacatgtttgtgcgttgcgtgagtgacttgttttgactgtgtgggagaggtaccgtctttgataagacttgttaccgtgatttggaatgtgttttcagtgaggcttacggtttttatttgattttattagtttttttctttattatcagagttacataatactataagattaacatccctgtttctgcagaaattttggtggatctgctgctagttgtggatttc

SEQ ID NO: 21607 - DNA, 433 bp, Glycine max
  Intron number 1 from transcript Glyma04g07760.1 (locus Gly ma04g07760) derived from phytozome v7.0 (chr-ID Gm04; pos 6066035 to 6066467 reverse strand)
ccaaggtatgtccataatttgattttaaaaaggaagggtagcatggtaacttttgagcatgctcaagatatttatggttatttttattgaatatatcaataacagttggcttgcttttctaaaaaaactttttttgcttcaagttgcattcttgtaactgcaggaatattgaattctatgagtgtttttcttctctatatgctctatgctctgttttgggtaccttgttatttgacttacaaaaataaaagaagccttcaattgtcgtcctcagatccttgtacttgtagatattattaaaaaaacagaatgcaacaaatcataagaagacatatatttaattcaccttattatatatatcaatcatcacaattttgtttaacttatgttattctttgttaataattctgtgtttctttgcttattgatatag

SEQ ID NO: 21608 - DNA, 1015 bp, Glycine max
  Intron number 2 from transcript Glyma05g04870.1 (locus Gly ma05g04870) derived from phytozome v7.0 (chr-ID Gm05; pos 4025270 to 4026284 reverse strand)
acaaggctcgccgcttgggtttcaaggctaagcaggtgaagaaatttttatttgtttgacatgatttttggggtttattcacctgataaatttatttccatttggttttgcgagagtaatatttaaactgttttctgtaaaaaaatcctggtggaaatttgttggaagtgtttacctataaataaatttcattcttagctggatggttttgccccaatcctccaacagccgaagcagtgggagttgcgtgtaattcattttttattttttctaattgtttgtgaaattgtgacattagtattcagggtaaacaaatcatttgaataatgcataattgagttaggtaaatttctgagactggaagataatagcgtgctggtcaagtggtggccagaagcatatgtattttctcatttggaaattgcatgtgtataaatgattggatgcttcctgagaccagctgcagtagaacaagctgcccatcattagactaagcaaatttccttattaaaaaaattatgtaacaattggtacagtttttcaccaaagcagcaagaattgtatgtagttcctatcctgtttaaattgtttgtgaaaatgtgacatgactgcttagctctattggaattatgaaaaaacaaaccttgtcagtaatgcatagttgagtttggtaaaataatatttataatttagtggaagacactagagtgctggttaagcggtttacagaggcatgtgtattttgtcttttggaaattgcatatgtacaaatgattggatgcttcctgagaccagccacagtagaatgagctgtacatcattagatcaagcaagttttctttttatcaaatttgctcctgtaacaggcagaaaccttgtaagtaatgcatggttgagttgcaccttgcttatgcctttgtccattactatcaactgggccagtcctggtagagtatttgcaccttgcttcatttgaatcttgattttgattatgatcttgtaacattccagggtt

SEQ ID NO: 21609 - DNA, 477 bp, Glycine max; identical to SEQ ID NO: 16612
  Intron number 1 from transcript Glyma02g01260.2 (locus Gly ma02g01260) derived from phytozome v7.0 (chr-ID Gm02; pos 936623 to 937099)

SEQ ID NO: 21610 - DNA, 332 bp, Glycine max
  Intron number 2 from transcript Glyma01g09280.1 (locus Gly ma01g09280) derived from phytozome v7.0 (chr-ID Gm01; pos 11172628 to 11172959)
ctgtccttggaaacaagtaaatattcaacaccactatagtaccttttatttaatgtgttttgatgttaattatatccttaattagaagactgctcttaattatggataactttattgtgatttccattaatttatatgggttggagtctccatgtactcttattatatatttaactacataaatttctcttataaaaactgttttttatgcattacgtacaggaattttgtagtagtctaatagaatagctagggatcgatgagaaaataaattatattaatttgattattctgaagcttatgttcttcaatttttttctccttttgactag

SEQ ID NO: 21611 - DNA, 752 bp, Glycine max
  Intron number 2 from transcript Glyma03g35030.1 (locus Gly ma03g35030) derived from phytozome v7.0 (chr-ID Gm03; pos 42362255 to 42363006 reverse strand)
ttactctcaacacctttgaggtatttagttctgtttgtttccctaaaatatagagaaaaaatgttagaacaaacttctttttttcgtctaatcataggtatatcatttatataatgatctttatgatttttctttttgcagaattattttttttttatttctttgtatcacatccatggacggattcagaaaagggtgctggaaatttttttctcatctttcgtacttatttaaatatttaaattttaataaataataattttaaaaaatattatttttacacataaaattaaaaataatttttatattaaataataataaccttagttgttattataataacaacaaacagataattaattttacattatgttatcactttaatcattataataaaacaaaaaatataactaattttacataagtttatattaattaacattaatctttattataatataaataaaaagtttcaagaggatgactccaacccctcttcgtctccgtctagatccatccctattaacatcaattattttatcacacattttcttcttcgtattcctctctttgctagttttatgtacaatcttttatattagactagctttaaccataagttttatacaatgttaacgtgtctaatattttttaaaatttgagattatattaatttttgttttaaatattttttcgatcatttgttgtgcatgatagaggattctggagttgtttcgccttgcaccttccaa

SEQ ID NO: 21612 - DNA, 750 bp, Glycine max
  Intron number 1 from transcript Glyma01g40900.2 (locus Gly ma01g40900) derived from phytozome v7.0 (chr-ID Gm01; pos 52559514 to 52560263 reverse strand)
agagtagttggtggggcattttcttttcagccaaggtaatagctaggaaacaataaaaaaaaaggcttggaaaagaaccactttccgtgtgcatgctgattctaccttgattcatgtgttcagttttggagaagtgagttggttttgtttttgctttggtttttctctttgccttttttggattataatatgtgcatggcatgccatgtttgccactttgaggtgtttgtttgcttcttttctgggttggttcacggttttgtgttgctgtctgacccggtttcttgtcaagttttcctgtggtagttgaagatcttaattatctcacccatgtctttgtctgtgttagtgttctgtgaaggtttcatgtcataagaaaatgagatctttacagtttatggtatgaagtacaagttttgattttctttcttcggaggaaacatgctggaaaatgagtaggaatcttttgttgtttttttgtttatttatttcagagttgtttcatgaatgatcagaacttgggattttcaaactgaaccttgttttggtttaagtttaacttctgagtttaggtgtcatgctagtgttccacatttggaagctttttaccttgtgaacaagcttaagtttctgtggatttctgcttctctttttttttctttgtttttctgtgttctgtggaaaattcaaacttgtgatctcatggatcttgcagaagggatccagtgttgatcagcaatattgatctgt

SEQ ID NO: 21613 - DNA, 664 bp, Glycine max
  Intron number 4 from transcript Glyma04g42940.1 (locus Gly ma04g42940) derived from phytozome v7.0 (chr-ID Gm04; pos 48556346 to 48557009)
cctcctcagcctcgggtgcgtgattaatcgcctagctgttattgcatggagttttatgttatacttgaatatgatataagttgcaacttgctactggagctgtaagtcgactatggttgacttttgccttttattgcattaatgagcaacattgtgggttgttattggagtttgaaaatgatatgcgtgtcctctttgtcaacttaatgttgatattgcagggttttggctctttgacacactcttctttttggtgttcagtgtttgaattcattgatgctaaatattgtgtttagtattacgcttactattgtttttgcttgtttgtagaatgattgaacataaagattgtgtcctctttaaactttactagtgctcaaaattgaattgggtgctccaagttatgaattattttctatatctagtttattttgatctgctttaaactggagatgatttttgcaaactccctgctggaaattcgtttacatgattggtctcgtctttatttttgatgttatattggctgttgctgttataggaatctagtattttcaactgatcatgattttgttttttcttctgtttttttttttggatttctttcctacttgctgattttgaataactgttattttactttactgatttatgaacagatttt

SEQ ID NO: 21614 - DNA, 525 bp, Glycine max
  Intron number 1 from transcript Glyma03g28510.1 (locus Gly ma03g28510) derived from phytozome v7.0 (chr-ID Gm03; pos 36429960 to 36430484 reverse strand)
ccaccaactcctccaaaagggtatctctttttcttcttctttctctcgttgtttcaatgtctttcccctagaatcttagggaaaaaaactaaacagatacttggatcgcattgggattaagtgtgtgtttggcttcccgccgaattacccaaaatcactttgaaatatcagctaatgtgattttaggtagatttcacatgtttggtttcgtgttgaaaaattgattcttggtccatgattaattttgagttgaggcaactttgttagcttttgctttggataaaaaaaaaaaaatacactgaattttactattaacttgtttttaaacataaatcacattactttagaatcaattttaaccgaaatcaattttgtcaatggcacccaacacatgggcactgctactgaaattttttgcatgctttgtgcttgtttttgtgtaaatgttatataatatggagtccttgtccttgattgttgacgattgcagattttagtcatattctgtgggccaggtgttgtgaa

SEQ ID NO: 21615 - DNA, 934 bp, Glycine max
  Intron number 1 from transcript Glyma01g35300.1 (locus Gly ma01g35300) derived from phytozome v7.0 (chr-ID Gm01; pos 47832905 to 47833838 reverse strand)
gccgttaattccagagataagcattccagaacaccgtatcctcctcatttcctcacttcttttcttcctctattaattaattcaattttattttttatgtaaactcaacgcaatagaaaccctaacaattaaattctttcaattagtcgttgttgttgttctagataacaaaacacagtagctggaattgaaaattacgttttgctggttattataatgatatgattcattgcagcatctgtttctttcgttctttttgttctgtgcattgcatattttacctatcttgtttgaaccattcattttatgaaatcactacatcataatcacccctattagagaaggcttacgtgttccttagcacagagattttcaggtatgaaaagggtgatgttgtttgtttaatctgaacctgtgttggtgccatcatatatctatccctatccttatggccggttgaatgtttcttctgattgcattcttggcagaattggaaaaaaaattatgtggatgaagtggtaactaagggtatgtttgatttacttctcaccttttggttttaaaaattatttttctaaaacaatttgatgcgattcaacaattatttctcatcctacatagattaagattttaaaacaggtgttttagaaaccaaaaaacaagaacagttaggagatgttttttcatcctcttttgtttcatggccctaacttaaaggtgtgtaggtcacctggactggtgttgtatgtggttagacatgagcttggtgtgggtgtctgttttctttaaattttgttttgaaaataggaatcgaatatacactctaggtttttctttgggaattctttctagcattgcctttccaccatgtttctttgactagcaactttggacaatagtctgcatttagctgcattttctgggcaagcagagg

SEQ ID NO: 21616 - DNA, 773 bp, Glycine max
  Intron number 2 from transcript Glyma01g06860.1 (locus Gly ma01g06860) derived from phytozome v7.0 (chr-ID Gm01; pos 7279211 to 7279983 reverse strand)
gttgttgatactgagaaggatttgagccgggtatgagaatctggtctaatttctatcttcaactttttgttcaaagtttaggttatttttagtgatatcatgaaaagtttatttatattctagtaagaagcattttggtaacatttcaatgtcctttaccattttcaacttggactaaacttaaatacagataatcaaaattggagtttcacctcgaatagcctatactaatctataatacatactttactacatgcattactaggtaaaacacaaattatgattggagaataacacccaaaacacctagaaaactgcatctaagctttgtcctttgtatgtattaaaactatccagccttgtttcccttctgtggcattttgattatacttttgctgataatgatgaacatcttaaatagatattggtttcccaggtagagcataggttactttgctccataatagtatatacctatgatgccaccaaggttttgaattatggttacagttgttgttttgatatggaccaatacagttagtgattacaatctatcatggttgcgaattgagattcatgctatactaagctatctgaatgagttaagagacccctttgaagatggaactatactagaaaaaaaaattaaaattgaaatgtagatgcgaatgaatgttatgatttcatttgtgtttctttccaacagtttttataattccaaaaatttacactctgatcaatagggtgaaaaactcctaaacaatcttgggggc

SEQ ID NO: 21617 - DNA, 414 bp, Glycine max
  Intron number 1 from transcript Glyma03g00690.1 (locus Gly ma03g00690) derived from phytozome v7.0 (chr-ID Gm03; pos 402067 to 402480)
aaaaaactttatctcctgaagagcagcagaccgtactagacattaatcaagccctattttatgaatgtgaagtgataaatttgatgtattattattgtacatcaatgtagtctctgatattcttctatcttcatccaagatttgcatgtactcatatattatttgttagacaatcaattattttttcttaaaattcccaacctaacaagagtcagtggtgctaagtaaggataattgattttcttcctagtttctatttcaatttgggtgagcagggaaactagtctacaattatggggttgtttgagggtcattttatggagaaataattttgaagtggaaaaatgtttgatttcccccctttttttgtttgttttagattggagaagttagaaagataattggtccaattgc

SEQ ID NO: 21618 - DNA, 997 bp, Glycine max
  Intron number 1 from transcript Glyma03g33880.1 (locus Gly ma03g33880) derived from phytozome v7.0 (chr-ID Gm03; pos 41364639 to 41365635)
aaacaaggtggtgctctgcagaaagaactcatcaggtaactaaccatattcgtatcagtcgtatgcatttcctacgtttccttctgttcaatttttcatgtgtcgcataatgaataactaccaccacctaatcatgtttagacaccttatttacagcgtttattcaaagttttgcatgattaagatcctcctttcagcaattgtcacccgaataaattccttagttatgtcaattttttttatcggtggagttatgtcaatttaatacaagaaaaaataacgtgatgaaataaattattaagtattttttttttgaagaaattgttattaaaatttatgacgtaacattagggaggcagattttacggttttttccaactaatttatattttttttatattatatgaaaatttttaaagcataaaagtgtcggatccatatcaaatttagaacttttccatcatttctttactatttttcatgcacccaaacattatcttacgaaattccttataactaactaaactaagattgggaagtggtaatcacacagtattgatttatatttagaaaggaaaaatacaactttttttatcaacgttattagtgtaaaatcttttgttattgtgacatcaaatttgtcttttatataaatatataaacttaaatatgtttttatatctgtaatataattttattttgatgttaataattaaactttacttttttattttattacttaaaatatttttatatttgattttagtatccatcgtcaattaagatttgctaactaatgaattgtaaatataattttagttataattttaaattaattgaattcatttttattttagtgttttataataatcattgcaaatatatatgcaactttcttccatcaacatcgatttagcttaccattaaatttaaaaaatttctttaataatgattcatttattcttcttcagattcttaaacgctggaatatttggaa

SEQ ID NO: 21619 - DNA, 964 bp, Glycine max
  Intron number 2 from transcript Glyma04g24430.1 (locus Gly ma04g24430) derived from phytozome v7.0 (chr-ID Gm04; pos 28106337 to 28107300 reverse strand)
cttttccttttcgcaccttacgccgccgtttcaatgtgagttatttatttatttatttttaaatatctattctaccgtgtttttctttagtttgttgctttttcatcttattccaacccaatgcaattagcttggggaaaatgtatgcattttgcaatgctgaaacggtaaaacggtacctatcaagttctacagtttcaagtgctgtaggaagtttaagttgagtttagttttgatgcattgttagtgtaatttcttgtctttttcttgtttttctttcttctgtccaaatcactttgagaaatgctaggccagactctctaacacactcttgtggacacaccctctttcattagttgaaatttgttggagatcacaaaatttagtgggtcccacatcttatttaatgactctctcttctgattttgtaattttcaatatattttaattaataagagagagtttgtatggaggagtgtgttactagcactcctaaagtgacttttgaactagttgttttgagtgatagagtaaattatatgtgcatttaaatcaaatctatttttttgtggttattttcctttgctttggtgaaatcatctacttctgtgaaaacaattgggtaaaattcctacttctaactctatgcgtgccgttataaatatttttcttttattttgttttagagatgaatgatcttttgttcaacatggtgttgttccaagctgcaagcttcaaccactttactaaagcgtaaattttgtgtttaattctgcttcctctttcatgaataacgatttgtgcctgtggattttacttaggttggatattattcagattattaaagcattatgaatatgcttggttttaagttgaattgttgaactggaaaccttgttttcattaatgttcttttggttttgatgcagacatacggagatcgaatcgtcctttccttgaggat

SEQ ID NO: 21620 - DNA, 469 bp, Glycine max
  Intron number 1 from transcript Glyma02g17170.1 (locus Gly ma02g17170) derived from phytozome v7.0 (chr-ID Gm02; pos 15488947 to 15489415)
gacttgcagccattgctgccaattgcaggtttcaccactcattcttttctttccccttttcagattgactgattaccttttttttttctggtcctgtactttttgcggaaaaaagaagttaaataaggatccaactaaataatattttgaaattataaggactcattcataaaatttcaaatacagggtctttttttaaaaaataagatttttatagtgggaagttttggtgaatctgataaagctgttaattttttattttttttttgtattttaatgtgtctataccgggccattgttaattactgacaatggctattgtgttataattttgtttggcttagcgtggtttggtttactgcattctctattttgattacgagactgaagaaatttttggtttctgaacatgttgtatgggtaatgaattgtaggaatttgagggagttggagttgcgggagagtgagg

SEQ ID NO: 21621 - DNA, 620 bp, Glycine max
  Intron number 2 from transcript Glyma04g38620.2 (locus Gly ma04g38620) derived from phytozome v7.0 (chr-ID Gm04; pos 44979787 to 44980406)
atcaagtcttcctcatcttccccacctttttgaaagtgggtatatatgtccagttaattagctctaaattgtatcgactttatttagcaaccaccttaattttcatatagcttgatagaaattcaatttgtggtaaatttataatagtccctcaaatgcatgcattttatcagtaggacaaaaatatagttctataagtgttgtttattttgttcttgaatcaaaattaaagtttcacctagataatctgcctgtctactgttagagttttgtctcgatgataagtttaataaaaaaaattgtattaaagaatggtggagcttataaagtatcgatgaaattctaagtctaatcagagaagagcacaaacaacattttaggaactatatagtgagtataggttgaacgagaatacattctcatgcaagaaaagtaaacaattcagagtttttgactcatctgctctttggaactctaatcaaacacacacatacaagttttgtcatgtcttttgctattattgatgttagttgtgtgttgtgactcagatgtttatgcaacatgcttgtttaattttgttggcagttttggtgtctaagaacataacctaaaagctcaag

SEQ ID NO: 21622 - DNA, 980 bp, Glycine max
  Intron number 3 from transcript Glyma04g01810.1 (locus Gly ma04g01810) derived from phytozome v7.0 (chr-ID Gm04; pos 1207264 to 1208243 reverse strand)
tagattgcagcctcttctgacccagcttcttgaaggtactaagactctaatatatattgcagcataccccatgttgtgtggctaatttgctcattattttatattaattcttgagagagagaacataatttgctagactaccatattacacattttcctgttaaaatggtgtgcatggtttttcttttttcttatgtttttgaattatttggggggtaatatttcttgtatggatatttcaaggatctcatgaagtgaataattagaatgttacaagacactttggctttccattgattcatatcatctggcgatgactttgaatcatgatatttggatgaatgatgaatcagtacaatttcatatcaccaataagaataagatgttttgttgtgatttttttctttctttacacagccaatccaggcctggataaaaggatgattgtgttagaaagtcaacaggcaacatcaaactttgtcaaatctttaatgatattgatcaactttttgtttcaacattttttattggctcattggaatatcttcttggtggaaaattgcttccattaaaatatttcctggaagaaaatattttcagttctgttgaatgtaaaacatcatcttatattttccacagtttcacctcttcaaataatagagaagtgtttcctggaaaatgttgtctagtccaaacaccagaaattatacagataatgcaagcaattagaaaatgtgtgattaccaaaaatttatcaaaaatatatttgccaggaaatattagagaatgtagccctaggtaaaattgcagtgtggacataatgcaagcacattccatttaattttgattaattatttacatcaactaccctaaatatttggaatcatgaccggtcacttgcttgtataacttcatgttcctatgtgggtatcatgtttttcattaaaatgtttgcaggtccaccagaaaccaaactctcc

SEQ ID NO: 21623 - DNA, 1022 bp, Glycine max
  Intron number 2 from transcript Glyma04g40220.1 (locus Gly ma04g40220) derived from phytozome v7.0 (chr-ID Gm04; pos 46335236 to 46336257)
gttgctgattgttttcatccgccagcatttgcaaggtatcgcttcttcagtttagttttgttgtctcgacaattggtttttgcatcaaatgcaaagtacgtgttcaactcgttggattggattggatttatattgtatgtgctagagtttgaggatgtgggtggagcaagttgtttaacttagatattagagagattgtatatggttgacttgttggcaatattttgatgatattgtaacttgtttggggttatgcttttttgcattatgctcttgatacagatacttttttcttcgatatagcattcctttgtctgcctcttgtatttggaggcctgtcaaggttttctcatgggatgtgcttaggggaataatagtctgttaaagaaaggttgcttgccttgtggaggggatgaaaactatgaaattagcattcactaacatacgtgctacccaattccccaattaaattattttttgatgtttctgctgccatgtggctttcaacacactatgttattgccaaggaaagaggtagagtgaaagaaaagattacccgaaacagtttactgcttctcctacttggagcctggaggtgcctctcctttgtaaggaaattggactttccctatcataagagatgtgaagatgattttgtagagttaattcagagataatcttgatcccttgtgtttttttaagatactatttgattatgtcagttttacttgatgaagaatactgcactgcatgctttgtatgttccctgtgaccgtgactgtatcttatcttctttaaatttcatcccttctgaatagggaaagaagcaatgtggttagttttttgtttttaatatgttgaattggttgactacagtttaggagagtggcacactggttctcatgcatagtttcagtttgttctgaatttctacttttgatttgactctttccacataactttgtgatattcatttctgggaacttgcaggtttctttgtcacaatttgtatatcagctgtg

SEQ ID NO: 21624 - DNA, 426 bp, Glycine max
  Intron number 1 from transcript Glyma02g15230.1 (locus Gly ma02g15230) derived from phytozome v7.0 (chr-ID Gm02; pos 13742448 to 13742873 reverse strand)
gcccattttaccttaacgatacactaggtgagattttcttcattatttgtcaaaaactatggttaaagtacctacatgcatatatatatatatatatatatttgacatacatgagaaatgttagtactagtctatttgctaaaaattattattaattataaattttggtaagtcttattttttgtttaatgttgtatgaaaaaatatatgttgaaagaggtcaatctcttagataaatttctgtacctccaatgattagtctttaactttccacaaagggatatcctggttcaaaaacaaattatctatatatgatattatatagtcaaaattaaatcttctacactttactaaatacattctcattatatttaatactcattaagatatccatctgcgtttaaatttgtggtatagtgttcaagt

SEQ ID NO: 21625 - DNA, 805 bp, Glycine max
  Intron number 3 from transcript Glyma03g23970.1 (locus Gly ma03g23970) derived from phytozome v7.0 (chr-ID Gm03; pos 30631348 to 30632152 reverse strand)
ctccgtcaaaagacagaataaaacaagtcatcacggtaatttaatgtgtcataatgggatcaaactaagtattctatctacttaaaagtatgaaaattttacactggaaataaatctatgcaatagtgttttctgttttaaccttgtaatacactatatacagttttcatctctttaataataggttactaattcgtttacttcaatttaatggcaatggagagtttgaatatgagaagcaatcctggttgttcatctattaacttgtttatggtagagttttgggttcatttgatagatagttgtgtcaacatggaaaatttgagacatagttttgggttcattttggaaatttggatgcagaaattcttctattttgtagaaattgcataatgcatgctagtttgttaatttctgagatgcaagccaaaattagactgagcatgccattgcacaaataatcaaaggtgttctgtactttccattagagctttattataccttcaacaagctagctgttgcgatctatatacgaggccttatcattcttttcaatcggaatcaacatggaaattttttattgtgcaagttgaaaggctcattttcatttttctataaatcttctttctctttgtgcttacctatgttaaaattcaactctcctaagataagctatatgtacaactttgttaaggccaacagaatttgtcaattgcttcaactatattgaattttttttcctgcatattataattaatggtatgttggaatttggtgtgattcataacaaatttgcagttctgtg

SEQ ID NO: 21626 - DNA, 243 bp, Glycine max
  Intron number 1 from transcript Glyma04g35230.3 (locus Gly ma04g35230) derived from phytozome v7.0 (chr-ID Gm04; pos 41571415 to 41571657)
gagaacgttacttcattcaaaagcagcaacagcaggttattctttgtttcttttcgttcttccacagccggtaggtactgttttcactctcattgtttgaattcttctctgtttgttttaatggcactgccacaccgtatcattaccctctatcaaacctaatttcgccccttctctttatgaatgaattcattgaatatacgaacttagggtttttaaataactgcagattcggctttgtcc

SEQ ID NO: 21627 - DNA, 1007 bp, Glycine max
  Intron number 1 from transcript Glyma02g07210.1 (locus Gly ma02g07210) derived from phytozome v7.0 (chr-ID Gm02; pos 5741371 to 5742377 reverse strand)
gagaaggattattcagaatcattttcttgccaacggtactttcgcctttcttgctaccttgggtttctactttctactatgttagataaatgctatattaatattggcacaagagaggaagaataactcaagtttttttttttttttggttgattttctagctaatcttaataattaaattggaagaaaataaatgatgagataaaaaaaatagctctaatgattctcatactattattattaggctaaaatatattgttgtactctcattattttatttgttttatctgggtcccttacatattagactaaattaatcttactaaatactggttgacatattatcagaccaaattagttttttttcccaacaatttatcatacaaacggtgttaattttgctaatgtcatcaagtttgaatgaattaatataatcaagggcgtcagactcctcggttggttgaataatgtgtacaagtaagttgttataaacttcttgattaaaaaaagtttgaatgaatattataatatcactgaatactaacatgatgttgataaaggtctaaaattaaagtgaaaccttttaaatttagaaacaaccaacagaatttacacaaactgaaaaaataatacaagagaaaactatttctctattcttagtgcaagttttaaccaggagatataaggcttgttgggttgataacaaagaagggaaggagggaaaggtcgcaaatttgatccctgttaacaaaaattaacgattaacatttgccaataaaataaatctgcaagttttaatcttctgaaaacacgtaataaatatctaaagttgtagttgtgtcctctgagtttaattagatatacgaaactatgatatatatatatatatatatatacacacacacactcctcgtgcttctgtggagaacagtgttatagattagaagatgacttttttcttttttgtttcaggtgcttcaagagtcagggatttgcccccggagcag

SEQ ID NO: 21628 - DNA, 836 bp, Glycine max
  Intron number 3 from transcript Glyma04g05910.1 (locus Gly ma04g05910) derived from phytozome v7.0 (chr-ID Gm04; pos 4500072 to 4500907)
aaacagctggaaaatctgtgagttcttttgagctttctatttcactgaggttttgttttgccccctaggctgtgacaaggttttttttttttgctaaatgtgttctcagaattttgaaaaataatcagctaattggaccaattccttcaactctctctcaggttcctaacttgaagattctgtaagttatttttccgttttctcttcagaaggatgactttagtatccataactatcattcactaaattttgaaaactggttctgttctagagacctggcacagaataatcttagcggggagataccaagacttatatactggaatgaagttttacaatatctgtgagcactactaattcgcaatgaaacctaactcttaattgacttatttatctgtgcttcttttaggctctatgctgtgttcttgctgtcaatctttgtttgtgtctttccttttcctatgctagtggcttgcgaggtaacaatttggtgggttcactttctccagacatgtgccagttaactggattgtggtacttgtaagttagaacaatgactctctttttatttctaagccttgaaagtttacatttccttaaacaaaatgtaattagtttcatcataccattttgcagtgacgtgagaaacaatagcttgacaggcactattcctgaaaacataggcaattgtactactttaggggtcttgtatgtatatccaactgtatctgtgtgaccgacttcgcttcaccatgtcttctcttttcttttttaatatattctattaatgtcacttgtcagggatttatcctacaacaagctaaccggagagatac

SEQ ID NO: 21629 - DNA, 992 bp, Glycine max
  Intron number 1 from transcript Glyma03g03830.1 (locus Gly ma03g03830) derived from phytozome v7.0 (chr-ID Gm03; pos 3696918 to 3697909 reverse strand)
caccaaatctggcactggcaactatctcacagcaggtgagttggtacaatgtgacatttttttattataattaaggcagaatcacctctgactgtgttttttcagatttgttgggagtctcaaactctcaatctatatatatatatatatatatataaaagttggtcatctcgtttacttaataaaataagttagttggatcggatcgcataattcacaataagtcaagaagtacatcaagttaagttcacatgtgagattacttaattgatgattatacttgttattatggtcactgcttatcttggttgtgtaatggaaattatgttaataataataattatgatgacaaaaattatgataattatgatgataataataattatgatagtaataatgattggttaatgataatcataaaaaataataacatgataattgagattttatcaaatatgataatgtttttacagatttaacttttattttgtgattattttttagatttgatgattacatgaatttttaagtactgacctagtgattgatattagtttatctcacttttacacataggtaagtatttttactagagtgagattatatatatgaagataattcattttttaaattttaataattgaattaattattcaccaaaattattatatcatatattattctattgtagaattaattagttccatttttcccttaatgatatagaattactgatttagagtatcatcgtagtaatttttatattgtgcttgagttttcatcatataattattaatttatatgttgaattgtaggtgcacctcttggatatgtttaagttaagtttattgacatagatatagccatattagtcgttagtaaattttttgaaacgtgacagaatttgaattgttaaaataatcgtatatgacaaattttaaattattatcaatgtaggtgaggaaggagaaaccagaactatccttgggtct

SEQ ID NO: 21630 - DNA, 949 bp, Glycine max
  Intron number 3 from transcript Glyma02g16170.1 (locus Gly ma02g16170) derived from phytozome v7.0 (chr-ID Gm02; pos 14580384 to 14581332)
ctttgttctttgcttggttagtcgggccctctgaggtaaggaacccacactatatatagttttatgatgagtacatgctactgatcctatttattattaattgaaagttgaaactcatttaaatagaagaaaataattaatttaaatgtcatttttaagatgattattaaaattaatctctttataatttcttaactgttctcttgaggaaaattagttttgatttcagaataggaagtagaattgcccaatagaagttgggataagctaaaccacatccatgttgttgtggacccaaaggaaaatcgggatcttatgcacgctgagtgttgatccacgactattactaagacgtctcatttttcaaataattaataacaataacgtatttataggtttgcacattgtatttatttttgagaatgagatttttacatttttcactcattcgattaatttattttttatatttttcttctctcattacaatttaatttatttatttctgatctttacaaacttatgagagtgatatcggttattttaaataatcaatttttcttaaaatagattttaagatttgttctaattaaccatttgaggaaggtacagttggagtacatttcatcaagcatgaaatacaaacaaccttggggtcctacggggaacagaatagaatgaataaaatttgagaaaaggactatgcattataatataaaattgtgttgtactgattaatacccaagacatcatgcaatatgcgtagtaaagcaatcaattcccactttttgcatatataaataatataatggacagccatatatatatatatatccttttactttcgaagctatgttttgttcattcatcaatctaaaaagattaattaatcccattagtttcaccatgtgaaggtgagagaatcagaggtggaggggagaagagaaag

SEQ ID NO: 21631 - DNA, 492 bp, Glycine max
  Intron number 3 from transcript Glyma04g35120.1 (locus Gly ma04g35120) derived from phytozome v7.0 (chr-ID Gm04; pos 41465466 to 41465957)
ctgctaaacggaagaactattaaactaggaaaaaggtgtcttactacctatgataatgagaacacaaatttgcttaccatctaaatgatattttctaatacattactaataattagttttcctaatatgacacttattttcttttggccaaaacttcgatgtagttctttagatacttctggtgttgttttccaatcaaaattaaaattttcatctctataatcaccgtagtaaaagtttgtattaaaagtcaacatatattatagagatgaaactctttaggacttgtatataagtttttcctttccttttatgggatatctctaggtcttcaatttgaattttttaaggcccaagagcagttttcagtggaactagggtctgcaatgaaatgtagcctagaaagaataaatctaaccatatgtttgtcttcacttttaatggttttaggatctcaaagtggccactcttttgactggggaagcagactaa

SEQ ID NO: 21632 - DNA, 946 bp, Glycine max
  Intron number 3 from transcript Glyma02g42130.1 (locus Gly ma02g42130) derived from phytozome v7.0 (chr-ID Gm02; pos 47189535 to 47190480 reverse strand)
gacaggtatgttcatttgtgcaattgttattagaatatggattagttacctattttctgctaagagttagttacagaatagttctataaataggagatcaaagtacaaagttttgtatatttttcaatgtttttttcatgagatctgtctttccattagaaacatttttccccatagcagaagctttctaggaaaattatgaacctgatggatccacgtgatataattgtggtccattatcattgaacccagcaaccagcagggacactccaaaaggcctaacaccactagacacagtaaattcctgcattacagtggcaacttccctggcaagttgagtggcatgaattggttctttatataactagtgatactgctcagcttgtttcctgctttttccaacctacacttaactcaactcacttgtttcctgcattgtagtgaatttgcaagctacctgtgtgaccagcaagcctttagataaaccttttccaaagtcatcaacattatcaaacaaacctagtttgtttagacgatgtggcaatgacttcttaatgagtattggtaatttattattttttccagttcaggaaaaaaaacacaaaactttgtacattgatatcctatttacagaactattcttcaactaattcttaatagaataggtaattaacctatgttctaatatttggtgcatatttttaagaatcaatatatattgtgggatgtcatattggtctattgcaaataccttaactttgaagtgacaaaaaattggtttttttagcttctgaactcgtatgaaaggtggtagatagttccttgtaaacaattttgcaattctttagtgctattgctctctcactttattagttgttagttcttcattgttaaatttctctgcactacttaccagccagcttcaccaactactttgggaaaggaa

SEQ ID NO: 21633 - DNA, 325 bp, Glycine max
  Intron number 3 from transcript Glyma03g40620.1 (locus Gly ma03g40620) derived from phytozome v7.0 (chr-ID Gm03; pos 46324382 to 46324706)
aaacagagcgctctcgtaggtctgcacacctggaggtttgtgcttaattgcattaaaaaaaaattgactaactgaacatcttgtgttgttttctttaatctcgctttctgtgcttgtgttctgctacatggttcctgccttcgggctgcactttttttgtgcatgtgtgttctagaggaatttcattttctaattggctgaaagaagtttcaaacctctatgaattaggctgtaaacctctgtttctcaaaacatttgatatgaaatattttggtgtatgattcagtatattattcatttcttcttcttcttttgatctgtttag

SEQ ID NO: 21634 - DNA, 479 bp, Glycine max
  Intron number 2 from transcript Glyma01g05680.1 (locus Gly ma01g05680) derived from phytozome v7.0 (chr-ID Gm01; pos 5435864 to 5436342)
ccccaaagtacatagacaagaccattcctgctaatgtaagtaacaaaacttactcaaacttaatgctgtgtttagtgtacgcatttccctcaacgcaactggtgttaagaaaaataaaaagcttcccacgttgcttttggttctgtgtcctggaatgcgtggtttttttcggttaaacttggttttattgcttaaccaaacacacacataaaagtctgtctggataccaagccgggggagtgtttttgagatttttttatattaaaaaaatgttttatatttagtagagaaagatctcaaaaactcttgtcacttgtatccaaatatacccttaaatctattttttagggagttagttacgagtttcaactttcaagtgtttgtggttgtgaagatcatcaattttcggacttttttaattaacttgtttatgaacacatgcaggaatcttgggctatctgcaggatattcaagaaaat

SEQ ID NO: 21635 - DNA, 768 bp, Glycine max
  Intron number 2 from transcript Glyma02g08050.2 (locus Gly ma02g08050) derived from phytozome v7.0 (chr-ID Gm02; pos 6312592 to 6313359 reverse strand)
cgcttggtgccacggactcgtctcttgcggtgaaggtgagacagataaagattgttgtataaatagaatcatgcgtgtttgatttcacaatggagaataattgattccgagtttaaaattgattttaaatgaattttacacgttggagaataatagatgattctgagttcaaaattaattttaaattatttttcacatgtcaaaaaaaaagaaaaaaaattcagaattaattattagttggagcaactttagccagtcttgcattgcataaaaaaaattaggtttaaatattattttagtatgtgtaatttaatgtttttttcattttcgtcctttcaacaaaatttcgttctaatcctgttaagatgtgtttgttttattttttttttatctttaacatgacatttttttcattgttgaaaacattttttactgttcaaaaagtgctatttaaaggttttaataatgaaaaccaaaacaaacatattttataaggactaaaatgaaaaaaaaaatacaatgacgaaaataaaaaaaaaattactaaattgcaaggacgaaaaaagtatttaaactataaatttatattaaattttactcataacttataacaaaaacattcaaacaaaaatcaaatcaattcaaaatcaattttaatcaaaattaattttgcagcaattatagaatagaatagaagattgttttaactgtttgtttagtttttgttcagaagaaagcagcagaggtgtcttctgagctcaaagggac

SEQ ID NO: 21636 - DNA, 398 bp, Glycine max
  Intron number 1 from transcript Glyma02g12650.1 (locus Gly ma02g12650) derived from phytozome v7.0 (chr-ID Gm02; pos 10949242 to 10949639 reverse strand)
atctgctcctgctcgtttttctgttctgcacgttggtaatgtttttctgtttgtttcccaggaaattttcgctgaatattttcttcatattttattgcattcaaatttcaaagcttatctttgattttctgaaaagcaaaacgatacccacatgttatttccggctttcatttctagtcctaatgcttctcgctatacccagataagaaatgattcagttgaagtccaatttgaccataattatgctaattttaagggaaagattaaatctttcctttctttttttagtgggttatgaattattcgaatttgcagattatggttttgaaccttcataatttcccctcatgtaattttcattagtgcaggaacattctcttcagaaaaagggtgaattt

SEQ ID NO: 21637 - DNA, 726 bp, Glycine max
  Intron number 1 from transcript Glyma04g01740.1 (locus Gly ma04g01740) derived from phytozome v7.0 (chr-ID Gm04; pos 1161888 to 1162613)
ttctcttcccaccactttcgctataaccaaatctggtaacctctctctccaattttttttttctccttttcaacattcttcatcaattttaacggattggagcataaaataaataacccaggcgcattcccctgatttgattagctacgtgggttcttgttccagggttttcaaattctggtttctgccttaacgatgtcagtgtttcaaaaatgtaatttttctttgaatttctggattttttttccctgttattctttcatgattgattgggttattatcacctgagattgctcaacactcatttatgggaattccctgtcttgcccccattaattttatgggaggagtttttcttggggtcagtgttctgtaacaatttggatttcagcatgctacaatacaaatatatagcagtatggttgttacttgttacgatcatctattcacttacagctataaatcatgctttacctatatcaattcttttccccatgcttggtgggaagggggagattatataaagatttatgtatacttgtttcatgcaatgttgccatgcttctattcaatatcactcgcttgctagcttctgcactctggcaaaagctttggctacaactagactcatctatcatttgtgtatgttttttcctaactgagcgtctactgttgcaaaaacttttgctagcatcctccataaacaaggtggaccactctctggtc

SEQ ID NO: 21638 - DNA, 494 bp, Glycine max
  Intron number 2 from transcript Glyma04g01740.1 (locus Gly ma04g01740) derived from phytozome v7.0 (chr-ID Gm04; pos 1162677 to 1163170)
accagaaggcctctaacaattcaagctacgtataggtattctctttgtttttctggttttgttatgacaactttaagtctgcgtgagtacagtaaatagctgccaacaatggtcttaaatgtcagttatttatttattcaaacattggggcctgtgtgtttcattgttgtgctataactttctccttcacacatgctataactttcttatttatacactgaaaagtattttatctttgttgtttggtgggaacatatggagaaacataaaaacatggtgaagaaccgttttaggaagttgaactttttagatatttatacatattgtggaaggtgatagtatagtagtggtagttattgttgtttttgttattatcaggtgccatcaaatcactactgcaaatattcttgagttaaaaaaaaaaaattgatcgtggaagttgttagatgaatttgttattaatttgacctactacttgttctggaactacagtg

SEQ ID NO: 21639 - DNA, 914 bp, Glycine max
  Intron number 1 from transcript Glyma05g03480.1 (locus Gly ma05g03480) derived from phytozome v7.0 (chr-ID Gm05; pos 2669719 to 2670632)
gtttgccagaagcagtagcgctacaaaaacttgaggtagttttcttttccttttttttcccctagttataagagtgcttataggttttaattgggatcgaaagaaaaaataaagtaatggaatttgaattttgaatacagttaatcgatcaaagttagggttttatgccttgttcaatggcttcagttattttttaattatttattagtgtttattgcttttgttgtaaattttgcaaaagatgatcgatttgcgtacccatgttctttctcttggtgaaatttgcagtcgtagttaattgatttttattctttttcacatatatggatagattgtccaatactttttgggcggtttgtagttagttctacaatgttggttttactagcggtacaatttgagtgctgataaggtgaagagcttgatcttaccactgcaattttcttcttcttcttcttctttttcttttttttaaaaaaaaaacatgatatggggttaaaaatgggattgcagacaggcatcagccttaaggcaatatgttaaatgctagttcttgtagatgagcaatgagggccacctaactttaatatgctttgaaagttttgtggcatatattatgaccaagctgatatgggtctctagtttagccgtttgtctgacctctcggatgataattgatcagatgcttacacatgagctcttggaatcttattgcttattgcaataagattctttttataagtgatccattacttggtctacaaagattttctgattgttatcctttaaactggtatctggtaactggtttatttgtacagaacaagttatgtttagcttatgcaattaagacttgatacattttcagttatatatctcctcttcatttgtaaatattgtttcatgtcaggagc

SEQ ID NO: 21640 - DNA, 1004 bp, Glycine max
  Intron number 1 from transcript Glyma01g36260.1 (locus Gly ma01g36260) derived from phytozome v7.0 (chr-ID Gm01; pos 48743490 to 48744493)
ccaccgtgtggctcgcttacgatactaaaactgaggtatgtttcataattcatacccatcttccttttctttttctttttcttttgtcgtttttttaattgttttcttcaaaagatgtcgttttgagactacccgtttttgttttgggttctgggtctgaagatttcgttgtgtgtgttttgttggttgaaatttgcttatgttgtggaggttccgagatcttcggttttttgtttacttcctcctgacatatttatgatgtcgttttctgtttgagattatttggcttcttgatgtggattgccactacggctctatgaatctacgattccttattttgctcagcatgtgtcacaaaatgaaatctatgcatgttggagtagcggaaaatggcgaatggtcctcacaaaacgtgaccacctggtttcacatggatgatgatttgtctgtatgtagaggtgcaataaatgtgcccctgctgcgcctgtttggtgcttttgtgtattaagcaccttggtaaccgtgacattcaattgttttctgtgtttaatagatatgtatttaacttagttgaacgtgtatatggaatggtaataactaattatcgttatgaagttagattttgattcggtgagtgttaaaactgacgagacttttatgataactgccatctttatagatccaaggcttgtcctaccgtaagtcacttaacttgtaggatcttgctagagcatgaatttagaaagcaaaaaagggggcaaaccaaaagaaagaagaaaataagattaagttgtacagcatataaacaaggacactctccactgatgcaagtggggtggttcctcggtgaaacaatagtcttctgggcactgtctctaagaaccatgtccgagttcatcctttgttcatgtatttatgtttaattcaaaaaccttctatgaaggtgaaacatgtatgtatttttttgtatcttatctgattttaagattgtggttttcagtcat

SEQ ID NO: 21641 - DNA, 466 bp, Glycine max
  Intron number 1 from transcript Glyma02g47510.1 (locus Gly ma02g47510) derived from phytozome v7.0 (chr-ID Gm02; pos 51074458 to 51074923)
tcttcttcaacaccccattatcgtctccaatctcagttagtctttttttttttttaactgtgcttatttttattgcatctgttttttttaagaataaatttaaattatgagtataaattttgggggttttagttaaaaccttcgatctatgtgcaaaagttttaggttttgtcaaatttaagtgaatttggtgctgattgaaagatgggtcacctctcccctttgattaatgttttattgattttgaaattggaagatttaggaaagagacgggaaatgtaaagtttaatgctttatgtggaaattcaaaaatgtgtttcaatcaactaaatgctacgatctgttcattttattccataatttgggtctatggaatggagggtgtttggatctcagatgaaagttttgtgagttttaaaattaaaattacttacttgttctttttgttccaaaactgttagcagac

SEQ ID NO: 21642 - DNA, 677 bp, Glycine max
  Intron number 1 from transcript Glyma02g19380.2 (locus Gly ma02g19380) derived from phytozome v7.0 (chr-ID Gm02; pos 18394293 to 18394969 reverse strand)
tgtaagacagtgacccaactaggtgcaacccttaactcacattggtcttctttttctttgatatttagaatcaggcaatgcttgcttagttatcgaactggttgcaccttcatcaaacatttgattgaagtttgagacatgtttgaaagattttcaaaacctttcaatttttgcaagtattgtgtgacacaacacaacaaagataatggaaataccttgtaattttctaggatggaatgctaagcaaaagttttgctcactgcccattattagatttaactattttgaagacgtttgtttctgatggagtcacaatccaattcaatgaaacttcaattttcctcttaaacagatcatgttccctgactatattactctgtaaattctttatccaagaacatttcactgccaacattgtcattatcatctatgaaatgcatcaactttctattttttgacattgtgcatgcatgccatttaaacatatatcatttccctagcaaggagacatgcattagcatatgcaaaatccgcaccaactctaaccataactgttttgtcgatttcctctaactgaatgaaaaattatactccaaattatttgcactgttaatatcaaaataacggtgttcatatttataggtgttgagtcatttgacattgatctgaaggagcag

SEQ ID NO: 21643 - DNA, 504 bp, Glycine max
  Intron number 2 from transcript Glyma03g31890.1 (locus Gly ma03g31890) derived from phytozome v7.0 (chr-ID Gm03; pos 39723851 to 39724354)
tttgatcggtatgttaattattatgcaaatacctttagttttacaattatagagttctgtcacttgatcttgtaatctgttcataatgtgtatgagtttttatcttctatgctttaatcaacaaattttctgtttagactattttcaggaaatgatttgttggttggatcgatgcaatgaccatttagatgtaggatggtgccttgtagaaggttacaattgatatttagatatttggtgattcttaagggacatttatttttgtgatattctgggcattgttcttgtagtttcataatgggataacatttgattgtttttatcttttttatattttgtgtttgtatttcacattattgcatttagattgacttatgtggtaaatcagttcagcagttcatttgacaatgtgattatattatactctttccaatatttatattttcctttgacctcaaatttgctgtagaaacttttgtgtcagaagggattttgtgtcaaatc

SEQ ID NO: 21644 - DNA, 268 bp, Glycine max
  Intron number 1 from transcript Glyma01g37680.1 (locus Gly ma01g37680) derived from phytozome v7.0 (chr-ID Gm01; pos 50000762 to 50001029 reverse strand)
caaacaattccttagttcaggtataaatgcatgtttaataacaagtaaaatctcatcatcttctactttttttttctccattgcattcattaattggcaattaattttatgttcatatatatgtttagacaaattaatttttgctagctaggttaagaaactttgatagtaatagcaaagagctatgcagaaagtttgatatttattggttggaactgatctgaatgaatgaatattgcagcaaaaggtgatttgtttgacaaagggt

SEQ ID NO: 21645 - DNA, 200 bp, Glycine max
  Intron number 1 from transcript Glyma01g36950.1 (locus Gly ma01g36950) derived from phytozome v7.0 (chr-ID Gm01; pos 49347455 to 49347654 reverse strand)
actatagtgtttttgtggttcgactagcaatcgtcagtgattttttcccttaaattttgctagtaactcaaagattaacatgtagaaatatattcttatttcttacttatattagaaattacataagtgaagccaagaaactagttgtgaagaaaagactgcaaaatcactaaccacactattttgttttcatgcaggtg

SEQ ID NO: 21646 - DNA, 296 bp, Glycine max
  Intron number 1 from transcript Glyma02g47520.1 (locus Gly ma02g47520) derived from phytozome v7.0 (chr-ID Gm02; pos 51083438 to 51083733)
tttaatcttaacccaatttttactctcgcaaagtggtaagcatatttagtttatattatttttttgttttgttgtttctctttcaattcaataaattagtccttgagatcttgcaattggggcttcccttttagcgggttgtccaatcttctccttgtcagatcgacctttattgtttacttaactggggaaagttttttatgatttttctcgacaaaagatgtttttttttggttggggattttgattatttgtttggtctgtgttcaggtgtatttggggaagtttgatttgaa

SEQ ID NO: 21647 - DNA, 797 bp, Glycine max
  Intron number 4 from transcript Glyma05g03880.1 (locus Gly ma05g03880) derived from phytozome v7.0 (chr-ID Gm05; pos 2989561 to 2990357 reverse strand)
aagaagactaagaagctcccaccagtctggaagtagtaagtaccttcccacccctcaccctactatgactttcttgttattattttatcaatggatttttagttgaatagctgattattatgttgtatttctatgcttgagctgtggcctatggcaaatggagtggaaatgaagggaagtggtttggttcatttttcccctgcctatccaaacacagtattattaataaatttttccctaggattattaagttatttaaattctgtattctgtatactttgattctgtttcggaagcatgttttaagtatttatttgagatggaccacattagtaagtatttgttttagatggaccacattagtaagtatttgttttagatctattttttacctgctggatgtgttgtaaaatggtcaaaatatataagattgtcttgtagatagacatactttcctagaagtgttggtcgataggtgatgcatacttgatattatttgatatagactttcctagaggtgttgttattcaataggtaatgcatacgtggtattatttggatatgttacatatgatgatcttctaaattaaattatattgattttcactggtagttatgtattttttgttctaagtgcacatgtgtatgatgttttgctgaagtctttgtgcatttgtaatttgaatgccaaccttgtcactttttttttttatccatgtgcactgtccctttcgtgctattaatgacttgtgaattttgcagcgaatcaacaactgctagcactctggttgcttaga

SEQ ID NO: 21648 - DNA, 806 bp, Glycine max
  Intron number 2 from transcript Glyma02g08180.1 (locus Gly ma02g08180) derived from phytozome v7.0 (chr-ID Gm02; pos 6410458 to 6411263 reverse strand)
attagctcagaaacaattggaggagtcggtggaacgtaagttataaacttgaaaacatttctttcctttccatagattattttctttcgtctcttctctctcttttatctaatgcatacattcctggctaattacacaatgttgataaaaatgtctacgtgtatagttgaagaaatttttataatactctccactttgatacggttttcaaattcgtttttgatttgtgctactttgtttactattttttatgtgattagtattcagataatggctaggttgtcgcagctcttatgttacattagttctaaagctagtatcttaagtgctttgcttatgttaacagctgtttgcaagtttgccagttgccacatgttttttctattaaattaaaattctaatttggtgtggctctgtcaaacctaacctgcactatgcttttaaaagaaatatctgtatgattaggcccttgtcttttgccagatcatatattcacattgctcttatgtgtctcctgattctactcattatgatttctgggagatttttctcattttattttttgataaaattttgttcttttttattgtgaatttgcatgataattgtgtaatagtcacttctactctgtaaatattatataacacaattcttatcctgcatttcatccttttcctcactcctctctgctgatgatagctaatcaagttcaactactaagtagttgatgaaaatgcttattttttttattttttatttttaatttcaaaggtgtgttattcgtggttgtgttcccaaaaagattt

SEQ ID NO: 21649 - DNA, 601 bp, Glycine max
  Intron number 3 from transcript Glyma02g12580.1 (locus Gly ma02g12580) derived from phytozome v7.0 (chr-ID Gm02; pos 10848267 to 10848867 reverse strand)
ccacgtgtacttagtgttttatgttgtgaagaacactagattgattttcttcccttatatgagtcatcttctcaaaactcaagaaaggaatatctgcatttgagtctccatgaaagtgtagatgatatatgtttacaattatatattcatatggccctaaaatcataaaatagggagaagaaaaatgaacatagaatttaactgatttgatcaacaaagaattataggcatactttcatggatcaaatcaggagaaagttcactatgttgctaaagattcgctaaactttgcatgggttacacacttacaccttgagcctcttttttggatcaagtcacatgttaagccaagcccattaaagccagtttataaaacataattgtcaatgcctctccatagtctataaatttgagttattccctaatggtaaatccttctcacttcagttaactgaattgattagctgtcaataaaggaaaaccttgtttcttattcagcttatgtgttgtttatctgattggattttgactaatctaccttccattttcccttgtacgtatactaggttctgcgccactcggctgattccatcaatataaa

SEQ ID NO: 21650 - DNA, 846 bp, Glycine max
  Intron number 2 from transcript Glyma02g45780.1 (locus Gly ma02g45780) derived from phytozome v7.0 (chr-ID Gm02; pos 49931375 to 49932220)
gctttcatccgttctgcactttgtcgacatttcaagtaagccccctcttttgtttgctccttgttacctctattttctaaaattatcgcggatcctttgaaattgaacgcaaatccgccgtgccggacactcttcgatcaccctcttgccgccgccgacctccttctttttcatttgagtgccgtaacgttccaatagtagcggcgtgagctaactgcataacagagaacttgggtagatgggtcgggtcttagggttttagcctctcagggtgtatttttttatcttttctaatcttttgggccttgggcctcaagtccaccgtttctgtttcatatttttaagtgtggctttttaactttctgatctgttacgcggtaaaaaaatttgtgtactgttaatatatatatatatattacaaattttcagaataggtaaaaaaaacaaaaaaaaaaataatattaaaatagctgtcatcctgctatccgttatccagctaggctctgctccacgatgatgggattgacaactatggtgtttattcttgaaactactttggtagaatgtgcaatgctttgtgctatgttataatttcacatggtagaaatcttgttcaataccccttgaattaaatataatcatataaggatgtgtaagaagatgactctaatgaagtatttgttagtaagaaagtgtttactgaattatttttgtgagacaatccacatgaagaagaagaaaaacaaaaggaaaaaagttattgctgttataataggtttttttgtctttttagggttctattaggataataattagatttcccttgtcccaggaaggacccttaca

SEQ ID NO: 21651 - DNA, 866 bp, Glycine max
  Intron number 1 from transcript Glyma01g04170.3 (locus Gly ma01g04170) derived from phytozome v7.0 (chr-ID Gm01; pos 3624657 to 3625522)
gcgtccctcatcgaatctggctggcaggttctcccttcactctttgcatttatttcttccgcttcccaccgcttcaaccgccagttttttattcttaattttcttggcgtttttcttttccagacagatttgccatgcgattttagcaatgattgttgtgtatttgttgatttattgatgtagttggcgagagtgtgcacattattgggtttgttttggaatgagaaattgtgctttattgattggggctattgtcattgccgttttgatattccactatgcataatgattgctcattgctctgtttgggactttaattgttctcttctcatagatcaccgtccttgatgattttgaaattaggctttttttactttccactcccaattttttgttgcctagtctttagattcttagttttgtgaactctgttgaagtattcagtagtgtctgatttttgagatgcgtatgtgttaattattgaaagagtttgttaatcctcatattaatcttcctgtgcatataatatattagaaattaataaatataatatgtattattcaatatgtagtgtataaaggtaaaagtagttgagaacagaggcagattcaaatctttccttgctggagcacatataatttagcatgttcacggacgtaatttcacttgtttatatttggctttttgccttcagaatcttgcaggtcctgtagattgcatgattacatgtttgtactatctaccagaagtaggaattgatgtttggtccttttaactttttgtggaaatgaaattctctctattaccctcatgcttttctttgtggtgcagtacttgatcacacatttcagtgactttcaactggc

SEQ ID NO: 21652 - DNA, 383 bp, Glycine max
  Intron number 2 from transcript Glyma0042s00440.1 (locus G lyma0042s00440) derived from phytozome v7.0 (chr-ID scaffo ld_42; pos 282939 to 283321)
catctccattcatcattttcgtgttgttttgttgtgtttgatctgttgtacaacataatacaatagaaatttgtcagacaagttgaataataggctgacatgtgtcttgaaacccactttgctggtattttcaagttaatgatttttcatttttagcacgatcaataatttcagctagatttttttttcttttaaatcatgatttccccctgttccttctggcatatttgtcttcccattgcctgttgagtgaaatatgggacttgaatcatcaaaagtcattcttggttttttttttcctaattaactgctgtgaccatcttacaaattctaactatcgacatgctttgtattgcacaatagatcaaagctaaaaagccttc

SEQ ID NO: 21653 - DNA, 573 bp, Glycine max
  Intron number 1 from transcript Glyma02g05880.1 (locus Gly ma02g05880) derived from phytozome v7.0 (chr-ID Gm02; pos 4738067 to 4738639)
tcataggtttgcttgatcattttggtcaacaacaggtaacacaattgttctcttgtccctctgggtttctagttcattttctgtggccaagtctcggaagttgattgagtaacaataaacttacaacaatttttataacgcttcttataattcattttgtttgacattttttacttttcttcatgtctatctcataacgggataaaatatgttttcaattcttctatagtgtaacttgattttaatctctgaattttaactttaatcaatttagtctttgaaatttataaaaacaatggttttagtccttctcacagtgaaaattgtatgaaaagaggaacaaaaatcatttcttttgaaaagttcaaagaatcaaattgatcaaagttctaataattaagttcttttttaccaaaagtataaggactaaaaacataatttactctattttgttgtataattatttttgtttgagtatgattgttgtttcttttttaatgtttttttttctattttctaaccaaattgaataatataggtatttgttgttggatctgattggggagcaaacat

SEQ ID NO: 21654 - DNA, 284 bp, Glycine max
  Intron number 1 from transcript Glyma03g33700.1 (locus Gly ma03g33700) derived from phytozome v7.0 (chr-ID Gm03; pos 41205343 to 41205626)
caacaaaaagaagagaaatctaccaggaacaccaggtaatgcaaaatcatttttttcattaattcttctcaaataatttgattttgccacttttcttcaaacgggttttaacttgttttgaatttggattggattttttcttatgcacaaatattaactgttagtttgttagtttctatcagtaggaaattcaaacccaccaactatctctccctcccttcaccctttaccactgaaacaatcttatatcttcaaatttggattggattattatgcagatccag

SEQ ID NO: 21655 - DNA, 931 bp, Glycine max
  Intron number 1 from transcript Glyma02g07310.1 (locus Gly ma02g07310) derived from phytozome v7.0 (chr-ID Gm02; pos 5819646 to 5820576)
taatagccaaaatccgccccaggctacaaatcaaggtaaactatatattattacaggttaatgatatatcatattattcttatagctcatatattgccatcgatgctattatatggtcctctcaattatatgaatcaggatccacatctcctgaatttaattttattcattttagaaattcaaatatagtctacttattatgaggtggtgggataaaggttagcccactgtgttaaattctaacatattcaaagatattttcatcacaccaataacccgagtgcaacttacgtgatacttcttctctctcaaaagtaaaggaaaaaaaaagcaacaaaaaagttagtttctgccatactttgttgttttcctaaaaaaaaaaaaagatcttcacctgttggtgcatatatgtacaaccatctcgaattctcgatctgccaataacccgagagttgaaattgacacatttccattatctaccctcaatattatcattaatggctctcatgtaccatatctcagtttttttctttggtctacctttgactatacatatacagcaataaatgtctggcaatcaatttcacattgcatttttccacttcccttgtatctctacacactagttttgaaaaccaacaagtcttacatacagttcttcaggtgcttttaatgttattcttcagtcaaaattaaaatttcaacttagtaattcacgcaataacaaatatttgcatgcaacatattattgagatgaaatttcaattctgatgaacaacgtacaccaaaaatacctatataccgtaagtaattgtatctaaattttgtcgtttgtatttacaattaagttagactaattaactaattaaaaatgttctacactaactatagaaattaacattaatatatgtttttgaaattgaaggcattg

SEQ ID NO: 21656 - DNA, 744 bp, Glycine max
  Intron number 2 from transcript Glyma05g03090.1 (locus Gly ma05g03090) derived from phytozome v7.0 (chr-ID Gm05; pos 2374413 to 2375156)
cctgttccaccagctggtgctgataggaacacttagtacatgtacactctctataatatgattttgatgtttaatatatatttaacttttatgtttgttttttaataaaaaaatttctgtttttcttcttgataaaataaatatttttttaatcattcacacttttcttattttatgatcctgataaatttttttatttgttattagttcctttttgaaaaagactaaaaaattatttttattacattggagactcaataaaaaaattatataaaaatacaaaaatttaaatatttattaagaattataaacatattttatccatacttatccatcaataattgagttgagagatgaaacatacacaaaagtagtataaaaagttggtgcatagtagcgttctcttttggcctaattgcatttttactcatcaattatcacaaattatatagttttggtatttttctattttaattatgctaatagagtttttgaagttttttcctatttacagccaagtccttccatcatgatttcatctaatactgaggatgttgacttgactataaatgataaaaaaaaaaatagtaaaagactcaattaacacagaatttaaggaccaaaatctcataattaaggtaagagtaagagattaaaaatgtaattgagttttttcttttttaattatatttgagtggattgaattcagtttattccggaataagaacactgaaagttgttgtt

SEQ ID NO: 21657 - DNA, 953 bp, Glycine max
  Intron number 2 from transcript Glyma01g06750.3 (locus Gly ma01g06750) derived from phytozome v7.0 (chr-ID Gm01; pos 7151165 to 7152117 reverse strand)
gagtgtggagatagtggagactctattgagcaaaggtaggtcaatgctctttattttttttattactatttttgttattcatgatctcaatcagcatctttttttatttcccttcaaatttgattgaactgtatactttggggataagtaattggtgtctgattcccgactgatatgtttgattgatttgagcttaatcgtaagacttggtactaagaattgttatacgatggttttaaaaaacggtctgcaactgcgattgttgcgactgtgatgccaaggttgttggggtctctacaaccgatcatgattgcaattgcagctgcatcagctgcatttgtttgcagtcatccacttgatattgcaacaaaactgtaactgtgaccgtgaccacaatttgaaaccttaggaactggtaatttatatgtttataattagatatttatattaatcttttcatggggtatgcaatgctgatgcctgattttaatttcttattaaacttaaatagagttgaggtatatctttcccatttttaaactgcaatcagattatgggttagtgttgaaaagcttttaaattggtgtagcttgtgattgaaaaaggtgataaccgatagttgagccctttcaagtgtgaattgtggttttctattaattttcattttatacatatgttgactgaatatgtaggctgctattttgtgttgtctgtattctgtaaattgtggaatttttcttggaagattcacaagtctagtaataaaatgcagctccaatgatggcctatgcctttcatgactacgtttcgtttacaatgtagaaagattcatcaattatctcaaatgttcttgttcttcatgtttgctaggagctgatgttaacctgaaaaataatgggggccgcactgctctacactatgctgccagcaaaggttgggtgaagatcgctgaa

SEQ ID NO: 21658 - DNA, 385 bp, Glycine max
  Intron number 1 from transcript Glyma01g39910.1 (locus Gly ma01g39910) derived from phytozome v7.0 (chr-ID Gm01; pos 51746518 to 51746902 reverse strand)
gcggaacttcctcctcctctattctctcgcatcaggttcgctttcgcttcgctttcttattcattataacaccgtttggtttcgtagacaatgtgcgcgatcagatttcgaaacttcggtgttcttttgtttaggaagtattgaatcctaatgaaaaacaaaatctctgattaactttagcctaactgaacatttactgctatcttaatttttgttatcaaaatttatttatattttgatttttttaatctgttgttctgtttctgaagcaaaattccgaaactcgttttttcgtttgtgttaattaattacccaattgagctttagaacggtaatgtaagtgtgaatgacggtttcgtttgtcttttctttcgtcttctcagta

SEQ ID NO: 21659 - DNA, 454 bp, Glycine max
  Intron number 1 from transcript Glyma02g10150.1 (locus Gly ma02g10150) derived from phytozome v7.0 (chr-ID Gm02; pos 8034027 to 8034480)
gacgttgagcttctctcttcgttcaactcaatccggtaattcttccaaaccatctttcaatattcgattcactgttctccatttccttcctttaatattagttttaataaatataaatatacaaagaaaattagcaatcgttatgctttgactctgttctgaccaccattgcttcttcagtttttattttgtttcctgtcatgatgtgtatctatacactaaatcaatcagaggtaagaaattttctttattccattatgatgacgatgatgatgaaatcaaggttttgaatttgacaaaatgatattaattttcatttgttttgaatgtgtgtgtgtatactgaatggcatgattccttatgtgctatgtgttgtttaatgtgaacaatgtgtagagattctctgtgcttcatggcaggggtaagaagctggcaatagctgcagcatctgaat

SEQ ID NO: 21660 - DNA, 999 bp, Glycine max
  Intron number 1 from transcript Glyma03g30910.1 (locus Gly ma03g30910) derived from phytozome v7.0 (chr-ID Gm03; pos 38763847 to 38764845)
gcagcccaaagattgcaacttgcccaggttttaaccaaccccatctttttcatttttctgatttgttcttttttcgacgttaattttagattttgggttggttggtataagacagtgctgaataaatgaggacaaaagagtaaaccttgattttgttttggtttgtgttgtttctctgaacaaaaaatgattttggaattttgtctcgtagtggattgctaatggatcacctcccttcatgcgcgaatttgttttgttttgatgaactatccttttttgtttaactttgatttgattaactgtgttattttttttttttttttacttcgtgtgaattggtatgaaggaagtgcttgttccttttgtgtttaactttacctcatgagttggtatgaaggaagtgtttgttctttttgtgtttaactttacttaatatgaattggtatgaaggaagtgtttgtttgttttttttttttgtttaactttactttgagtgaattggtatgaagtaagtgtttgttctttttttcttttttggattgttgaaaacgggaaaaaaaggtgttggtgtgaagtaaacttagggtgagttttttcagcgattatatatgaaagagcgtttctgttattgttctttttactggcgatgattcctaacgtcagtgtcatctgttgctagtttcatttgtcattatctgtctatccataaactctggcgtattgcacaagttcaacaactactttgtgtatgtttttctttttccaaaggaggaaaaaaatcatttttgatttgggggtaggctgttatggcctttcctgctcttaattggacagcttgttctgtttttgttttgattcttcttgggtgcctgtaatcatctgctattgacttacatcttgagtagcattttgcttgtgcatacaataatatgttaggttcttttagcttggttgttggaatgaaatataatgagtgactgtactcttgcaacagatttg

SEQ ID NO: 21661 - DNA, 763 bp, Glycine max
  Intron number 1 from transcript Glyma03g14970.1 (locus Gly ma03g14970) derived from phytozome v7.0 (chr-ID Gm03; pos 19221796 to 19222558)
atttggttaagttgcttagatttgttcatatgaaaattgattgttctattattttttttgtgaatttcggtatggatactattaaaaccactgtaattattgctccaaacaaactttggaagctgcgagacacccaaccgagccaagaaaaacagcttgcattttatttagactttttctgagttctttgtaaaatgaacatatgttaaattagtttgggtttgcatccccatttagccagtctagtcaggataggcaaaatgtatgaaatttattgcaatctgatatttgaaggtacatagaagattgcagagggcaggaacatcttgataaaatctcttcgtttttcctccagaattttacatacaattgtcaattctgtgtagaatgtcaccctagtttgggtttgcattccttgcactctgatttacttggataactttggttttggctttattgatcaatatcccatggagtcaaagcattggccctgtatgcagttcaaaccaggtagaaagacagcctctattgataataatgaccttagaatttgcttgtgcatttcatacactattgatatttgaatttctataactgattcttgtgtgaaaagtaaagtgaaacttatgaagaagctttcctctgaatactaagatgcacaacccaaagaaagtgaatgtgtttctgtttaaacaatttgctttcttcatttttccacaaaatcttttaaggtgtgactaaccctttgtgtttgtggcagaag

SEQ ID NO: 21662 - DNA, 798 bp, Glycine max
  Intron number 1 from transcript Glyma02g35720.1 (locus Gly ma02g35720) derived from phytozome v7.0 (chr-ID Gm02; pos 40907770 to 40908567 reverse strand)
gttggaggtatgatttgatttgtaatttccgcattttattaataacctgtgtttcttttgtagtttgtaatatcacaagttaaaagatttattctaacagacccatgacaacaagaaataatggattatttgcaaaattcatccaacaaagttgagttcaaattgagacaaaaggctttgaaatacaccataataggagatgagttgtataaaagaggttttaacgggtcctgttggattgtgtgaaccaagtcgagtcaatgcatttgatgggagaaataaatgaaggattgtttgctgcttaaaatgttaataaaagaaagattgtgcttaaaaatctgttagcttctgaatttaattttacaacgtataacccataaataagtaagaaagaagatatagttcggaataagtattttagaaaatatatattttatacacaaaaaaataagtattttagaaatatatattttttttcttcggaatctcgaaaaagttaggaagctatgaatcctccttccacactcggggatggccagtgacactaattttacacacttttcttgcaaaagacgcagctccaaatggttggtttagtcatatttgaatactgacttgttgaacggttgttggatggttactgcaactcactaccaactagccaaaccaaaatcaccgtcaattgcaccaattgttttcattctacaatgcgtaacactatcaccgcttcttctaaacgctcttcaatcttcgcattccacagcgacacttcatcactctcttcattcttgttccttc

SEQ ID NO: 21663 - DNA, 644 bp, Glycine max
  Intron number 1 from transcript Glyma01g32040.1 (locus Gly ma01g32040) derived from phytozome v7.0 (chr-ID Gm01; pos 43399013 to 43399656)
ccgccggagaacccgtcgtcacactacgccggaaggtttgaccatatatttatatttattcatttattttgatatatttcttattttaattatcttattatcttattatttagaacatattttatgttttgattatttttaaatgataatttgaagaatatgaattaacaaaaacttatatagtttctaggattggatataatgtgtttcttgaatatagataattaaatttattatatatatttaggatagttccaaggttaaaataactaaagctcatgttttaaacccaccaacaaaacatattttttttaataatttttataaattaaaaaggcatcatatatcgaattaatgtcacatatgtcaacaaaaggtcttaaatataactcacatttaaattttttaaaaaaaatctcttaaaatatttttaggccttatttattgttggatcggccctccctgtatatattctctctaatttttaaaataacaataacctcatatttcagagtctttgtctagaaacttgtgttaatgttatttcttggataattttttcccactattttcctaacattgtgtacattaatcatgatcttgaaataatcctatgaaacaatttaaatctgtgtacgtagtta

SEQ ID NO: 21664 - DNA, 692 bp, Glycine max
  Intron number 5 from transcript Glyma03g32390.1 (locus Gly ma03g32390) derived from phytozome v7.0 (chr-ID Gm03; pos 40139908 to 40140599 reverse strand)
agcctgttggtataccagattatgagattccccttgcagtgattcctcctggtattcaactcactatgccttgttgagaagcttcttgctttctgtccattttgttgttgttgttgttgtgacatcttggtgttgacttttactttcttggtccacttttaatgaatccaatgataaatactgtattttgttggtaatgtaatgctgtggagtgggtgagttattctaaggaaaatataggaaaagtctttaattccaacatacctcaaaagaagaaaagatgttaatgcgcagttttggttgagctgtgaaataattttagttgaatagaacctgattaatttccccttcctggaatgctggcatttcaccagatcccacgatgtgcttccattttgtacatgcaacaagcaagtctgtaattgcatacagtacaacttttgctttccctgaaaatctgtcatatgatcatctctgtttgctgttgcttctgtatgtgggagatccctggttcctggaatcagagattcagaattggccttgtattttagacttaaaccaaagaaatgttacttctgtgccatttatttgtttttgttattctgtttctaaccccacattaaactctgttgatgagttttattttgatttattttcgctcaaaagaaccatcaagtggaggagactctcta

SEQ ID NO: 21665 - DNA, 1057 bp, Glycine max
  Intron number 1 from transcript Glyma02g09060.1 (locus Gly ma02g09060) derived from phytozome v7.0 (chr-ID Gm02; pos 7038583 to 7039639 reverse strand)
agtgtaaagggtcccttgtgggaagaggtttctaggtgagtgactcacaatttttattattttttcatcaccttaattgagtactattaccagtttgagttgttggttattttggagatctgaaaactcccaattcttgctcaagttaattttcttctttcatctcttgggaatgtgtttcacttcaattcctaatgttttccttctctctctctctctctcttgattttgcactctttcatttggatttgtttaattatcttttagtttttattttttgtttatttcattcttattactaatttatatatagttggtttaacgttaaaagctatcagtttttttatacaaattttggtcattttagtcgtcttttggaaactatgcaccaactcattgtgctgtaaacaaatattgaacatttgaggcactcttttttccttcaggcaataatttttatattttaggatttaattttgttttcaattgattttataaataaatttttttattataatatccagcaattttttttataaagaatatgctttttgtttataataaatatagtatttttatagtaaaaattagtcattattaattttgtttatcatttgttataattttgcccgcgttaataattttttctagttccgttcctgcctgccctttttataaagtattaaagtgcaactgttgtttatgaaaatatgtaatttagagttggatatgtgatgtgattttctgacattcatttttgataatatacatggtctgttttccaattcaaattgggtcttcaaaagcaacattttcttcctgccttatttcggttacccactcttggttgggaatgaatgaaggtagattgcacaatcttctcactttgggttcatgtgtgttttccatgggaaagcattttccgtttcaccgattcattgattcattattgcatttgatattaattaaaaactttaactccaattactacaccaattgttatattatatattctcctttagttttcctcattttaaggtgttcagttacttccttt

SEQ ID NO: 21666 - DNA, 761 bp, Glycine max
  Intron number 1 from transcript Glyma03g28700.1 (locus Gly ma03g28700) derived from phytozome v7.0 (chr-ID Gm03; pos 36657545 to 36658305 reverse strand)
tggccggaggggaatcatcgtttctggtaggtgcctctttttaatttgcacacatgtttcatgtaaattaaaataatggatccaaatcattatcctcttcgtgtacgtttcattgtgtgttggctgttcttgttaaaaaatagtaacacgtgattaaaaaggtaatatttgtttttttaaccatcctaataataaagggtttttttttctctcctattaaatccaaaaatatctcacaaattttgattctaaagctaattctttgaaacttaatcacacacttaaaagtgtttatttctctcagaaaatatattctaagagaatcaactaatgattaaaaagataatattattttgttataatatttttttaaaaatacttaacatacaccaactctatcttttcatcttaattttatcatatttttcttcttatatctctctcttcatttcttctcgcatcatttattacatctattaatttctatctttcttcttttatttatttctttatttttttctatttctacttatacacctaaagaaattgaggactttatcatatatttttttgggtttttttcttgcctcttaattatagaaaagtaacatatgggctaaaataaattaacaactatgagagagaatattattttttttaactacacattattttcctatatctttgtttaaatataatatgattgtgaacaattgctagctcatggcagaggtttaattttccatatagtgaaagcatca

SEQ ID NO: 21667 - DNA, 787 bp, Glycine max
  Intron number 1 from transcript Glyma01g30670.1 (locus Gly ma01g30670) derived from phytozome v7.0 (chr-ID Gm01; pos 41495599 to 41496385)
agctcaagcttggtaataaggtatgatgtgtttttggtttgttgtgatggagaaatggctcgttgaaaacgaaaatgtttgttcttttgctttcttgatgttaaatgggtgtatggactttgtgatgttcattaccagtatacaaatatagtaggataaattaataacaagactatctttgatataactggactgtgataggatgcagtttctcatgttggtacacaaatttttttattataggaattttaacaaaaattagcattagagtttaaattgtgaaacactcttagcgtgtaaatattatatatgatatcatgtttaactataccatcatatataataggatgacatataattaaataattaaattcttcctcccctagaaaagtaaaattaaatatctcagcagactattttagatagatattttcttgaaatttgaaaagtaaaaaataaccttcttttattgtcgttaagaaatagtgttcaaaatatacttaattttaataaggagatttatgctaaattaatatgaataatttcaatactatatggtggtaagaaatttctgagttttctttaagatgaatccttgaggagatgcaatataacattcaaaagtagcgattgaacaatttgtatatgatgtggttctagagtagcttccattatagtaaaatgtttcttaggttgtttccatggcaaaagtcgttcttcttacgtgaatatatttgttgcattgattgcaggtgacgaaggagaagttgttggaagaaaccattga

SEQ ID NO: 21668 - DNA, 545 bp, Glycine max
  Intron number 1 from transcript Glyma03g26630.2 (locus Gly ma03g26630) derived from phytozome v7.0 (chr-ID Gm03; pos 34101002 to 34101546 reverse strand)
ccagaattccattattctcgaaatcttccattaaggtaaaaaaaatttcccttttgtttggtcttctattctgaacaaaaaacgtttaagatattagggctttggctaacaaattgtttgattggtcagaagaatttatttttaatttttcattctcatttgccttccttctattctactatttgttcgcatagttgtaaaattacaagaataagtgtctcaattggtagtgcccatgaactatttgtggaaatgcctgagctgcattaagctatgaaatgggtttcatgtctgcaaattgaggaatgtgcaagtcttgtcagctcgctcatgtcagtttatttgccttgtttttgttgtcccaccttgtaattgaaatggattattggattgatcgatgcttattgaatttccttgattttcttttctggggtaattacttggttcctagtgtattatttgataagattgatttggcaattgatcccatcctttttctgttttgtttcaagtcagcacctttgacttgatacaggttagcaaat

SEQ ID NO: 21669 - DNA, 634 bp, Glycine max
  Intron number 1 from transcript Glyma03g03990.1 (locus Gly ma03g03990) derived from phytozome v7.0 (chr-ID Gm03; pos 3931436 to 3932069 reverse strand)
tggaagatatgtaagtgctcttctccctcttttctgtttctcttttcattgttctgttcatgtgggattgaattaattttgaagaaataataatcaaacttaatagttacattctctgcagaagaattcctaaagatatgaaaattctatcagttgttaaattttttttaagaaaaaatctatggtaccctcaaaaatttaagttttgatactgaaattgaaaaagtctccttttgtgtgtccaatttcagtcaactattatcccaaaaatagttgtaccagaacctttaaatttctgtgtactatagcaactatttttttaacatcaattctaaaaaaatttcgtgataataatttggtgaggggtttgttaaattgagacaaagtttgtttcttttcaatctcaatcagtgagagtaccactggctaacagacaaggaagtggacattttgttaggtcacctggtttaggtggttgttgttgttaattgttaatttatgatgatttgtctttttattcatccattttctttaattgctttggattgaaaacagggcattatgtgatgatactaaagtggcttcttcttatttgacaggaatttcaggaattcatactttgcaagagttggtg

SEQ ID NO: 21670 - DNA, 471 bp, Glycine max
  Intron number 3 from transcript Glyma05g01800.1 (locus Gly ma05g01800) derived from phytozome v7.0 (chr-ID Gm05; pos 1262566 to 1263036 reverse strand)
cctcaaacattaaaattgtaagaggaagagcagaggtaacattcactcttgttcttttaatggccatttccatctgaatgtttcttagttttgttcaagtctacaatctagatgcatttttctatgcaaatttgaattcttttccttagtgtgttgcatgataattttcttatttaatgccgttaaaaatgaaaaaaaaaaagagagaataacttaacatggttttccatggtatattatacttatgaaaacaatcactgtggagattattagcttggaataacattgaatgcggttcttaaactgaaatactttcaattattaaagacattcaccttgctgttatgttttgttttacttttggcatcacaacttctgccaatcgccgtataccttctactggctgaaaatatgtcttgttctgtgcatagggcagagtttagggcagaatccttgcttcagagagcaatt

SEQ ID NO: 21671 - DNA, 592 bp, Glycine max
  Intron number 2 from transcript Glyma03g23330.1 (locus Gly ma03g23330) derived from phytozome v7.0 (chr-ID Gm03; pos 29931773 to 29932364)
tctgtgatcaacctcttcctacgacgttttgtaatgttgattgcattgatattccgttggatgaagatcttgagtcatgtaaatgggacgtagataattatttcagtgatgatgcttcatggaaacaatgaattaaagatgtggatttctaacaaaccgtttggaagtgagtgagaattttcttagtctgattgaggggactgagtgagtaagtgttaatttatgactttagttttttgaggaaaaagttgcatctttgtgtttagtatattcaaaaagatgtttgtttatctatgttcaatgaaggaatttgtaaataagaagactacagtgttcttaactgtcaactcccaagttttgaattttttttttgtgggatatttttcttgaggcattgtgatacattttttctttaatttacattgtgcccaagattttgagccaaccatattgcactaagcttaaagtgagtctatgtgtcaagttcaatggttggccaccttaggcacttcatggccacacatattgcatctttttttgtgttgggtgatgaccaacaaatagcattttcataggcaattaaaaaagtcca

SEQ ID NO: 21672 - DNA, 424 bp, Glycine max
  Intron number 2 from transcript Glyma03g33100.1 (locus Gly ma03g33100) derived from phytozome v7.0 (chr-ID Gm03; pos 40768796 to 40769219)
cgtttttgccgttggtgaaaatttaacacctcgatgtaggtgattcatcctcatttgaagtctattgggtgcaatgtgatgcttgttagactctatcccatttagaatgattgcattgcatatgagtatgaactattgtttccaacaattaagtatatgtttggattaaagttccgaaagctcaaaagtacttttactcccaaagaaacaatttgtttttcatttgtgcattgaaatttacaaaagtatttttcaaactttttaaaccaagcatagcctaaatgtgtgtcgggtagtttggatttggattagtttgtgtgacatgtttgcattaccgcattagttatatatgcttatgttacatatacaattcttctctaaaattgttttctttgttatgcttgcagacaaaattctcagtaaa

SEQ ID NO: 21673 - DNA, 572 bp, Glycine max
  Intron number 4 from transcript Glyma05g01230.1 (locus Gly ma05g01230) derived from phytozome v7.0 (chr-ID Gm05; pos 782979 to 783550 reverse strand)
tactggtgagtttcttttcttgcatgtttttctcttttcattttgtttgagtttaatttctttgggctgggaatgtaagttctgtttacactctcaatcaataaaaaaaatcatgctagatggatttaaggtacttgttgtaaaagtcaataaaatttcaatacttgaagagttctgattgattgatgttataacttataacactatcgttgcatgaacagtttactctttgttttttttttttttttttttaatttaagagtttaacaagcgtgtacggtcactgtgaaaggttttatattgtcaaccaattagagattgtccactgtcaatcaattagaaatcaataatttattatacatgatgttttgtgattgaatgataaaataattacttttttgcactgtgttggtccatctgcgcatgtattatttattcttaattttattagcgacaattcagttttgctgcttttgcatctctttttcttttttttgtgaaccttgttgatggtgacaaaaaatgatattgatatagggatctgaatcacctccctggggaaacaattttat

SEQ ID NO: 21674 - DNA, 955 bp, Glycine max; identical to SEQ ID NO: 16630
  Intron number 1 from transcript Glyma04g39380.2 (locus Gly ma04g39380) derived from phytozome v7.0 (chr-ID Gm04; pos 45587813 to 45588767)

SEQ ID NO: 21675 - DNA, 864 bp, Glycine max
  Intron number 1 from transcript Glyma05g04520.1 (locus Gly ma05g04520) derived from phytozome v7.0 (chr-ID Gm05; pos 3663915 to 3664778 reverse strand)
ccgatcaccttgacgtcaacgcccaggacgtacaggtcaatcaatgtcacttcccctttttccttttctttaaattataaaatgtggactaatatattaaattagtattttagtattaaaattaaaaattctatgggattgatacaaattgtttagtgcatgtttgcttattatgtttgaggcaaaaaaaaaaattcttccaactatcaaaatcttgattttgcattcattttgtttttatattggaatgcgtattgtagtattttcaacttcaatctaaacatgcaattaagcttaagagtgctatatttttagcattattgtctcacttgttaattatgaaattcttaattcaaatcatgaaccaggaattctagcctaattagttcaaaaatgtgagtgaattattataaaattttgtatcttcaaattagggattaatattagtattggtattcaaattatgaaattacgatagacaagtaggatctgaattaattaattggtacgtgggtatgggttcttcttacttaatcagtcttaatttcattgttggtccaacattatggtttgaacagaattttctcctgtcaaatatgtatatgtttgagaaaccgttaggggtggtcgaaacggcgtttcccaatggatcaagaacctatcttatgtgttcgtccgtttgattggcatggagacgtgtgtcaccgcgcaatggacgtgaactcaaacatactctataaaattcaaatcatgaaattaccatttgaaattatgaatgtaggatatggtttaattttgtgtatactatggaaatactatagaatgatagaaagttatgaatgcaggcatatatagtaggggagc

SEQ ID NO: 21676 - DNA, 658 bp, Glycine max
  Intron number 1 from transcript Glyma01g03310.1 (locus Gly ma01g03310) derived from phytozome v7.0 (chr-ID Gm01; pos 2821362 to 2822019 reverse strand)
actgcttcgttaatgtaagttttccctaacaattgcacaccatatagtctttcttctccataattaaaccatatcattaccaaagtttataatagcaatacgtataactatagcccaataatgtatatgtatatgtatatacacactcacacgttacaacatcaatttggttcaaatattacaaaacaaaaaaaagcagttagccgtcattaatcaatatggtcatgaatttgacattatagctcaatttaattaatctctggttagtgtgttaattcgctctttaaattgacaaaagaactaaattttaatcaatacttgttgtttcaacataatattggggatttgttatgcatgtatatacataatattaatcataatttttttcatcgatcaatgactgagattacttgtctcatcctctaaagtacattgttcaccttattcgagtgggatccttttgatcaacaactaaagtgactagtaatattaatttaaggaatcaaattgacatgtggttccaatttcataaccaaattgatgttttgctagtatttatattgggagtgtttgactgatgagagatagttatatgaaatgacattgtgatgatgagtttctaaaccgaacttggtcatgtggaatcaaataaacaggg

SEQ ID NO: 21677 - DNA, 435 bp, Glycine max
  Intron number 2 from transcript Glyma07g03340.1 (locus Gly ma07g03340) derived from phytozome v7.0 (chr-ID Gm07; pos 2352738 to 2353172 reverse strand)
agtataccagttttcttattatgatatgtcagggagcctaagtaatttgtataccttactgttgatgagaatttttaatatccagaatttttcctagcagtagcaatgaactaaaacagtctttagttgtatacagtattatagaagagagtgagtttgatttatgctccttaatggattgttctttagacttgtaggatttggtttgaccttgtgatatgatttttaaagaatatgatcggatttttcaggggctaatgctgcaaaaacttctattttaaacattttatctagtacttgagaactgaagctactaaagtgaaatatgttgatgacagacaaatagcatagctctttaaccattttattgtttctaaattttttccattccatattgcagtgaaaagattggaagtttggagcaacaaagtagag

SEQ ID NO: 21678 - DNA, 656 bp, Glycine max
  Intron number 2 from transcript Glyma08g00730.1 (locus Gly ma08g00730) derived from phytozome v7.0 (chr-ID Gm08; pos 370676 to 371331)
actgttgctttaagcattattcaatacagtaagagctattctcttctgagttctgtgatgaagaaatatatgttgatacaattatgcatatatatatatatatatatatatatatttttttttttttttttttttttcctttatgcatttctgcagatatttctttttgttctgcacatgaatatttctaatgtcctaggtttatcttttggatgaatataaagacttctgtttttcttagagaagtcctaattgacattgtgagcaatgataattttgattattctccttgtatctgaggtatatcatatatttttgttcattatattagacttttgactatttgagctataatgctggctgcacttgcagatataaactagaagtggttaagtgattagcaaaagttgtttggagttatgactccttaaaatgtgttttgtgaacagttatgaaaaatagtaaaagaaatgcttctgagaattgagattctcaactacaaaagccatacatgtttacgaattgctacatgtaatgttattgataaatataccacctgttgattcaagtttgattatacattgcttttcatccaaagttttgcaatattttacactttgtagtggactgatcagtgatcttttgtttttgcaggt

SEQ ID NO: 21679 - DNA, 586 bp, Glycine max
  Intron number 4 from transcript Glyma05g38560.1 (locus Gly ma05g38560) derived from phytozome v7.0 (chr-ID Gm05; pos 41916142 to 41916727 reverse strand)
agggccttaactgagtctactgtcaccgaagtaaggtatgctttacgtacggtatttttcttttctgatataagttttggcacctttttgtagttgacttagtttgagattttgttatagaaggcaagaatattaaaaggattggctccaattggttgttagctatcaggcttttctatctttgttgtccttgacccctctccccttcccctccctcacattcatgcctcatgccaccgattccagcatctactattcccttgccctgcttccacggtgaatgtttgttaggatgtggtataacagaaaattttccactaccttccctgtcacttcccatcctacccctgttcctcttcttccttcgacaatagtcccatgagttagccaatcaaaaaatccttaaatacatatatgaaaccatcatttagaccttgttttgtctttattcctcttgcttttctcaaaacctttttcaataatttattggaaaaggaaaataaatatttcatctgcctggtaactttttcaattatacatttatgtctaacattggaagtgttatggtttcgaatcaggtttcttc

SEQ ID NO: 21680 - DNA, 632 bp, Glycine max
  Intron number 1 from transcript Glyma07g04750.1 (locus Gly ma07g04750) derived from phytozome v7.0 (chr-ID Gm07; pos 3504057 to 3504688 reverse strand)
acttcaacccatttctccaaggttaattttttttctcaccacctttttctccctatcattctctcttttagcatatagtacattatgtatacataacttcttttttttaatataaaattatatcatctgtttggaaatagattccgtgcattcacacgttcatgaatcgaaacggtttactgaaaatgaaataatttgcatctcaaatatatatttttagatttatcgaaatacaataggtgtcatttgaataaatttcgatcctcccttgttctcaaatagttgttcaagtcacttttgtcaattgtaatcaaggaatggatcctctcacttagaaaaaaaaaattatggtcatgtgttatgatgccagaccatttaatctctcatctatattatagaagcataattatattttaaaatttattgaaggagtaggaattcatggagtggaaatgtcactgcaaagaatgcatttcccaagaagtaatcatgacattttataactatttagataataaaaatcaaattttgtgtggtgctgtgtacaacttttgtatcccatataatccttagtttctgaatggtgattattaacagttggattggaggactactctgagtttagcctttca

SEQ ID NO: 21681 - DNA, 899 bp, Glycine max
  Intron number 3 from transcript Glyma05g31940.1 (locus Gly ma05g31940) derived from phytozome v7.0 (chr-ID Gm05; pos 36967781 to 36968679 reverse strand)
gtttcagctttggtatacagtttcttgaccctttcccatccctgataatttactccactttcattttattttcaatgtgcaaatgctcactgcttgcaatgcattcgttgagtctatcgtttagtgctcgtgtgcagcataagcttgttcttaggatttaaaacaaaagtatttaatatattaagggaataagggtggttgttgaatcggggtcgagtatggtatcagcgatgttgtttatagacaacaatactacctatgatagaaatagggataaaaagaaaaaaaatgaggaagggtaatgatctatgttatgatttcggatgatatgctgatgctgtacagtcctcacaaactttttgtatttgcgactcacagataaagcataagtaggctactttggagtttggataaatttatcaacaagtacttataagctgaaaaagctaatccaaactggaccctaaaccaattacaatattcacttaaattgacgtggtattaaaaaagctaccagtttttctaaacttcagagggcacaggaagaagacacttgtagcaaaaaatatttattgttgtgttcaagataggcatacaaagttttcacccggaaaactattttaaatatcttatttgcaagattttagtattcagattgattagtattattggttgtatatatcccagagttacaataggcaagtgctgagaataacactctataattgatttgagtctcttgtataactagttgaccaaagaagaatgtaatgttatggtttctctgattccaggtaatagattattttggagcttctacactactcctgagttctaacattgcaaatcataactattatgcagctacaacgttaactggtctgcattttgccacaaca

SEQ ID NO: 21682 - DNA, 672 bp, Glycine max
  Intron number 2 from transcript Glyma05g31940.1 (locus Gly ma05g31940) derived from phytozome v7.0 (chr-ID Gm05; pos 36968798 to 36969469 reverse strand)
aatagaaaggagtaatggatctaatgagaattttgctattctgctttgatttcattttttactactattatttggtttctttgtctctgtgtgtgtgtggctgtgtgtttttagttactacttgaattctgtgttttaagtttgagaatgttggattttatggcaaactgagcttcaaggttcattcccggtccttgtaatctacatcagctctctctctctgttggttttatacctagaatcaattgttttgttcatagacttggtctgacactactcaaaaatcaatttctcgttcaaattctttgaagttttgaaaattatttcggaaataagtgtttttaagaaccaaaaaacaggagcaactgggaaatattttctcatcttcttctttgagtgttctgtttaagtgtgcagaagcgacagatttttagaaaacacaaatgtgctcatggaacaaacaatttcaaatacgccaaggacacaaacaaattttagaaaatagataactgtttttgaaaataataaacaaagccagcctaaaattagacatggtttcgccttttctttattttatttttaaatagaatcagtatgggagtttaacttctttcgttgcaatctgtgctgcttttgatgacatgtgttcgcatgcagataaagccattgaac

SEQ ID NO: 21683 - DNA, 592 bp, Glycine max
  Intron number 1 from transcript Glyma08g14850.1 (locus Gly ma08g14850) derived from phytozome v7.0 (chr-ID Gm08; pos 10818251 to 10818842 reverse strand)
tcggtccttccgtcttccactactataagaaacctgtgagtctccgaaatcaacaccgaccacctcagcatcctcgaagccttttctgctttcttttatttatttgttttcgcgtagtgtcgatgcgtttccgaccaggcaaagatttacggatttagcaaggtatctatttttctaaaatttgtttttctcctaaacacatttttttccttctaaaagtttgtttcttatactcttgaaatgaaaaaacatctctcacttttttttaaaacacttgttttgaaaaccgttccgatctcaagcagctgcattgttaggcttgccacttttgacttttgagtgattgttcgctttgactttcttgtaggtttcatgattcctaaacaatgttggatttttttttcatatttttttttgtaccggaacagtgctcctcagtcaaggttaatatttgaaacaaaaaagtgagaagaaaatcatatagtcccttgatgtctctttttcattgatttgtttatttcaagtaattatgccttgcaattgaggtgtgattcaaattttgaatgtatagctgaatatcgtggaagggaag

SEQ ID NO: 21684 - DNA, 575 bp, Glycine max
  Intron number 3 from transcript Glyma07g37090.1 (locus Gly ma07g37090) derived from phytozome v7.0 (chr-ID Gm07; pos 42246993 to 42247567 reverse strand)
tcaagccagtgaatttgccaaaaagtaattatcatttagctgcaacttgatgttcgtgaatggatatgcatcatatccattctgctctatcgtgcattttcttatagacaatgtgtcatctcatcatattcatttgtgtctgttatgtctgcatatcttaatttccataaacttttggagcttttgtgatctagcttgttttataaattgtgagcttctgtgccctttattgctggtttaaaatttatttagtttgaagtttctattcttaggagggatctattttcctctaatctctttgtaatcttctgcttttactttaatgattttcttatttcataaaaaaatgcaccatttatttgtatatatcatgaataaagcaggataaggtctcactgcgagtgacttttcattcatggagctaatagaattttgattagttattttgcatccaaataagttttcactattaatgattagacaatgtcaagtatctggtgaaaatattgttgttgttataattattgttattttgtgtgtcaacaggtggtactattgtcttatttgaccgcaag

SEQ ID NO: 21685 - DNA, 986 bp, Glycine max
  Intron number 2 from transcript Glyma08g17160.1 (locus Gly ma08g17160) derived from phytozome v7.0 (chr-ID Gm08; pos 12606605 to 12607590 reverse strand)
tgtatgttctttaaaagtaaaaatctttcccgctaaaataatgatatttggattgttaagtatgaaagaaagtttaatgtattgtcaagaacattatttcctaactgtggttcatatatcaaattcatgctcaaattgattgtaggaagaagtgtatacagttgtgttcatattttgcttgcagtttgtagacttgcattctcaaggttgagaactactactgttgcttttcatttaagtttttactatgttcagcttacctcattgatttggcgttgtcatattttaaatacaaattagtaatctgactccattggagtttacgaattgagaaaatttgttgacatagctgtataagccctatatcaatggtgagaatggcaccgtagggtacacaccagcaaataattgtcaagatgattttaaactggtttttaggccaaatatatcatgtttaacaactgaaagtttgtcttccattgtcagtgatgcaattttattgaagcacaaacatggcctctgatctagtattcattttctaatgaaacctatctagaattaaattaaatcatttctcagctgaactagcgccatcagatggccattgagtcatgtagtgttaaataaaatgttatttatttcattcttgtgaataaagctatgcgatatagttgatatagttagtaaaactaataaagtatagatgcagaaacatgtataaatgcataattactcaaggctaatacaaaacttctatgtggggtgccattgtgcttaaagtaattgcatattttagaatcattttcatttttatctttggttgtcatattctttgagtattagggtgaatacaggtacataagttccatcattcctaacttcatttcttgaatgttatgcaacagcaaggtacttttgtatttatgtacacattattagatcaattgttcatgccaggggtttctgaacttgttgcattaaacagg

SEQ ID NO: 21686 - DNA, 738 bp, Glycine max
  Intron number 1 from transcript Glyma08g19210.1 (locus Gly ma08g19210) derived from phytozome v7.0 (chr-ID Gm08; pos 14489953 to 14490690 reverse strand)
gatcgtgagtccacccttattcctccttcccactctttggtttcaaaatgtgttttctataataatttcatgccaagaggaacgctagctagggacactctccgacattttctttccaaaaactctctctatgattagttagaatttattgaaaattatcatttttggtagattttgtttctcatttaatgattcttcttctcatttatattaaatgagaagcaaaacctatcaaaattaataattttcaataaattctaacaaatcatagagataatctttgagggagagtgtagagtgtccctagcattactctccatgcctattcagcaatcagtttttcatcctctgaagattgtttctgaactaagtgttttagaatagaaacggttgagagatgttttggcattctcttcttctgttttgtggtctttagcttaagggtgagtcatctgaaatggtgttgaatgtggtcccaactttagggtgtgaatcatttgaagtgatgttgattgtggtgaattgaggcatgaaattggtgtattttgtatattttgaaaactaaacaattttcctaattttctcccctcttcacttttccatctaagtttctctgcaggcaaatattagttgttatttttcgttagaatattagtgggagatattcgaacccgcccaccacatttctcttcagaatttgatttattatgtttctgaattgcaggctaccaggtgact

SEQ ID NO: 21687 - DNA, 813 bp, Glycine max
  Intron number 3 from transcript Glyma08g25230.1 (locus Gly ma08g25230) derived from phytozome v7.0 (chr-ID Gm08; pos 19497843 to 19498655 reverse strand)
aagttatcgaagcaccattagaggataaagtatgaaacacagttgcttacttgtgctattatttattgaaactgtaacttcttcactgaagagataatgaaaattatctggtaaaatatcgactggcatctgaaaataataatcagtagagtataagctaatagagagagaattccatcaaccatttttgtttgttagttttgtggcatagcataaaataattggccttttctttttctgacaatttgcttgtgttttcattagggttttgcttgtcaatatcatatttatttgtatcaacaatgataaaaatagagagaaaatgtgaaactgatttcattgatcagaatattataaagccaagttacaaggttctgtgttagctctatatagagagactggcagaaacctaacagaataacagaaagcctaactgtaatcagttaaccaactgactcataacagaaatctgacaacctaactgacagctgtcagttaacaactaacactaggtaaaagacaacactctttacttagtggagtaagaatactctaataaacaaatgccaacattatacactgtcatgcatgcatgtatatttctcatatatgataggtattcaagtatgtgaaattaggaatgtactttctctttctcttttgtatattgctttctggatgcagattgttcgacattcttttcatataattataacatgtctagttatctatatcatctgttgttgaattaatttatcctttaaattcaatattttcatctgatgatcttattgttcatatcaaacttaggac

SEQ ID NO: 21688 - DNA, 886 bp, Glycine max
  Intron number 2 from transcript Glyma08g19620.3 (locus Gly ma08g19620) derived from phytozome v7.0 (chr-ID Gm08; pos 14815470 to 14816355 reverse strand)
tcaggaactccaaaccctagttgctgcattttcaggcaagactttaacagttttctagtgtgtgtttttagctgacataagtgagttttgtagaaactcttgtgttttcactataattaaggcatgattgtattcactttgaatttgaatatcttcttaaccgtctaactgtatatgtgttgattctgttcagtttctgagaatgaagctgttatcatcgactcttgctttattaaaatggtgcccttacttttatcataaccagttacgtgttacctttgttgaatgttgatcatagactgtatgctatactgaaactaactcggtaatttctgtgtgggtgaattggtaaagtgtggatgtatggatcaattaatctgtatggatcaattaatctgtatcaagttttattggttttatatggtgctatatatatatatatatatatatataatgttattttttgctatgcttgctgtaatgaatgaaagcaatagcaccttagaattagtttgatgagaacaaaatgtattatagttaaaacttgaaagactggtgattaaaaatctgttttctattggacttccctttccctgttatttaagcatgaaaagatgtagatgaatgctgtaatttcttggggcaacatgtactgaagataaaggttccatagatattgtataaaactaaaagtagtaaactagtaatgtactacttccatggtaacttctgcaattggtttattaaatatgattcttggttttggattgcttttccatatagcttgagttcacaagtcttgtgcacctttattttattcaaagatgtttagttcagcaaaaattttaataccaataaactttttccagaactttacacaaaggag

SEQ ID NO: 21689 - DNA, 681 bp, Glycine max
  Intron number 2 from transcript Glyma05g36130.2 (locus Gly ma05g36130) derived from phytozome v7.0 (chr-ID Gm05; pos 40031611 to 40032291 reverse strand)
acgtaagttgaatttggatgttccaattggggaattcttcttttttttttcctacccgatattgctgagtgcattgtgcatggttgatgaatataactgttctttcttcaaattatgcgtttcacatattcaaagtagttttattgtttttcttaattgataagcaatgttattgtctttggaagctggaactattaaaaaacgaatttcctatgtactccatatgtcaattaagaatttattcttgcgtgtaattttttttttacagcattagaataatgctattttcaatttggaggtgtagaaagccataattttatctttcacgtgtccttttataaagcttttgtcatgttagtgttatggaaattgcttgatcttaaaactatgtgaataaactacagatattcacatagttgttggagagtgaagacacagcctcagtagccaagttctgcttttagtatcttattttttcttattcaatcttgtgttctattctgaaactttgtatcttctctgttctgtaactttgcgtagtttttctgaacattcttagatcatgcaaagatcaatgtgcgcaaagtttattggttgttttcttcagtaatttacagtttgaggaaagtttttttttcccattctgaatgttttgcctcttgaattctgtagaaacttgaa

SEQ ID NO: 21690 - DNA, 791 bp, Glycine max
  Intron number 1 from transcript Glyma05g20160.1 (locus Gly ma05g20160) derived from phytozome v7.0 (chr-ID Gm05; pos 24161089 to 24161879)
ggagaaagaacgtaaaagatgagacatatttaattcatcctcctccggtatctttacctttatgtggttccatatatatatatatatatatatatatatatatatatatatatatatatatatattcctaaacttacaattttggcatttagaatgatcacattaggtttgaacgtataatctcatgtatactatataataatctcttaccatagtctaatcctaatggatagacttgcaaattaaatgcttttaaatatgaacaaattacccttaggttaaaggaacactagcacttaaaaaaaaagacacctagcatgttttttttatactaattattattattaaataattaactgcaattgatgttgactttttaaattgtgtggatcatcttatttcttatataataagtctcgtaattaatttaaggttaaattattttttatccatctttttatttaattggttcaatttaattcctttattaataaaaaatataatttgttctcttaatttttaaaatcgcctccattttaccttttccatctaatagaccttaacgaccttagcaaattggacaaatgccattggaatgctttgcattttcttcaacgatgttgcggtcaattagatgaaaaggacattgttaacacaattttgaaatttaagagaccaaattgaaggcaataacttaaccttaattaataataaagattatattcgtatacactgaaatttgactttcttaatcagagtatcaagaaaagacaacaactcaagtcttgatt

SEQ ID NO: 21691 - DNA, 397 bp, Glycine max
  Intron number 2 from transcript Glyma08g18160.1 (locus Gly ma08g18160) derived from phytozome v7.0 (chr-ID Gm08; pos 13652134 to 13652530)
tgtctatcaattcctagctcttcccatagtaagaggtacaactactgaattctcactacagttttatatgttaatgcaatacaatcaattattggaatcttccttaatttgaatggctttttcttccttacgaagtagtgcatctacttcggttatttgaatttttttatccttatagtttgtttaatgctagtacatgccttttccaaattaaggaagctttcactaattgcattgcattgaaaaaaaaatctggaatgtttctttttttgagaaaaaaatttggaatgtttcttaactttgaaaatggggaaaatgatacttgccttaactatagatttgtttttttattgagatcacgctttacattttatatgtattcccatgaatgaaacag

SEQ ID NO: 21692 - DNA, 685 bp, Glycine max
  Intron number 2 from transcript Glyma07g38560.1 (locus Gly ma07g38560) derived from phytozome v7.0 (chr-ID Gm07; pos 43278174 to 43278858 reverse strand)
aagcgccaaatttaaggtatggttaattttcatgtcggttttctatgtctaatttgctatgttttatagtctggttatctgttcaggcaatttattttggtctcttctggccgagttcaaagtagtgtacatttcatcgcatttgattctttctctttattttttgggtgattgaaatccaatatctgtatgaatgagaaaactggtgtgtatatctaggaatgcaaatttatgttttctttgatccaattgctcatatatagataaatgagaatcacaaagtttgtgaaaaaaaatattctgcagtatattctatttgaacctacttgtcctcttttaaactacttgctcacatattttcttagaatactaaaaactaacaaggacatataaatgagatttgaagaggaacaatttgtgagagtaatgctgtaagctgaatataatatgttagattaattttaagttctatagataatataccttttcacttgaaatttttttcaaggttttggtaaattacactgccaatacaatcagtctgttttattttgctctcttttcccataccctgtctccatctctcagtttcatgatgaatgtaatgtaatgtgtttttctagtaaataataatgttctctgttttgaaggaagcttgctgacaaagttggggctgctgggtatt

SEQ ID NO: 21693 - DNA, 558 bp, Glycine max
  Intron number 1 from transcript Glyma06g03680.2 (locus Gly ma06g03680) derived from phytozome v7.0 (chr-ID Gm06; pos 2579849 to 2580406 reverse strand)
tttattggatccccgaatccaactctgcctctcaggtctcacttaatttgctttgtctttttcttctcactttccagttattcaatttgttttcggattcaatgtgcatccatcacctgaagtttagcttttcattatacgtgtttactaaaaaaagtgaaagtgtagctgttataactagaaaatatcatttagtcatgaattgtatttctcatttcagttaaaaagttatattaattctgtcccattggaaccgaaaaaatgttttttttcttcttccttcattccttttttaatgttttttgtatatggttagctagtatatttagtgagaggcaatgcctctctttaccttttcatatttgaaagtactgttgagaagtattttagcaattattattagctactgctattagataacaaatttccaagcatcttatttgattatattttgcaataaattatgtattggcatttgattttagttcttcctcttttcttttgtctacttcaattcgtgaaggaagaccggagtcagcctgaagagttggggagacc

SEQ ID NO: 21694 - DNA, 919 bp, Glycine max
  Intron number 3 from transcript Glyma06g15570.1 (locus Gly ma06g15570) derived from phytozome v7.0 (chr-ID Gm06; pos 12264089 to 12265007)
ctctcacggcattattcagagacttgaaaccagaggtagggatattggagtatatgcttttccggacatagaattgagttcagttcacttttgaaaatggaaagcttcactagtttatctcactgctttaatgaaaattgcctcatacagttgcatctctatgaagaccaaagaggattgtttcaaagtaattaatttcatatctgggtaaatactaaatactgagtgctattagttcctgtctagtcttccactagaataaaagtagacaaggaaactaaaagtaagttaaaaaatttgctcatgtgcttttgcttagagttttgattttgtaagtttaaggtaacggaatggctaagttgctagcatgtatttttctgttgagcaggccctttatttttgttattctgccagtactccagtagcaacaaagcaaaatgcaaacttagtagtagttcagaacttaagactaccttgcctcttaaatcttagaaaaatgctaaacgctaggaatgtgtttctatgaaacaacttagagatagttagaagaaaataagttgttgtgttttgttagttacccatttacttttcaaacttaactatttttcctatccaaccatggttggttgtgaggcattcgtaacaaatttcatataagagattttgctaaaaagcactgttgtaaatattctaatttaaactgacatcaaaactcaaaatgatttcagataagtccattaagggccaaaactttgggaaaacaagaaaaagggtaaattgcagccctagttgcatgagaaactattctcttattgataatctatttgtagtgactatcattttgagaccaatagcaaattttgttttgctttggtgctattgttgaatcagaacattttgctatcaagtcacggggttg

SEQ ID NO: 21695 - DNA, 551 bp, Glycine max
  Intron number 1 from transcript Glyma08g08880.1 (locus Gly ma08g08880) derived from phytozome v7.0 (chr-ID Gm08; pos 6334858 to 6335408)
tccacgttgtcgttgcgttcctcgcgttctttcaggttctgttttctctcttccgctgcttcctgcatttcgcatttcgctttgcgcaatttaggttttgtcttttaatttggataaggaacgcgcggaacggagataatgtgtggaatttgggggaaatacaaacgtgcattttgaaaaattttacttgcggtaacggttttttgaatttatttaatttacttgatgttatgagtcgttttaaatttccgctgttttttttttgttgaaattgttgtatttaatgttcaattggcagtttcaggagtatgcttgtgtggttaattgacttaattttagttagttagtcttgaagttgactatttgtggttgcgcttcggcagtgtttagtttaaagagcttgggatttcgatattttattaaattgatttgagatattaagctctttgtgctaaataaattgggaagtgctgaagtctgaagttatttgcgttttacttattgtcagttttttgttttttatttgggtgctccagttgctgagaattcac

SEQ ID NO: 21696 - DNA, 552 bp, Glycine max
  Intron number 2 from transcript Glyma08g23710.1 (locus Gly ma08g23710) derived from phytozome v7.0 (chr-ID Gm08; pos 18068809 to 18069360)
agcgtgttgttgtcatatctgcacaagaggcatgacaacaacttcttatttctctttgatacataatgctctgcctgcataggataactttttacgtgaattgtgtgtaaaattctacaacttttgctttggttgtgctgactcttcaatattatgtcaaggaaagattcctgtttgtaactttgggtgtttgttgggatgattgtgagctggctctctggtttcaagttattctggggatctttgttagaaattctaaaatacgattgttcttttgttataatcaaacaggtaatctttgtgtgatttttgtggctggggttcatcttcagattgtttcccctgtgagttgctgttgagttgttctaatcatggtaacttctccgtattggtagttttctttgcaaaacatgcctgcagcttatgggagcgtgtagtagaaaattataaaatattatatacaatttctatgatatttgtcttggaaacaaactaaatttgatataatcttctgcagacatcagagcaaaaacattctcctgcacaagaagc

SEQ ID NO: 21697 - DNA, 725 bp, Glycine max
  Intron number 3 from transcript Glyma08g25420.2 (locus Gly ma08g25420) derived from phytozome v7.0 (chr-ID Gm08; pos 19748138 to 19748862 reverse strand)
cataccgtctaatcaatagtgagggtgacaggtaagagttgaaggcttgaactttttttctttatgtttcagtttttaaactttaatgtacactgtcagccactcatatatgctacaaatatgagtaaggggcagaagatggattagaattgtaatgaccttgcctgtgtggcgaggtggataggaaggaagggaaaatgattagagaggcaaagataaaggggagggaaagttacgggagatggcagggagtcattgggtgagttttgatggagcctttgggcagggttctgtcagttgtttcttgttttgtgagtgattctcatttgtgtaaatgtggtttgttagagttaagtatgtgatatgttaaacttcatttcataaaggatgccttttagctctttaacaatatgtatatacatgcccaacattcaccattttggctacccatcactttataaattaatgtatcatatcttttggttttcttgggcagttgttaacggtaatgcccttgatgtattgtactaccaagtaccaatagtactataatgttaatacctgatatgttttgccagatgcatatatctctttttatttgaatatctttccttgtacatcttcaaatactaagtagatctgatcaagaagattgcctgattttgaattgggtttcactgttccctgcagactatcaggattgataattgacgtctttggaggtg

SEQ ID NO: 21698 - DNA, 571 bp, Glycine max
  Intron number 2 from transcript Glyma08g25420.2 (locus Gly ma08g25420) derived from phytozome v7.0 (chr-ID Gm08; pos 19748945 to 19749515 reverse strand)
aagctactaggtttgtatattatatacacacaatactagtatttattcttttttgtttcagcttaagcccattgaacaaacagtgtaggacaaaccaagagtgtgcttcttggctaggtactcccttgataaacaaaccaagagtacttctcttgggcaaggtattcccttgactaacaaaccaagaatagtcctctagagcagagtgctcctctaactcaagtttaagatattttctaaagaaatggaattgtgttgttattatgccaaaagtcttccaagcatgtagtacataaagcctaaagggtatggataataaaaatcctagataaatcctaatagaatatgacattataatcaaaatgtgattttcctaagctatgaaatcctgatcaaataaaatatcttaacatgagaatatttacccaagaatatgtttttctaaatttgataagaatatgaataattcctaaataacacaataattcttaaaattgcttttccatatggcatcaccagacctctaatcttcaattcttgatgatacagcgattcatcttgtgcattgaat

SEQ ID NO: 21699 - DNA, 596 bp, Glycine max
  Intron number 2 from transcript Glyma08g08280.2 (locus Gly ma08g08280) derived from phytozome v7.0 (chr-ID Gm08; pos 5923825 to 5924420)
tataaacaaccaattcacatcatcgtcatactctggtaattatttatgcttagtggtgaatacctgatagttaatagcatcttcttttgtttttaaaaaaagtaggaaaagtaaggaagacaaaattgagagtccatttttcttttctatcctttagttaaaaataaaagaaataatatggggtgggaagtaacttcaagtatgattcatgattgtatccaattttccatccattcccacggccatgttggaaaaagagggaaattctctacaatactttaatgcttgctagggcattagaaaggaaatttcgtcgcgatcttattttcttcaatataaattttggttttatgcacatttgtttctttttctcctacacatgagtgatgttatttcgaagtgtggcctattttataccaaaaagtgaaatcttgtactttgattcatcaatgtatgatatttttagtcaccaaatgttgtgtctggcaaatattgtcatccaatatatggcatcatggtaataaacatctatgaacagttctgatgttttcaaatatccatcttgtgccagatcatattacttattctggtcgcca

SEQ ID NO: 21700 - DNA, 999 bp, Glycine max
  Intron number 1 from transcript Glyma07g08180.1 (locus Gly ma07g08180) derived from phytozome v7.0 (chr-ID Gm07; pos 6811117 to 6812115)
tcgcctgcacccttctcgtcaaaggccccatctgtgtattctattgcttaatcctctcttctttttctttttttttttcactagttatttttcattattatcaaggttgttaatattgacatgtttgtatacgctcatctgaaaatacgagaagaaaataaataaaaagttaatgattttttttataaataaatatcaacttatacatgagttaagaatattttttagagaaattatatataaaaaaattaattttacatattaacttatgaaaaagttcgtcaataaacttttttttatatatattaatcatgattatggctgggggagtatgaacgttcatgaatggatgagaacttgaaagggtacaattttgatatcaatattcaagtttttctgtttgctttgaatttaattttaatggatttttagtattaatcaattaaaaattattttaaatatgaattttatgattattattacaaaattgaccaactttttagttatataaataatatataattggatgataagaatttaattaaaaatatatttacatcgttggtatactttaaatactttggggagccaaatttacttgtgagattagaattaacaatttgtctaaaagaattggaagggaaccaaaagagaaaaaagaaggcgaattaaaatagttttactttattcttttaaattatttgttagaccaaattaaaatagtttttttttttcaattttcgacactatcaatgtcaattctgactgatgtgcaaaccttcatgagatatagcatttctcatagtttgttagtatggtaaaatgatgaaacttggtttaatggagacattttaaaaaaaactaatataaaacttctcaaacttatcgatcaaactaaaaaaaaaatagatgaagaatcaaaacgatatttttggcaaaagaataaaatggcatggaggtttatggacttacattttttcttttaactgaaatttcaga

SEQ ID NO: 21701 - DNA, 469 bp, Glycine max
  Intron number 1 from transcript Glyma07g07060.1 (locus Gly ma07g07060) derived from phytozome v7.0 (chr-ID Gm07; pos 5685596 to 5686064 reverse strand)
tcggcccgagggaggtattattgctttatattcatttggttaaaagttagggaactgggattttgccttgtgtttctcttcaatcctccaaatttctaaatcaaatgagacattttcttcaattagtatgttagaatcgcgcacttaaaagtttgagcatggatatgtattgggaaacaaatagtagttgtaagtttatgccaatgaaaaagatacatttaagggataaaaatgattattttgtggcagaaagttcagatacattggattcaaaacatttttgtgacttgcacttatgacatgtatgtatgtatgtaaagttgtagatttgcaagacctttcctttaaagaatactttggtactggtatgaaatttcgttgtttgatgaattaaaacttgctttgttcttactttttttttcttccttgttcagatatttagcatattaaagcacgcattaacctccaa

SEQ ID NO: 21702 - DNA, 1021 bp, Glycine max
  Intron number 1 from transcript Glyma05g35600.1 (locus Gly ma05g35600) derived from phytozome v7.0 (chr-ID Gm05; pos 39591134 to 39592154 reverse strand)
aacgtgttggagaacggacggtataataatgtaatgatgttgtatctactttgtttatccacttcgttactctttgcaaatcaatttctttccctatctgttcattttttttaatagatattaattgttagttttattataatgttattaggagagaaagaatccatattatttattcttatcagctcgggacacgatgagagcatgaacaaattaatattattttcattttcatatcaacttattatttaattataggattacaattttttcctcaccagctgatacgatttctgttttcttgaaatcattctgaattttgtccaagtatttcataattttcatgttttatgttcagttttcattttttttaaagaaaggttttcaggtacctgaaaaattagaagaatgttcattaacttttgaaggtgtttttacaaaaataagttctatttttcttattaactactagtattttagttagtaacatataagataatgattattttatataaataaatgttttaaaattttaaattatattataataggctgctaagagaattgaatatgataaagataaaaagaaaattatttaaaatatttaagaaagaaagtttttttatcacttgtagaacacacttccatttaagttgatgaatttgtagttcttgaatgtgtgagatgctagtatagtaatctcttgaattaaaaaaaaatatatatatattaaataaattattgaagttgaaattactatatgttagtatttgaaatgtacaatttattatcattacaattccaaacttttatatgagagatcaacgtatatagatttcaaatttgaattatatttgatatttttttaattctagaattattgtgacctcacctcaaatttgataaagaataaggggggaaaacattagatcttaacatatataatagatttgacaatactaggtacttgcatttcatgatcattctgtgacgtttatatctactgattgctgcagccaat

SEQ ID NO: 21703 - DNA, 609 bp, Glycine max
  Intron number 1 from transcript Glyma05g29590.1 (locus Gly ma05g29590) derived from phytozome v7.0 (chr-ID Gm05; pos 35165313 to 35165921)
ctgaatataacttctccgctttgtttgctcaccaggtttgttgagcaaaatactgaaacatcatctaaaatgtcttctcaatggttcacctctttttggagtaaatatttcccttgaatccaagattttgcaacacatgaactagattgcaaactagctattacaagcaaatgaaactttttgaagctaaatatatataaatagctaatgatttaaatgttggataagttcttgaggggtgaagagggtgttccaagctttcattttcttctacatttcttttcagatttttccctaacctgacaaaataactgaaaaatcaaaatttactaatatgttttgtcaagatatacttttttttttgtgtgtgtgtttatatgaggacaataaaatgatatgatcttttacatgattcagcttgattaagtccttgaggggtattccaagcttccatttcctcttctttccttttcagattcttcacctgacaaaaatagctgaaagataaaaatttacttatgtgtttttgtcaatatatactttgtgcgtgtttgtgtttatgaggacaataaaatgatgtgatctttttacttgattcagcttgaaaac

SEQ ID NO: 21704 - DNA, 961 bp, Glycine max
  Intron number 1 from transcript Glyma08g37410.1 (locus Gly ma08g37410) derived from phytozome v7.0 (chr-ID Gm08; pos 35993542 to 35994502)
gtgtagtttaggttagtgtttataaatttggtgttaattaaaaagtaatttttggttataaatgaattatttaaatatttttttccttataatttaacatttttttatttttgttcttgtaatttttttgttttagacattacaaaatgtattttatttattttttatccttaaaatattttaaataatattttttttactttttaaagtattttttattatttaaagtgtgatttaaagtttttgaaaaataaaacaaaaataaaaacacattttacaaaaataaaaataaaattatagggacaaaaataaaaaaaaattataaattatagggatgcgaaatgtatttaaaccaaaataaaattaaaattaagtagtttatgcttaaaaaagttagtttaacataatattttgtttcttttttgcaacatttagcagtctcctaatacagcttatatttctcaattcaatctgattaatttgaactctgtcacatactctgcatcaataataatgatatgttacaaaaataacgaaatattccgtcttctgttcaaaaagcatatcaacaaatattaaagaatacctaaatttatatgtacatatcttatgcaaatcacttgttatgcaacatttggcagtctcctaatatagcttatatttgtagatagttttcttttgttgcaatttgtacatagtttatatgttcacgaaagtacgtgagtaaattaaatctcaaaatcaaaccaataaaattttgacttctgtaagtgtctctcattgtttctctcccatttcacaaaattgacattttgacaaaaaaggaaaatgaaatttgtccagaaccgacatatgtatgtatccacaagtcaactatctccagttctaattcaaattcgctgtcatcatattctttgttcattctttaatattgtcctgttgcaaacgcaaacaatagtcc

SEQ ID NO: 21705 - DNA, 312 bp, Glycine max
  Intron number 2 from transcript Glyma06g01950.1 (locus Gly ma06g01950) derived from phytozome v7.0 (chr-ID Gm06; pos 1240818 to 1241129)
ggggaagcctcgggggtgtcagacactgcacaagggtaatcttccattctttctcaaaacattttaggatgtgttttatttcccatttggatgggtgcacattggaatgcacgttttgtgaaaatctcttatttgttactttgggacttttggttcaacgtccgattgggagttctccaacggaaaaacaaacacctaattattttactttcactttcaatggaaaaaaataaaaatctcaagtctctctgcccattttttgtttaccatattaaaggtacccaaatacaccaggaatttggacaagagaac

SEQ ID NO: 21706 - DNA, 322 bp, Glycine max
  Intron number 3 from transcript Glyma06g01950.1 (locus Gly ma06g01950) derived from phytozome v7.0 (chr-ID Gm06; pos 1241194 to 1241515)
ccaactctggcacgccggaagagtctccaactgtatccaactctatttataataatagcaatagtataaaatgaacacttacgttatactcttccatttaattttccaccttcattaattattttcaagtttgactttcataaacgaagggaacggttatttttgttctttaaacaattggaaaaaattaactttcttctctattttgtttacttgtctttctttccttttctcttgttttctcgtgaatcccgaaaaagggtaagaaaaaagtgtcataaatattgattgcatatattcaattcaacagtataccagccaa

SEQ ID NO: 21707 - DNA, 657 bp, Glycine max
  Intron number 1 from transcript Glyma06g04380.1 (locus Gly ma06g04380) derived from phytozome v7.0 (chr-ID Gm06; pos 3038413 to 3039069 reverse strand)
ggccacttaacgctgcaggccagataggcttccctgttgcttccaccccttattttcctctgcctagtaaaccttaccaagctccaaacatggacaatatgcacgatacatatcattaagcccgtttagtgtctacaactagctagctacttaatcattactatgctgccctcatctcaattcagcctagcttctacttttaaatgaaatccacttgtaatgttaacttgttatcaataatcaaattatttattgcaacaaattttcaattgttccccattcacttatatgctctccttcttctttgtaaggcgtcaagtttttgttttacaatttcaagggcaatcaaacttggccaagaaaaaaattgaagcgtataatgagtttctttttcagggaaagaaaaaaataaaataaaaagataagaacatattgatattatttaaatttgaggtaatttgcagagtctccctaataggaatatgggagcaaatgcgagacatggaaagagaaataaaaaaatttaaaaaaaaaaaacgaaagacagggaaaaggggatatataatattactgtccaacatgatggcacattaattaatttgacttagtgatacggcataattaaaattccacgtgttatattttaattagggagca

SEQ ID NO: 21708 - DNA, 639 bp, Glycine max
  Intron number 1 from transcript Glyma07g18550.2 (locus Gly ma07g18550) derived from phytozome v7.0 (chr-ID Gm07; pos 18543753 to 18544391)
aattattgcaagccaaaaccatcgacccctacaaggtttgaaaagtttcgtcttttttttttcctctctattttagtgcaatttggtgtgaggtttgggaatttgtggtgggaaaggtagaaaggtgttgaatttgtgtgatttcaaatgtattgattggtgggtttaggttagttgcattgcattgcattacattctcgggaatttgttacccagcttaatttttggttgcttatttgaactctcagtttggtgttttgtttttaaaattgagaaatttgggggttcatttgcgaaattagggttttggctgacctgattttgacttttgtgaatcacattgtcaaagtttagtttttctttcttggcttgatggaatcaagcaatgtgttgtgtgcttcaattgaagattattcatttacgagtttttgtctttacttggagcgtaagttcagaacctgaatgagaaaaaggtgctatttatccgcttcaagctatcactgattagtgatcacgaatcaagatggagaaagaaaaaggattttttttttttttatgtatttgtttgtttttttctgagagggtggtgaactaattgtgtacgctcttcaatttttcaggttcttggggttgataaaa

SEQ ID NO: 21709 - DNA, 1027 bp, Glycine max
  Intron number 1 from transcript Glyma05g09440.1 (locus Gly ma05g09440) derived from phytozome v7.0 (chr-ID Gm05; pos 9226896 to 9227922)
acgaccagttcctccggttgcgggtaacgaatcctgtccgtccattattttgattttgttttaatcaaaagtaaaacaaagaagaaaaaacgattttttttagatatatttgaatacttgtgagtcactcatatagaaatttgttattattttatttgatattttttatttcttttatatttatattaaaaaaccaagttgatatagataaataatttaagaaatgtaaagcaagctatttactttttattggtcgaaaattgaatatcaaaaagaaaaaaaaaaagattaacttgacaagtcatgaatactagttgttggagtagttgaagcaccttcctggacttttctccgaaagtcatttactattgccaagtgtcgagctatttcctaactaggacaataattaatgtatcgtcatgaaggacaatttcatgtgctgcgcgtggaccgctgtttttatccacggaatacgcgccccacttaaaacgcaagaggaatctacgtttaaaacccaaagtttagaactccagcatgatgggttctaaactccaacatcttccttgttacagtcaagtttgtcatttttgtcaacttgaccatttaattaaggaaaaaagatttcggcagtttaccaaattctctaattaatatttagttaaaattgtaaatttgatcttccagcttatctttagtaagcatgttgaccgccatgtgttattgaaagaattgaaaaatatccattaaagtactaagcaatttcattgaagtttcatccatcaagccactggaaactcaaaggaagaagccaaggtagattcaaaacacatggctatatatagcatgtttcgcgcctccaaagttttaatcttttcaattgcaaatctgacatttagtttcagtttaatttaccattgctgctgctcttatttttactggattgcatattgtaaatagtttcattaacccgttgttctactttcatcaaccagaagaactaactcggcgaaaaaaaacccaaataaaa

SEQ ID NO: 21710 - DNA, 531 bp, Glycine max
  Intron number 2 from transcript Glyma05g35210.1 (locus Gly ma05g35210) derived from phytozome v7.0 (chr-ID Gm05; pos 39303430 to 39303960)
gagcaatcttcaaacaagtaaggatttttattttcatttaattttcctttgattttcttctgtttctttttataaacagactcctcattctctaccttatggtatcttttctgccctcataaatgttatcttcttttatcctcataaatatcttttctgatgggttaactattagtatgagaactcttagagagacaagactaaggaattcctataaggataggattacaccaaggctcagccttgagtcattacttgtttaatttagtcgtggatgtgcttcccatagacatacaacaaacctgtttaaattacatgcaggtacccatttagatattcatggcagattttacctgcgtatacggatttttttgccatccctatgtgtcacaaatataagaacaattacaagaatatacagttacataattatgacaatgttatctgaccaacttgcaatattactataataataattacatatttccaacttgtttatggatttgcatttttttaccaggtctgccaact

SEQ ID NO: 21711 - DNA, 895 bp, Glycine max
  Intron number 1 from transcript Glyma07g32450.1 (locus Gly ma07g32450) derived from phytozome v7.0 (chr-ID Gm07; pos 37344759 to 37345653)
ggaagcttggcactgattttgtaggtataacatcattattcatgttcttaatttgcatgttaaatatggagaaaaatgtgtttttagtctttatatttttggtaaaatataattaaggtttctgtacttttatattgataaatttaattttcaaaattttaaaatggtgtgtatttagtctcttttatttctaagttttcatcatattttttaaagttataatatcaataaattgttaatcccatcgatactaatttcgatctacttatacaaaatctcgatttaagttgtgaaagaaaaaaattaacatgtaatcgagagaaaagatttttctagaagtgattagtcagttatacaaagatcaattataagcaaaattagtgaatatttcatataaatactatgctaaaataattaaattcacaattttttaaaatttaagaattacttttaatgaacatacaagtatctttaacctttttatcatttggagattttttttcttcaaaattatcaaatgctaatacaactttataaacaagtcataaattttaatgacttcactttatagagttgtaattatttgtatcattttttgtgtaaaagttatataaagatttatgatttttatttataaaatcataatttctttttcgatttatcctaaatgagaattaattaaaaaaatatacctccatttgatcaataaaaaattagcataataataaaatatatatatatatatatcttcttgatcaccattaatcaaaagtataagagctaaatacatattttcccttaaattttatcaattgctatgtatttgcaaaatgatatctcattattgcttggtgatgtagcttcatatttaggcctaaaagagttggtgccacca

SEQ ID NO: 21712 - DNA, 555 bp, Glycine max
  Intron number 2 from transcript Glyma07g15450.1 (locus Gly ma07g15450) derived from phytozome v7.0 (chr-ID Gm07; pos 15267553 to 15268107 reverse strand)
ggctcctgtaagtcttttcaaattacacatgtatagtgctcatcatttgtaatttttttgtctactggcataattttatctgcatgaatgggccaaagctaaattggtaaaataggatctatttgagaaatcctagttatgtctatgctcggtacctctggtgaatgaagtgatgagaattattatttgaaaaaatgttaaatttgtttttttttctcctttaacttattatttaggtttactttgattttttttaggtttaatttaatcctctaatttttaaaatcagttcaatttgatcttgttatttagacagtaaaatcaaattgaattgattttaaaaattagaagatgaaattaaatctaaaaaacaaattaaaatactaaaaaattaatttaacctctggaaaatactgttaacaaaatgatacacttgatgtggattgttgcattttgtgaaattttgctcacaagattgaaggaatgcacatatgcatcttactgaataagaaatgcaaatttttcatgagcaaacaatacttttttgttcaacag

SEQ ID NO: 21713 - DNA, 778 bp, Glycine max
  Intron number 1 from transcript Glyma08g01190.1 (locus Gly ma08g01190) derived from phytozome v7.0 (chr-ID Gm08; pos 691143 to 691920)
caggttctttactttcctttttccattcattcaactgttttctctatcatatcatatcaatggtgtttcacatggttccatgaatcatgaatgaaaacaacaatgttgatccaagtgataaagagcttggtttttcttaaacaatgtcaagagggattccgtggtaaataatatctctgaaacttttatcttcagcaaagtcgaatgatgtcgtgtcatgcatgtcaaatgatgtcgtgtcatccatgtcacgtatttgagacttatggacaataataataaaagaaataggcttcctgaaactagttcttctagctagatggtactaacaagggttagttaggtttaatagaatggactagtctatctagaaacgttgaatcatgtgaagaatacatgtgagaaaaaaaaaaaaaggttcttgtaatggtgtttcaaatgaactttaatttctagactgttctctcaacattatgcaaccacaattctccaataatatttacatcttcaaagtcatgcaataccttatcaaagtaacggaaaagaaaatataatttccaatgccataccttatcaattatatgatcaatgtgattgtgttgtgccaaatcttctactcaaaaggttgttaactgcaatcagaatattcaatctggttatttgttttttacaaatcataccatatacataagtaggagcaaaagttgtatacaaattaatctttgatttggtgttatatttagattgatcctgtaaagtacaagaacatcacatcagg

SEQ ID NO: 21714 - DNA, 649 bp, Glycine max
  Intron number 1 from transcript Glyma05g37860.1 (locus Gly ma05g37860) derived from phytozome v7.0 (chr-ID Gm05; pos 41365034 to 41365682)
tcgaaaagaagctgagaactgtgactgcttgcagggtactactacttccttagttaattcaagttctaagtaaattgataaatttattgtccatacattcagacatgttattgttatgtccttttgcactaacaaaattttgatgctgttacttaactacttttcatgttgttctctaactagagtagtagtttcaccttagtttatatgtagttcctaaagtacttttcatgatgttctctaattagaatagtagttttacctcaataacatatattttatttcgtgaattaataaagtgaagttttaattctgattgaaagataacagaaaaagcaattaaagaaatatgtctaaatttgatctattttaaaggacaaagttttgctacaattctttaaatacttttttgttttgttcctcaatcaaaattagagttttacttggtaacgtaagttaatatttaattgaacctttattagggtaaaattctaattctgataggaaaacactaggaagaaaggaatgcattcaaattttgtcttttttataaagctgttgaattatttatggttttatgtatatgagaattgtctgtttgatgatcatgacagggttccaaatttgtcactcactgggaggaggaact

SEQ ID NO: 21715 - DNA, 879 bp, Glycine max
  Intron number 1 from transcript Glyma08g41810.1 (locus Gly ma08g41810) derived from phytozome v7.0 (chr-ID Gm08; pos 41722930 to 41723808)
tgactttagtatcaaacacacttttcgatccaacggtgagacttgttatgatgcattttcattaatgggtgttgttgaagagagtggcagcagcttcaattccagcattgtgaaagagggtggtgagggagatgatgggttgttgagatgaggggttgttgattcaaacttttgcccatttattaatcatacatggccacgcgtcgcacatcaaggcttttgattttttccttagccttcccaggtacacgaccacatttcttgaaccagaaccccttcaattgattcagacagttttttaccgtcaaaaaatttaaattgattttgtgcgcaaatactaacattttttaatcaccataatttgtattatcaaatatttgatgaacacgtcattgcttactaaaaaaatttcaaatatcagatatctgatttaaaggaaaaatttattgagaattacatgtaaaagtcgattaatagagtatatatgaagaataaaaaatatatttaagagattttcataaatcgatattaattacaacattaacaatttaaattggtattattttacttcaccatcaagaaatagatttccctctagatcagactacgaagtcatttgcctcaaaaccatctttgtttaggggcggtggaaatttggtaaatattgtaaacatttcaagatttacccgaaatggtgtttgttttacactattcgattgaatttggacactattgaaaggttgttcctctcctttcactcagttcactcctctgtcctcttcccgatgtcttctctcatatagcgactctgcaatggtgattatctcccaatttcaacgaagaggagcagaaacccgctcactcttcaccaccacaacc

SEQ ID NO: 21716 - DNA, 443 bp, Glycine max
  Intron number 1 from transcript Glyma08g05740.1 (locus Gly ma08g05740) derived from phytozome v7.0 (chr-ID Gm08; pos 4096261 to 4096703)
tcgcgacgcggatcactttatctgtttctgaataggtcggtatcctttgcagtcatgtcacgtgtttcgttttctctgttcggtttttatatatatttttttgtttggtttcctaccgtgtcattgcacccgatttctcccattcgtttttctgataatcgcttttgttttggttgagactttgtttgcttttaattcacaatttaaatgttgaatatcaagtcatgcgatggttgttgaataactgctctgcttcttgttcttttctcttccacatattgagaacaaacatcggtaggataagtttttttttgttgagatgattattgttggtgaataaatagatttttatctatttttatgctttcgtgttacagaagtatgatgcaactacaatttgatattatgttcatttgcaggttcccgacgtattttgacagagg

SEQ ID NO: 21717 - DNA, 821 bp, Glycine max
  Intron number 1 from transcript Glyma08g22630.1 (locus Gly ma08g22630) derived from phytozome v7.0 (chr-ID Gm08; pos 17183142 to 17183962)
acttccctcctgctctttgtactctctccctctatttttaccatgctttgttatcccactacctttactcatagctagtgatttaaaatgaggtttagcttcatttgcaaaaccaaagggaatcaatttcataacattgaaaaacccaatactaatcagtttggaagtagtacacttttttagtactgataaaaacattgatcaaattcaagaaacatttatttgttaatgtttttcatttggtgcaagtctgagagactaatcttcaaaattcaaatcttttaagaacaaataatacacgcattaaaaagtgtaaatattgccttcttatcccaaattgtcacgaacataaaatttgtttaacttttataataattattttaaaaattatactggatttacaagtcacatcatcttactatacattacagtattacagtttctaattgcacactatttactcaaaaacacttatattttaacaatgtaaaaagtatacagtatttactaaaaaaacttgtatgtcagcaatgcatgccaattaatttcattttaaaaaattgataacttactgaatttagatatttggatttgaatctaagttttaaaaaaattacattcaaagataagaagtggtgaattgatcataaaatggtagtgattgtccaagttgtaaattttttgtcatgaagagggaatgatgtgcttgttttgtgtaagttgttagagttgtttccttcaatcagtacttgtgaaagagaagcttacattgttgtgtttgtttgttagagttgtttccttcagggcttgggagtgcactg

SEQ ID NO: 21718 - DNA, 687 bp, Glycine max
  Intron number 3 from transcript Glyma05g31740.1 (locus Gly ma05g31740) derived from phytozome v7.0 (chr-ID Gm05; pos 36822334 to 36823020 reverse strand)
tttttggagattggtcagtgttttttccttcctcctacaccgatttttgattcgtggatttgatacatatcttattttgtaagcacgttgcatggtctatttattaggtaagtactgtgaaaatggtgttatttaagtactgtcctaggtcttaaccaatttgggttgtcattgtttatcatccaacctaaagatttttgtcttgtcctttcaaggcataagcattccttcaccagccttcttttagtaagccacccattaagaaggtttgtagcaggaagagtggtaacagaatatcagtcataaggatttattaatagcaatgatttttagtggccaaatacatgtaataaatatagctagaataaatggggaagagagagtctgtaactgaaaaatcaatctattagcccaagccaaaatgtgtcccctcttgccagctcaacacccctattttgttgcttacgtttcttatagtaaacttgctgaaccttgggcctattttccatattttgtatctgctgacccaagttttcctcttgattcctatcatagtttgtggctgctaaactccattctcaagttacactagaagctgcaagcagttagataaaattttaaatttaatacaacaactgcttttctattctggtataggtagtactgaagactattggaagagacagg

SEQ ID NO: 21719 - DNA, 682 bp, Glycine max
  Intron number 1 from transcript Glyma06g44450.1 (locus Gly ma06g44450) derived from phytozome v7.0 (chr-ID Gm06; pos 47377424 to 47378105 reverse strand)
aaggtaagtagaaaaaaaaaaaaaaaaaccctgaattcttttatgcaaattaagcatgccaaattaatttacatatttgtgaactagtctagtttaagtttattcatcggtgtgttttgcatatgcaaattcttgcaatgttatggagttatcttgaggtttcttgctttgtttgcaagaaaatgcaactagttaatttgttctttcaactagctttctgaacagtgcttgatatgctacgattttctttcaatgtctttttcttgcttagaaagtatatatacaaagatttcatgcgataaaggtagattggaaaatttcaaatttcaatgcattgaatcaaatatgtggagattcatttgtagcatctgaaactgatcattgcagaccattcttctgttctcgtagtattaagatatttgatgtgctgagttttcaattgggaaacgaaccattcactttgttttagattcgtattcttttgctcaaatgcatgacttgacagtttacaatgtggcaattcaattattttccattttttaaaattaaaattagaactctacatttttatttttatttgttttcaaacatgttattagtttcaaggtctagcttccgtaagtttactttgatcatcatgtgtctaggtgaaagcagggtttgcaccaccagacacagggaa

SEQ ID NO: 21720 - DNA, 1035 bp, Glycine max
  Intron number 1 from transcript Glyma05g26350.1 (locus Gly ma05g26350) derived from phytozome v7.0 (chr-ID Gm05; pos 32330474 to 32331508 reverse strand)
aattattcagttcaagttgaggatattgatgtaagttgtcttacaaatttttggaatattgattatttgtaatatacagtgttgctttttgtaatttggtttgtattatgtggatttaatatttatcttcttttggtggttttgcaatgaggctcctcctagtatcctttttgaatttttattttgtttttctcactttttttgttctgttaaaaatattcacttttactgaaatatgaagtaaaacaaacttatgcatgcttttcatagtaggctaaaacctaacaagcacggatatgacaaaggagataggagatggatataatatgccatgaatacgagaatacatcaaattttaaaaattataggacatgatatgagtataatacaacatataaaattaacaataaaacagattttaaatcaaaagagagaattagtgttttaaaaatgagcacaagtcatggtagatataataacatgctactattatccaattttggtgatgttctcatttgtattgtgtaagagtttaaaaaataaaggtaaaagaaaattgtaaaatgaagcaagtagtattcaaaatttctgacatagatacatgtttgacccaggtagaacatgagaaaactactattttgaagagtccatgcttccttggctaaatcaagaagccagtttttcattttttgttgctctcctatcttcagctaatcaggatcatctgttacttgagatttgcaataatttaccatttttttatcttaacacaatattttgcatttatttcatctatttgtcttggtttggtgttttagtcacagaattatgtttccattagtcatgatttcagacaaaatttatgtgccattgtttccacttgcaaaaaatgttcaataatatttgagttggagaagacttgccttgatcagcattttcacatcactttcttccggagttaaatgctgacagaaacttgttgctttcccttttcccttaggttgtgtgggtacctggtagttttgaaattggtgt

SEQ ID NO: 21721 - DNA, 937 bp, Glycine max
  Intron number 1 from transcript Glyma08g18810.1 (locus Gly ma08g18810) derived from phytozome v7.0 (chr-ID Gm08; pos 14205499 to 14206435)
agaatttcctgaacagtcgaagggtaggattgttctgcttttgatctcgcatttttcggttttagtgagggttttcgcagggctgtgccatgaattttgtgtatgcaaatttgttacttaatcaaaattttcctgtgacagtgtttttggctgctaaagacagaatttaatcaatttagtgaaagatagtgtgaggtaaacccagaaaggaaaaattaaaaaaatcacaaaggaaattccaattgcaccacctaagagaaagggcaccattgtataatgtcaatattgctttgaaacagaaaatcaagtattcgaagaagtgacaatttttttttgtggctataatttctaaattgggatgaattgaattgagtctcgggtatttgattgtagttatatgcatcctatacaaatggatgttgttttttccttgttatatttgcacgttttgtgtgtattatagtcatggttgtaaattatggttggcaactacaattgtgactgcaatatggcagtttggaaggttttacaaactgcattgtgaccacaattgtggctgcatttgcctgcaaccttctacaatttctgtaatcacaacacagctggacaaatgtgtgtttttctcttcaatttacatcttagtttcggatgtttttcagatttgtgttgctacctacaaattttgtcatgtctgttatctgtcctcttgttgtatgattaactccaagttgattatatgacatgtatcatactatgatgggcatataacattttatttatgtgaagattccagtttctgttgaaatgatttggatgatatcattgatatggcattttctgtgcaaattaatcccgatgacaatcaagtttaatgaaatttacacttttgtcatctcttgcagagaagaaatagttttaaccaaggaaggagaagggt

SEQ ID NO: 21722 - DNA, 634 bp, Glycine max
  Intron number 2 from transcript Glyma06g19970.1 (locus Gly ma06g19970) derived from phytozome v7.0 (chr-ID Gm06; pos 16347525 to 16348158)
cctgaaaacaccggagaggtatgaagtgctatctcatcttgataatttgggagcttgtatttttgaaatgttgctttaaagtttgaatttgaaatatttgactaggctgctgccttttgatgacagtgaacatctattctgtagtcacatatattgaactacataaagttttagttgtttcttcgtttgtaagttaggttaagatgattactgttgagatgtatttcatgctttccagattcagtagaactgtcttgacatctgatctgattaccaattatatcaacaaattacaaatattatatattataacatttttcatatgattttcttctgtacatggttgttccttttttctgaagatgctgtaagagccaagcatcacatgcattcttctctctttctttttttcattcagggagggggaatggagtgggggggtgttggggggattttattattgtgaaatttttttatgtacagtgacttggatgatatatatcatctgtgttggatctttgtattcaattgtgcaagtgtgagccaattcaggtattatttgattgaacatgtaatggacttgcttgtcttactatctgtcatttattctgtgacaggtgccttttctttggtg

SEQ ID NO: 21723 - DNA, 503 bp, Glycine max
  Intron number 2 from transcript Glyma08g19330.1 (locus Gly ma08g19330) derived from phytozome v7.0 (chr-ID Gm08; pos 14634093 to 14634595 reverse strand)
gctgcttgagcgctttttagcttgccgtcccacaggtttgtatttgtaattattattagacaacaaaatgttctccccaaaatatttataggacaaaacttacatgcaattctttagattctttgaatttcatctaactaatctatgttatctttaatacaaacttttactacacgtattactgaaatgaaactctaattttgatcagagaacaccactgaaagcatctaaggaattgcattaatattttagtttgtcctatcttaatcatcagtcaaaatgcatcatttattatctttcatcttgattaaacatgtttatttaatcgaatatcttcattcatgtatatgtaaatcaatcagctcacatccttgtttcactatgatgaataatcacaatttttccaattattgttttacatgcataatataaaagtcaatctcatggttatttatttcaatgcaacaggaggtgcaaagaaccatcgaattgtgatagtggct

SEQ ID NO: 21724 - DNA, 414 bp, Glycine max
  Intron number 1 from transcript Glyma08g19330.1 (locus Gly ma08g19330) derived from phytozome v7.0 (chr-ID Gm08; pos 14635298 to 14635711 reverse strand)
atcttaattactgccctctggtcctcttcaagcaggtagggtcccccaatttcccatcacccttatataacactttaccattcataattattttatgtttctaataagttgttgataaccagttttcttaaggatattaattaaaaaattaaaagaagaaaatatttattatgaaaatcacatgaaaatataaaaaagtcacaattttgtgcattcaataaaatgattcttcttctaatcttttaatcaatgccccaaagatacaggttaacatttttcttctcataaatattttcatatccaggaatcaaaacttatcatgtttgaaatactatgttaatgctatgacacttgacaaactaatttaataaatttgcaggtctagtaattttgaacatatttgatcaggtcatt

SEQ ID NO: 21725 - DNA, 873 bp, Glycine max
  Intron number 1 from transcript Glyma06g36720.1 (locus Gly ma06g36720) derived from phytozome v7.0 (chr-ID Gm06; pos 39068618 to 39069490)
tgattctttgttctgttgtccacctacagatacaggttcgtgtctcatttttccttgggttgtatatattgatcaatgttatatagatatagaattatagattatgataaatcctatgatttacacttagtttcatgcatatttgagctaaacattcagccttgtgttcatcaccatgcagtttctgttgtcctatgttgtgtttcaacaaaacaaaaaagaaaaaaaacaaaagttgaatgtttgatctgggtgtttttcccctttatccatttttgaggatcattttctgcataaaccgtttttggggtgcatattcattgttcttttcaaaaaccttttgaaaacgcaattaggaatcaaatttgtttgtcactgcttgagctgaactggtcttgattttatcacagcgatttgttctagatccttgtttttctgtctattattacgttacaatcactgaatccattttgccagtttcttttatcccttttttaatacctcattgacaagaacaagtacaatagtgttttaattttccgtagttttttaattcttaattttgccacttttcgatatcttttatgctccagatttgtccctttctgataggaaatacattactgacatcgaatcacaacacatgctcacacatgtgttgggaaattttggtcatttaaaatgtatatatatatatatatatatatatatatatatatatatatatatatatatatatatatacacacacacacactggtgcttaacatgtctgattttggaaactacaattcctttgtttatgaaaacaatgaatatcaatattcatttcttgaattgaatacacgatgttgattcaacagacactattca

SEQ ID NO: 21726 - DNA, 620 bp, Glycine max
  Intron number 2 from transcript Glyma06g36720.1 (locus Gly ma06g36720) derived from phytozome v7.0 (chr-ID Gm06; pos 39070157 to 39070776)
tagtgcttcagattatccccttgtgactcagggttagtttcttatctatatgattctttcaatttgctttttgttctgattcaaactgtatgtggttgcaactgtttttgctcatgactgttagacacttgtgaagcaccaatactttcatttgcttcacgtatcaatactattagatatttcactgacacgtttctgtgaattatccaagcctttaagaaaagttttgaaaatctgatatagctacatacgagatatgaaaacatctataatacagaaacataaaagcatcattccttaatgaatcaaaaaatagaaattgtactctttgtggatgatcttaagaaaagaatgtgattgatatttggtagtaatcttatttgtaaacaataggatgtgatttatgttgacagcgatttataatttttattttgtttttagtaatgttgaagatatatattcctattgctttatgaatttgttacatagtttgctcgtattgtatcttatatatttttagaataattgtattgccatattgcatcaatcatatctatgcaacacttaggctaatagtttgagcagatcttctctatactttttctgaggttgacagaagc

SEQ ID NO: 21727 - DNA, 447 bp, Glycine max
  Intron number 3 from transcript Glyma08g20540.3 (locus Gly ma08g20540) derived from phytozome v7.0 (chr-ID Gm08; pos 15556220 to 15556666)
actcaatctctggctccattagcaccaaggctgtaatctgcaattctgtctgactttactcttctcctgtttatatatatatatatatattaattgttaaataggataggcaagatagttgaacacttgaacatcaaacttctgtgtttctatagtctgctgaaactgaatggctctactttggttttgcctttaatcaaatgaacattctgcactctctctctatagtctatactccgactatcttttgctacgtgggccatgcatgataaactaaaatccacattaatgatgttgaaaatctgctgtcatacatctctatatgcttgtggtaaaaaacatctttaactcgtagtttgaagctagggttattcttggccttacgtgagtgctttctggatgctgaatgcagacagttgagggacagaagaagaagctagaggaaag

SEQ ID NO: 21728 - DNA, 899 bp, Glycine max
  Intron number 1 from transcript Glyma06g21130.2 (locus Gly ma06g21130) derived from phytozome v7.0 (chr-ID Gm06; pos 17566537 to 17567435 reverse strand)
gaggtaatgcaatcaaatcactttcttcacacacactcttcaattcaacacttgttctgttattgttgaggttgatgatttttaggcccttgtggaaatggaaaactatgggaacgggaagaatgttgtgaaatgtaatgatcaggttcggttgacaggaagacgatagagttttttgccttttgtgatcactactttaagattgttaaatgcttctcttttggtgttgatttcatggatgttggaactggtggatgtaatgttttatatgattttaaaattggacaatacttatatccagttcttttgatgcttaatgttgtttttcaattaaaattagataacttttcacaataaagcttaacattttggcgttgaatagcgagaggtgaactccaattttagttggagaatagcactgaaaatacctaaagaattgtgcccaagttttgacttataaaaattccattttgcaagtttaagccgaagcaattaaaagcatattgtatgaaacttaaacatgtgtcaaaggctggctactaggaaatgtgtgttgaagagcccttccttgtgataatttatttatattgaaccattgatgtaattttcatcaaagaggcttaagctcatttgttaaggatgcaattttttatcaactcccccctctcccaacgcacatacacacaaaatcaggaaaagaagggaaaaaactgtagcttttctgtctaatgtttgctggttaccatttgtgctgcagaacaaaagaagcaaaaactttctgatataaaagctggattagatgatgctgacacattggtataatggaacttttcctctgttcatcctccagatgtttgactctattataattcctgcttgaatattttcagattcgaaaa

SEQ ID NO: 21729 - DNA, 626 bp, Glycine max
  Intron number 1 from transcript Glyma07g31750.1 (locus Gly ma07g31750) derived from phytozome v7.0 (chr-ID Gm07; pos 36710636 to 36711261)
tctgcagaagattgcacctgaggcttctgaatgtatttgataactggttatagattttttttcttttaattacatgtagtgcatcactgtgttgatgagtaaagggattcatctgtcattaaaatgtttataccaagaattccctttgtataagaaattgatgcagaatattggtatggtttgtaaataagttggcatttttgccatacaatgtacaattgctataatgacatttgattattcagatgctgatcagtataatcacttttatctggcaaatacaaatgccgggactactttagaagtgaaggaggggggaaatgagggaaattagatggagaaagaattgcagcactcattcatgtctgattttcttacatccattttgtttgtcctcctaagcgtactagggatgctacttagtgtctcttccaattctccatgtactttcctttggtcttctttctcaaagtgtccaaatcacaaattagaagaaggatttattttaaaccagaataatttgttcaaacaggaaagaattatctacaatagaacaagtacttactgcatttttctgtcttttttttacatgtattctaatagtttcatcctcatatttcaggtat

SEQ ID NO: 21730 - DNA, 828 bp, Glycine max
  Intron number 1 from transcript Glyma05g08110.1 (locus Gly ma05g08110) derived from phytozome v7.0 (chr-ID Gm05; pos 8053555 to 8054382 reverse strand)
tctcagttcaagtgggaagccgataaaatgtaaggaaaccactgattttttgaacctgcttccttcttttctattttctttttacccattttcttgtttcttgttcttcctctttgatttctctcttttgggttttgttcagtttcttgtattggtggcttctgtgctccccgcttcttccctcgtgtttttgttttagggtttaggtttttcgtgtgatcgtgttggtgttgagtttttgggttttcttgcacccccttctgttacctgttcattgctgcttgtgttgcaagccttttgcattatctgcgttttattgttctcttgcgtctcttctttgatttgtttctgcatttcactccaagctttgatttttctttcggatgttttcagtttcgagtagttcatgtgtaaacttacccaccactcgacctttagcctgcttttattttttatctttattttttcgttctcttttgcattatcttatcaactattttatgcatggtgtgctttacatttatggctttatgttttaccagcaatcacattatttggttgttgtgcttgtctctgttatgtcactttcgaaaagaaaatgcttcttgtttcaggtcattgtcacgtggagtggatgttttgtgtttgttagacttgacattgtctagcttgtatttgtatctgcactatccccagtcagtcttgttggttgctgattgctatcactttgattattttattatagttttctcaacatttctaattaactgtgtttgccaatttttggggttggggagcaggttagatttgtatattcacgattatctc

SEQ ID NO: 21731 - DNA, 578 bp, Glycine max
  Intron number 1 from transcript Glyma08g04380.1 (locus Gly ma08g04380) derived from phytozome v7.0 (chr-ID Gm08; pos 3070038 to 3070615)
gagatttcgttgattccttatctggtacttgaatattaagacaaatttaaatgtaatattacaagtattgttaatgctatttttaatttaaattagccttttttaattattactgtcaattttcaattataaaaaaattgtcaattttgacaaataaaaaaaaaaaaacaagaatgacagtaactatgaaacgttgatgcgggtttgcagtaattaaggatctgaaactaacttttatcttctctttagtgtgaatttgaatcctctttatgatcacttttttgtttgatagataattctccttgaagagatcttctcacttctaagggataatttgagtagttataattaagtaaaattacttgtgatttaggtttaggtagcaataatcatctaggagtttaaaaatatagtgtattgttaattatttagatttgaaatatttttaaaaattataatttattttgatttcatctaaatacaaaataggcggatatatttctaacaaaattgtttgtgattatttatattgaaataaaaaaggaaggacatttgagactatagaccccagaacagaa

SEQ ID NO: 21732 - DNA, 990 bp, Glycine max
  Intron number 2 from transcript Glyma08g04380.1 (locus Gly ma08g04380) derived from phytozome v7.0 (chr-ID Gm08; pos 3070705 to 3071694)
gcctcgcttgcccgcctctgtacgttattctttttcctttctttaattaaatatttttttattcttcctttctccaactaaatcatccccagtttcttacattataaacttcaacatgtattttttaatttaactaaataatgaaaattgtgataatatatgtttactcaaaactttcgaaaggccatacttttatacataccattatcaatgacctattcggcaattcgatctaatcgaggccaagcagtccaatgttgaacaagatacttatgaactcatgtttgacttagacggagtgtatattgaggaacaacaaaccaaacatcatttggtagtctaagactattaactgtttgccggctagacatatatttaattttttgtattttaccataaaagctaataacacttaattatatgcatataatcatgcataataactgagtagatacaatgtgatataagactacctaataatttctcaaaataaacatatgttttgagtatgctttggtgggaaaaacttctagttagctcctaattagaagaagcatgttgagtatcttaattgaaatttatattttaattgtgcgatcataagtctgacttttttttacagcaaacatacgactgacattaagcgggcaattaagtggaaaaattcaattgtaaagtaaatattggaatgacaaatgtgaatggaaaaatttaatattatttaagaatgaaaaaattaaacaacttataaataaataaataaaggctaaaataaactcacgtgtgtggtttatgtttattgatgaagatttctatgatattttattcttttatatttagtaatagaataaatttattgtacttttgtgattatttataatttaattgtttattttcttgtttgaatttttccttctatcacttctaatcctctttaaaaatcttaattaatattgacatcgtatgctataccaggaaagggcaaaaatt

SEQ ID NO: 21733 - DNA, 695 bp, Glycine max
  Intron number 2 from transcript Glyma08g06510.1 (locus Gly ma08g06510) derived from phytozome v7.0 (chr-ID Gm08; pos 4673757 to 4674451 reverse strand)
agttaattaagagactaaagagagaagagtctcaggtaattagtactcgagtttataatataggaattgattaacaagaagtaaaaaatattaaaaagaaaagtatttcaaattatacttaaattatgggtaattaattaaactttataattagctaacatatgtttgtttgaaaaaataaaaatacttatagattaataagaaattatgtacttactttaaaaatttaaaattagatgttataaaaaaaattagaaatgactctaactatcatacggtattacttacttttgatattctagttatataattcaccttgttttcttaagtatttttgatttaacagttttaattaaaattatcttaaacagattctgttatacaaaattacaaatctgaaaactaatctccgaaaagaaataaaatacaaacaagaatatcgagcttagatttgaactaaaacataaagtaaatagataagttagaaaaatggactagatataaaaactaacttgaacgaaacatttaaatttaattttatttacaactactatataaacacataaagctttggacgtaaccatgtttccttagtcaaagaaaaaaatggtgagaaaatcctccattctcttggcgtgcctcttggccatattcacatcatgttgcaactctttgcctctctcagttcacaagag

SEQ ID NO: 21734 - DNA, 949 bp, Glycine max
  Intron number 3 from transcript Glyma06g10930.1 (locus Gly ma06g10930) derived from phytozome v7.0 (chr-ID Gm06; pos 8289238 to 8290186 reverse strand)
aagaggtcgagagcttaaataaacggtgagatctgctctgttctctctcattatttcctgtaaattcaacttttatgatgtttcattaataaaactttgaaacatttagcctttgaaatttgcaaagaagctgtttcccttttttcccccaaaatatttggcacaatttgttttttttcttcctctgcttgtttgtgccattgatctgaaatcaataatctgattattttttctggtcacattctgacaatttgagcacattatcaaccttattagaagcgaatgttcgaaaagggtcaaatgaaattggctgagtttgttggatttggatgatcggatctattaattaaacctttctccgttttagaaaataaagtggtgaattgagatattttggtcgagcttggctacacgccattcttgccataagagtagggaactcacatttacaacattgcgctggtttaaaatagttatgtgaaatttaattcaagatatcttcattctcctccttgtacctgcaaaacccacaactttagcactcattcttattctgtgcatgtatgctataattcctcattgtgagctatcagcatcacctttttgtggaaatgagtcatatcacttcaagagacccaactatctattgtctcagaatgaagaaacaccatttattcatctatcttttgtctccctttccctttctcccagtcctggagcgtgtaaagaaggatataaaagagaaaatattggtttccttttcttatatgtatttttcagtttcttgttcctacattatcatgtgattctagacaagagtgaaatgaattcaagctcaactattgaatcatattatgaatactagatcaattttgctctgtctatatattctgtggcatctgaatttatctagtgtggaatttccagaaagccttgttcggattataag

SEQ ID NO: 21735 - DNA, 962 bp, Glycine max
  Intron number 2 from transcript Glyma08g38160.1 (locus Gly ma08g38160) derived from phytozome v7.0 (chr-ID Gm08; pos 37057642 to 37058603)
tgaccttgccgctgccacagacgatttcagccctggtacgaatcaagacgaaactcaacacactcctgttcttgttatcaatatttttttctgatgatcataacattagtaggaaatagtcccaatgtttaataaaaagtaaaaatataaatagaagaaaatagaacaaatgattatcttcttgagacaatcgttgtcacttataaaaataaaaaaattgattatcaacaattcataattaattgttttttattattattcatttctttgttgttttgtagaaaaataaatgagtgtgaaatccatacttttttatatttctcttctcttatttttacagtactaaacacacactatttgattagcaccatgaacatgtggttactgaccacctaatatataatttctaataattgttgttgagtgatctagttagtgatgaatttgatatgtttttcatcttggtataaatagtggttcaaccttagaccaaataataatataccaataatcaaaaacattaattttatataaaaacatatacacttcatagaaataaccggtaaacaagttgtgacctattacgatttttttcttaattttacacactcaacttaaaagggttggaagagtgttataagactatgttgtgttcagaaacgaactatttaagagaataatagtataaaattttcttaaatcaataccggatttgtccatagggttaataaaattttacacacaaaccttaagaatgagaaaaaactgcaacttttattacctaatccaagctgctgttatatctcatcctctaacaaaactgcaacaacaatgatgaatgaacatctattcaagattattccaaggatgagtaacgaaatgtatctcatagtttaatttgttagcctttttttctgattctatttctgtttctgtagtgaacttgcttggaaaaggtggtc

SEQ ID NO: 21736 - DNA, 753 bp, Glycine max
  Intron number 1 from transcript Glyma05g33010.1 (locus Gly ma05g33010) derived from phytozome v7.0 (chr-ID Gm05; pos 37785271 to 37786023 reverse strand)
cttccgggattgctggcttcactgctgcttattgggtttgttacttcacttcttacacttccaccctaaggtcatcatttttaattttctatatggccgcaaccatgcaacctaatttcgtttcttgatgagagtctaggattaaaaagacaaagtaaattattcaacatacatactaaaaatgaacaaggatgtgtatacacgatatgcatgcacgctttcactgtttagtattttctgaaatgcatcaaaattatattaactttaatttaattaatgtgtgttttttgctttgccttgttccacatgaccttatttccttctataattaaaaattaaaagataaaagtctagttaagaaacatagtttaaatgaaaaccggaaccgtttgatagtgtttgtattttatatatcattaatctctcactatatatctaataatttttgttaacataatgacgcatcaacaatcacatatatattttaatagggttagctaagcttacacgttaaattaaaatgtaaagcttaattttcttggtgatgcaaccacaatatttaaataaaagcgggaaattaatcaaacagaattaatagagtaattatcatcatcgatcgttatcatggaatttgaaagcaacgaaattaatctgaagacaaagaacaaggtggaccgatggagaatggtgaaatgataaaattttgaaaatgaaacaggtggggccaagatcgaagaaggacagagagagatt

SEQ ID NO: 21737 - DNA, 1024 bp, Glycine max
  Intron number 1 from transcript Glyma06g06460.1 (locus Gly ma06g06460) derived from phytozome v7.0 (chr-ID Gm06; pos 4615155 to 4616178 reverse strand)
acctccccggcgtcgctccacaggacttcctgaaggtataacccttgaatttcaccctaacacgttcattgattattttctcgtttctcgatccgtgtttgaatctgaagaagtgagatctgagttggattggaatggatcgatactaggtttcttttttcattattaagttgtttctactttgtttaaactcgatagaggagctggaaatggtgggttatatggaatgttgagttttagttttattagatctcttcgacgaagaaacgttcacttcgtgaggccgaaagagttgatgcctttttcgtattttgttgtttgtttatttctgtttgtgtatctattgcttcctgagagattgcgaagtcaaacttttgatttatattacttgttttgccttttatcggttgcagtttggttaacattgcattgtttatttttatggatgaatcaatcttatgatggatgctttgattccctagagctaactagaaatagttgttgatgtatatttatgtggaaactttaaaaaatgttagagaattggactcctttgtagaggtgtgtgtagctgcagtaccttttattgcacttatttgtattgagaaattgatgtagttggttaaagctttacagaaaagaaaaaaaaaatactaacttttgtctcttggattttttcttctgtctttctagtatatgaactgttagttgtttctaattataaaggatatgtcatcagattattttgcgcagttgaaattcttgcatactatcagtttgcaatcttgttagcaagtagcaactacaatgacacttataaacgatggaaaaatctatttgactactgttgtgcatccccttctaaagaattgtctgtgcctgtctttttgtcctgcttgtaagctggacaaaatgaggaatattctgaattcattatggatctacttcgtaagtccttaactgactttttacttatttctttgctgcagggagatcaattgcaagtgaaagtaaataaattaac

SEQ ID NO: 21738 - DNA, 741 bp, Glycine max
  Intron number 4 from transcript Glyma06g48060.1 (locus Gly ma06g48060) derived from phytozome v7.0 (chr-ID Gm06; pos 50378113 to 50378853 reverse strand)
gaactgataccatccttgaggtataaagataataatatgtcatagcccacagaatgtttcagtgtatcaaagtacaatacataatcccttggtttatctgattttgtggattctaaaatgaatttgtttgttttataatttgaacaagttggatacagaaccattcatgagcctccacctcacagcttaagcttttacagaaaatgatccttgacatggaattagggcttttatgaccaagcaaagtggccaagagttccgttgttgctgcctaataattcttctacagataagcttaatttctttgcaagacaaaatttgcattgtctacacttcaagggaggcatgttagatataaagaaaaccattgatgggcatccacctaatagcttaagcttttaggagagttgggctttgacataatattagagtctctacgatcaagtggtagtttgatatctgctgcccccaattctgtccatgcatcaagcacaaatagttcttgtgaggggacatgttagatataaaacctttcatttttctaatggcataaggttttaggagagttggtccttgatagaaaagaacagaattatttaattttttaatctttgaatatttcagcatcagcatattttctatgctagaagacaccttatgtatgttttattttgctttggtgtgattgtggtgataatgtttgaaggattttgaatttggagagctggaagaagtattgca

SEQ ID NO: 21739 - DNA, 781 bp, Glycine max
  Intron number 1 from transcript Glyma06g48060.1 (locus Gly ma06g48060) derived from phytozome v7.0 (chr-ID Gm06; pos 50379573 to 50380353 reverse strand)
tcttcttctccttcaacattcccaaacccaaaaaggtatgcataatgtttctgtttttagtttttatgttatggtttaaataataatgataataggtgagaaatagaaagggtggttatgtgattgcgagatcgaagaaaatgcatgaaattgaaatgaatgcgttttttatttgggtgaagaaagaaattaataaatgcaaccacggatccaactcaacccatgacgttaattaattaatatactacgaccctcctttcattcatgttcatgtgtataactctttcacatcaccaacttcattaaaaacccaaccccaaaatttttgtgtaccagccagccacattgcaatcgccgaaatttttccacttcgcgaaacggcgagtcgttttggaatcctgagttttggtttttgctttcgtaggttttgattggggttaccgagcgaacaggtgttttaacagctacaaaataaggttcttaaacgacaattctctctccttatttgattcacctctagattctttgattccatcatttcaatgactctgcattttactttttcatttttaattttaagatatgtaccttacaattcactgaaatattagctttttttaatgcatttcctttcttgagtttttttttctttccataatttttaacttttaatttcaatttttggtttgtgttgtgtgtggatcagtaatttattttcgcatacttttttatttattttaatcttaacttttttggttgtgtatgtgtggagcagtgattt

SEQ ID NO: 21740 - DNA, 364 bp, Glycine max
  Intron number 1 from transcript Glyma08g06610.3 (locus Gly ma08g06610) derived from phytozome v7.0 (chr-ID Gm08; pos 4763571 to 4763934 reverse strand)
ccctctgatctccctctaccttctgctcccggcgtgtaagcaccgcccctttattgttcttacctttgttttcaatctattgttttaaatttttaatcttttcgtgttagtttgatttgtcttcgattattcgcaaatgggtacccctgttgatgctgcggttgtgaaaagaaaaaaaaagggtgtttgagagagaaattagatctgtggataagtggattgactggattctaattgttcatgatttttgttttcttttgttgtgatgaggttcttcatgatggatctgtttgtgcaatgtgtttacccctttttttgggtttttgcaggactgtgaggacttcagatcgtgctggttttgatc

SEQ ID NO: 21741 - DNA, 853 bp, Glycine max
  Intron number 2 from transcript Glyma07g17140.1 (locus Gly ma07g17140) derived from phytozome v7.0 (chr-ID Gm07; pos 16837389 to 16838241)
ttgaacgagggaccctataatatcactattcattggtaagccctccatacgcatgattttaaaatagcatgaaatctttcgtctacttattcttgatcaaagtttgcatgtcaatactataaatgagcatctcttctctatggagggtcaaaatgtataatatccctaccaagctctatgaactcaaatactctcttggacgaggtgaatcccacctaatatgtggagccatctaaaattaattagactctcacatcaaatgagaatttttacctaattgcactactgatcttagagccttaactttgaataaatatgttttaaatatcattttagtcctttaaaatattatggatttctttttatcaggttgtcctttatttttaaaaggttataatttagcctatgtaaaaaaatttcttttccatatcatttttttattagtttttcattttttttatctgttaagtttttagcacatctcttgaaaaatgataatactaaataggaaacttctgatatttaaaggaattaaataatatttttgtaatattttaagggattaaattaaaaattaaaaacatttaaaaggatactaaaaatatatttaaactttttgaatatgtattatgttactattggtcacctaatacgacacaccggtttgttgagttttgagtaagatataagatgaatatgacggtttatttgatcaatcaacattgttagacactcaaacttcagcttaagattttatgtgaattatattcgtttttactgtgcattgtgtctaaaattctgttttagtattaatgactcattgtgtatgaaatttttaaccacacgtgtaggc

SEQ ID NO: 21742 - DNA, 903 bp, Glycine max
  Intron number 1 from transcript Glyma06g07190.1 (locus Gly ma06g07190) derived from phytozome v7.0 (chr-ID Gm06; pos 5222151 to 5223053)
ccattcggctcttgacagtgacacctcaggtaacattttctgggaactcatcaaaatcttttttttctttctctccccatgtcaagtcctgtgcttcaattaagatggtactgtagttgttgttgttggtcttgatttgttttctgctgcaaaatggagttttcttaattgttcctcattgggtggcactcttttgggatgaaagttttgttcttggaaatggtagtgctgtggagaatgccaatcttgcttgtattactatcctcggatttgatttgctcacttacgctctaaactcttcttattttgatgatgttagtttatagctaagtaccttctttttttttccaatttggttgcttagacgttagacctaagaagtgctttagaagcaagtcaatttggtccctctttctctaatttgtcttcatgcacttggccaccaagtggaaattagatgcatctcttaatctacctaaagtgctccacattattcattaatgtccatgactttgatgtgccctgtttataatctttaactattgtatattgcatttcatcttgtgttatgttgctttcaccattttgactggtaagtaaactcatgacaccaccagacaagtatgctgtttttacacatcaagtgggtaagtttccttgccattagatacaaaggctcgagaattttggttttagaaacattgaaaacaatctcttttggttctttggatagtgaagaaaattatgaggattttctagatatttttcgaaatcattctggctaacaaggcaaaagatgaaattttcaaacaaacaacatatgaagggtaaaacttgttcactcgtgttagattatctctaagttgctgatcattggttccatgtaacttgtagctggcttga

SEQ ID NO: 21743 - DNA, 542 bp, Glycine max
  Intron number 1 from transcript Glyma07g19470.1 (locus Gly ma07g19470) derived from phytozome v7.0 (chr-ID Gm07; pos 19464435 to 19464976)
ggtatgcgtatgggtggacaagtatgctaagtattatttatgtagaagacatcaaatgattgaggaataagggaagaaaggtagctagtgaagcaaaattttatgcataagcataacaaaacaatagctagctagagagaagaagaaaaaagatgagtaggtattcagagtgatattgttttcttcctctcttcctctcagaattattgctgtctccttttgataaaattctccttggtgttttctgggttcaatctgaaacctttcaaagagacaagatagcagggaaaatcaaacgtatatagcctcagtcaggtcctaatcctttctccttttctttcttatgccttttgtttctcttcttttatttcatatatggttaatttccaagagacaagaattagaattttatttttttatatttaagaacttccagatttactctctcgacttcggaaattaaaacatggcttctgcttcctcatccacacccttcttgggaatcagacaagaaaatcaaagtcagtttacacaacaacacc

SEQ ID NO: 21744 - DNA, 425 bp, Glycine max
  Intron number 3 from transcript Glyma06g13450.1 (locus Gly ma06g13450) derived from phytozome v7.0 (chr-ID Gm06; pos 10594268 to 10594692 reverse strand)
gggccaaccggatcaggtaaatcagtttttgccttccggttgagtgtttaatgtttatattcttctagtttttgactttttgtataatgtatgatatgatgcttccatttttggaataacaaattgtttgagtcagtggagaatagatgactctcagccatgcagtttctcagtcagttgtaccgatatgttaaaattgtgtgctgagtcctttgtttatatagcttagtctaccatgaaatcattttttttaatactcaaggttggggcagggggcaagtttgagaactttttttttttatatcttcgtttctttgaacaatcattaatgtcttgttattgctggttacttgtgtaacttgtttttctttgatgctgtttcaaggacagggaagacattacttgccaaaactttggctcgattt

SEQ ID NO: 21745 - DNA, 623 bp, Glycine max
  Intron number 1 from transcript Glyma05g14860.1 (locus Gly ma05g14860) derived from phytozome v7.0 (chr-ID Gm05; pos 16155527 to 16156149 reverse strand)
agtttcttaagtgccatcatttgtcaccagttagacaggagcaaaaagctaagaaacaggacatgggcaattttaaaagcaaggatgaagataggtatacctcatttaatgcttaaatataatcttgttctttatgagcataccatacgtactttcagtcttaattccttaataatttgagttttagtttgtgtttttttatcttgttaaaaaacaaacactttaattctacacattaccatagtttcattacatgttgatgtgtcacaataagctgaaaattattttacacatatttatgaatataacacatcaataaaaaactaacaaccaagacaaagatactttctaatcatatgtcacattttaatttgaacatagaaaaggagacatgaagcatgatgaatgatgatatcaatcgatttacgaaaacaacataaaacaaatgcttgtttctacagaattaacaattttgataatatatatatatatatatatatatatatatatatatatatatatatatatatatgattttaagtagaattcagtcggtatgattatactttgaacatgttatatttttagagcattgactgaagaagagtacagaagcgtttgtg

SEQ ID NO: 21746 - DNA, 751 bp, Glycine max
  Intron number 1 from transcript Glyma06g14380.2 (locus Gly ma06g14380) derived from phytozome v7.0 (chr-ID Gm06; pos 11309944 to 11310694)
actttatccgcttgcttcacttagctcaagagcgtgtaagttaatctccctttgttttcttttgttgggtctgttatgattctttcttaattctcctttatcatcatcaccattattattattattattattattattattattattattattattattattaaggtgtaatgttaattatttttgatggtatggttttctggaacggaaaatatcactcagaattttggcgtatgattcttgttgacagagcgcgtgtgttaattgttgtgttgtctgttgttgggaaaatcccacttggccttttgtttagatctgtcgcatgtgagcgtttgtttctgcctagaataaacgccgtttgtgttgtgacggtttgtcaaaggtagatggagcagttgaatataatttttgttcacgaattagattccagatttgctttttgtgatatcttatttgattttatgacaatggttgatcaacggctgttgactcttgtggcttgtgttgggtcttttcgtttaacaaatatccgtggcgttttgtgaatgtgaataagatattgttgagaagagaaccttttcagaagaaaaccaagataagggtggttggttttggttatagagtgtgtcagatcttaaatgtagtatctttatagctagcagatgaatttttgttgagtttgactgaaatctgtgttgttgtggtggggaatgcagacaattcaggcaaaggccttgaagtcggagtgtgt

SEQ ID NO: 21747 - DNA, 899 bp, Glycine max
  Intron number 2 from transcript Glyma06g14380.2 (locus Gly ma06g14380) derived from phytozome v7.0 (chr-ID Gm06; pos 11311172 to 11312070)
agctagatatatattatttaactggaaaaactctatcatttcacttgtgctttttttctccctttttctatcagatgagtatgaataacagaacctgaacaattatggtttcgtattgatggacatgtatgttcatctattgtaggaactccttatatttctagtatgaatgtaatgtagtgcttaatgtagcttgactgttgaatggggatttgagcaggctttatttagtattcagatagttatgaaatcaaaattgacttcagtttattgctaaccttggtgagaagcagactgttgtagctggattttgaatgctgcactatgaatcaatgatgtacttaactgttaacattttctagccaacctgtcaggtttctagtgtttttgtacggcgctattcgagtattagtgtactcattactaagactagtgctgttaagttgtattattttactcctttatttccctcaattccacgagaacagctcatgattatcgatcttatctcttaggctttcagggttatgttgattgccttgacttctgtaagctcaggttctctccagttcctcacatggacaaaattgtgcatgtgaaaactaatttttaattttgctgcctaattttttcttgatcttttgcaggctcaacaaatatgatagttcacattttcattaatttatcttttgattatcttattcattccatgagttaactgatgtctggctgtctgagtttaatgtgacttgtgcaggttttgaagcatgtgctagcaaggagcattcaaaacatttgtgttgcaatactgaataacattttaacatggatttgctctaatactagaagatgaaatattgatacttctcgttttcttgtaggtataagcttagctgttc

SEQ ID NO: 21748 - DNA, 776 bp, Glycine max
  Intron number 1 from transcript Glyma08g42060.1 (locus Gly ma08g42060) derived from phytozome v7.0 (chr-ID Gm08; pos 41952406 to 41953181)
aggtccgtgccaaatctaagttctggtatgtaacaaccttaacattctgtttctgtttggtgatggggttgtgtgaaaatgcttaattttataatgaattttccacttaagggttttcattagggtgtctatggttggtaggttagcaccattgataggcaaaagatagtgcattttggaatgtggaaaatatgcatagttgctttgaattaagtttttttgtttgacatgattcaacatggaatgttattgtagtatccagttcaaaggtcttgtctttaattccttttatttttttctccccttacatcaaaggataattttcttcttcttttgtaatatgaaattaagaaccgtttgaagcagatctcaaatggatgcttatcatccaacatacataaaaactgcaaaattaaaaattttcatcacaagactgctagctttttaatgtattgctgatcacacacatgtttgatattttctggcaatgcaagaaaggccactttggtgctgctttacaacgccaatttgctttacatgaatgtgtgatggtatctctctctttaagccggggatagtaatgttttctatcatgtgctgtcacaagtttttgcattgctcattttggatgagatcaaaatgatgtttctatttatttattcattgaataattgaaatgttttgtatttctgaaaagcataactattcaccacattttctttttcattttaatttttgcaggtacttcttgagaaagctaaagaaggtaaagaaaa

SEQ ID NO: 21749 - DNA, 756 bp, Glycine max
  Intron number 2 from transcript Glyma08g42060.1 (locus Gly ma08g42060) derived from phytozome v7.0 (chr-ID Gm08; pos 41953209 to 41953964)
aagtatgcattctcttttgtcctgtttatatcaacagttgcaaataagctacatttctacttgaagcttctttcagagttttttttttttttttttttttttttttttttttttaaatccctataaaaacaaatagttacatattataatttctgttctgaaatcttaccattctggggacaaacaacttttgtcaggttatataaagtataaacattgtaagactggtaaaataacaatgccacgtagttttctacatgcttgttgggaattctacttaggcaaagttatttatgcttgactctctgaatctctgttacattggacacattttgcaacatttttctctttcattgaaaaatctagttaattgaaatttgtttagagtactaggttatctgtttgctttgttatgaagttattagtcaatgggcatcttttgaattttaatgtttcttcatgtgtgtgtgtatatataaatcatgtcaagtcaagttataaaaattgtagaaaacttgtgaagagagtcagttttaacttttaagaatgaaacgtgagatattttgataattcaacattgtaactgattatttcttggggccgctggctcaaagttgtttaatttatacagatactaggaaatttttgtatgggtcattgagggaaagatattgaagtttggacataggttgatccaagtattgcgtgctactatttcatgaagcatgcatcatagatttttagccttactttgat

SEQ ID NO: 21750 - DNA, 665 bp, Glycine max
  Intron number 3 from transcript Glyma08g07720.1 (locus Gly ma08g07720) derived from phytozome v7.0 (chr-ID Gm08; pos 5552298 to 5552962 reverse strand)
gtattctcttgggggctgtcttctgtgtgcaactggtaagcacatatatgcagggtcatggatatgttgaatttagttatacatgttctgcttgtcatgtatatttttgtatttgattcagttggtgtgtctgttgttctgtatttataaaccaattctttgctagcaattgcaatggccaatgcctaagtacccaatgttttaaaattgagtagaattgattttgataggaatgattttgaactgttgattgtaattgggatgtgtgtcaatattaatcacaaccacaaatttagcatcagaaaatgtgctcggtgtgggaaattgattcttgatgtaaaacaaataggccttaagtttctgttcattatctatctgaggtggaataacattcctaatgagttttatcataatttgagggttcattgcagtattggatcttcctttatgtggtgtaagagaaaaagattactgttgaggctttattaggcatattccctgtgaacatctaacactatcacagtatcctctgctccccaaaccaaaatctcttgatattgtaatgtggtgaatatgcaatttgcatttaggtattgctggcacgtacaatttttttgaactgctgattaacattgttactggatcctgttacaggctctgaggct

SEQ ID NO: 21751 - DNA, 409 bp, Glycine max
  Intron number 2 from transcript Glyma08g03200.1 (locus Gly ma08g03200) derived from phytozome v7.0 (chr-ID Gm08; pos 2258965 to 2259373 reverse strand)
gaattaggaacagtacgtcttttcttccatataatgtgttttactttcctcatttttcagttaaaatttatcttaattcctattgtacttacgatcactaacctagagtgagggatgaaattcactaattatgaaaaatacaaggactacaattatttgatttagcgagaaacctaatttaatttgaagctaggactaaatgctgcggaagactgtgacctaattctctaagaaggcgatacgatattatcgtttaaaatacagtgatttggactaatttttgaccgaaaattgagtgtataaaatgcatttttatgtaatttacttgtgtcatcttatgtattagtattagcgttcttaattgaaatagcttgattgtaattgcagatcaatatctgtggtccaaaga

SEQ ID NO: 21752 - DNA, 365 bp, Glycine max
  Intron number 1 from transcript Glyma06g19780.1 (locus Gly ma06g19780) derived from phytozome v7.0 (chr-ID Gm06; pos 16131789 to 16132153)
attttacctgagagaagagcgtttactgctttgctgttaacattttattacggcttactgtagttgttgaatttggtgcatgtccttttattattagtttctaaattttaaaattgttttttcttgtcacaacattttgttaaattacttttttttttcatgatgtaataaattaatattttgtgataatgtttattttgtagtcccttttgaatttatattttaaaattattataaaattgtaaaaaaaatactaaaaaatattataaaatattaatttattgtgtgtgaaactaaaaaaataatttatcaaaaaaaatatttaaaaatttgagagactactgacactaaaacagtaagcccct

SEQ ID NO: 21753 - DNA, 751 bp, Glycine max
  Intron number 3 from transcript Glyma06g19780.1 (locus Gly ma06g19780) derived from phytozome v7.0 (chr-ID Gm06; pos 16132602 to 16133352)
ctggacaagaggctatctggcagaaagtgttccaggtcttttttcttgccaatttgcattaaaaattaattattggtttgggtttggcattgtaacattttgtgtgttagagtgagttgttgcaaaagtgattttacaaagggtgtttatattctagaaggaagctagtagcaaaactttgtataaaatgttttatccaatgcaaatgctacctaaagttgcttaactcaaaatcaatttggggctctgaatcaattctttaacatgagattaaactgtgaacatttacttaaaatcacgttggctggtcctttaacgtgattttgcacaactcaacctgcaaaaagcacactttatcactcagaaactttctgaagaaggtttttgtagtaataaataaataaatgaaatactattttggtctgtaaaggatttggggtcggtttagttagtttttacaaaatggaaatcatggtttttaaaaatgtcgatcaattttgtcatttccagggactaaaatgatgtcctaagaaaggactaaattaatcagttttttcatctaaattgatgtcagttttgttgatcatttgatgttaataatgatataaagatgaacagcttgattcagcaccttaactatatgattggcttgtttgttcaaattatcacgggtattgtacatcttaactctgctccatgaagtattacttagatagctgactttatgttcaacttccaggagaaatttaac

SEQ ID NO: 21754 - DNA, 699 bp, Glycine max
  Intron number 1 from transcript Glyma07g32290.2 (locus Gly ma07g32290) derived from phytozome v7.0 (chr-ID Gm07; pos 37206357 to 37207055 reverse strand)
gcgcgcgccagggcaagagtttcatcctcaaccaggtgattttcgcaattggattggaaattccttcgttttttttttggggagtttagggttttggagtttagtgttgggtttggtaactagggttttgttacgtggatggtttgttaagtggtaatgtggctttctgtgactaatgtgccactggttttgattaaattttgggacaaacgtcttttttttgctgttattgtgaatttttttactcggtgtgattttggttataactatggtttgaacgtgaaattcgaaacctaattggaaggtttgggggctgttcttgactgtctaataggctagtggctttgtgataactatcgtttgcttatctgtgttcaacaattagtttgtggatttttgttttcttttagtttgagttggaaatttgggtgccaagttctgttgctagtttctagcacttgtggaagagaagtgctttggggcttctttttgttcgatttacttgatacttgactgagtcactgagaacgttattcttctgtaatctttacttttgttgtaacttttccactgactttctgctggtgttgaaatacaattactaaataagtgagactttgttagattgttattataatctgtattgtggctttttgcatttcagctcttaggaaagagtagcggatttcaagtagcctc

SEQ ID NO: 21755 - DNA, 509 bp, Glycine max
  Intron number 1 from transcript Glyma07g07170.1 (locus Gly ma07g07170) derived from phytozome v7.0 (chr-ID Gm07; pos 5902242 to 5902750 reverse strand)
aaggtatggctcatttcatacttgtcaattttgattcttctttatttgcttatttcttttctgaaaatggacaattttctccttttaactttgactcaaaacttgaattcattgttgattcactatgagctttatgccttcgttttttttttcttttctcttttcacttcctctgttttctcctttttcctcctgattcaaagatctggggtacccttatatgaattttgatattcccttcatcagaatcctggttttggatttaatttgaatatgtgtggccatatgtgggatggtttagatcacaacttttccaatatataatatgcttttggttggtagaaaaattttgttttcaagtgtcacttttttttcttgttcagatattgtatgttgttctggtaaatattctgtcattgattaaggttacaaaagatttattaatttgaatatgggttgaaacggtttctaattttgcttacagaagtttgtactaaagttagatttgc

SEQ ID NO: 21756 - DNA, 886 bp, Glycine max
  Intron number 5 from transcript Glyma07g01070.1 (locus Gly ma07g01070) derived from phytozome v7.0 (chr-ID Gm07; pos 633707 to 634592 reverse strand)
atatagaaattcctacatcgcctttaacctgtaaggtataaaatttttattgtaatttggataataatatcaagcattttactgcaatatgagaatttctaagtttgggctatatattgtacaaaatctaatatggatgagatttttggctgttaatcaaataaatttttcttcacaattatcatgttgcattcaggcctttaggtataagtgctttgtatttaggttctgctttttacttcttgttgccctttttatgggaatttgtctttttttttttttttataatggaagttgacatacatttgtcgggacttgcatgtactcacatagtaatgagaatgtctcagataaaggaacctgaagaggctttgatttcaatgaacttgtttgtttttcagctcgggttgaaatgtttgcaacttttagttacacgattattcttgttctttttcttttctcccatggaagtttggtaataagttgcacaaaaaaacatggcatgcaggatgggaagctttgttctcacattttaaaaattgaattgtataggaaacaacaataacgctgagcaaaaaaaaaaaaataggaaacaacaataacaatactaatactcatagaaacagtaactataaggatacatgaaccctttttctgggaaatttcctctttaagaggatattgaatcttgacagtttaacattgtgattaacttctatttccttccctgtcccctttcttaattaggcaatatgttttagtttcaccattcttatattttgtttcactgtctttactgtttagtgaactctttttggtttgtagatataatatggctgctgtggtcttgttttgttgacagggcttcaaattaaccaagcaaagt

SEQ ID NO: 21757 - DNA, 638 bp, Glycine max
  Intron number 2 from transcript Glyma07g30210.1 (locus Gly ma07g30210) derived from phytozome v7.0 (chr-ID Gm07; pos 35267919 to 35268556 reverse strand)
ctgctgaaccatcttccagtaagagcaatccaccggtaagctcaagctttgagtatttgctttcatgggtatctgttaactacctcagtgtttgaaaaaatcgaagctttattgccgaaggcttttttttttttccagagaaaactgctataaaaaaaaatcttttatgggtatctgttgactaccttcgtgtttgacaaaatcgaaactttattgctgaaggtctttttccttccccagagaaactgctgtaaaaaaattgtatatatttcgtttttttttagtttgtttcattttgcttaaaggttgttgatttataatgactattttgtcaaattgaatgaaaagggggcatctttttggcttacttaatgtacactggtctaaagttgaagagattttctagctttaggtcctacatgtaaataaatatcatgtcataagaaattttagagtggaacttgacaacaactctgaattggatttgacataattcaatatatgctatcctcgttgacttatgagcattaagatagtgcctttcctgttaattagtttttttagcctctaatccccccttctttttttgttggattctatcagagggttccaaatcttattggaggcagttttgttga

SEQ ID NO: 21758 - DNA, 369 bp, Glycine max
  Intron number 3 from transcript Glyma05g25550.1 (locus Gly ma05g25550) derived from phytozome v7.0 (chr-ID Gm05; pos 31618950 to 31619318)
aagtgggaatagtcttatttggaactgaaggtactcactcactttaatctttactattcaatggatgctgttgacttggtgtttattggtttcattactgtttatgttgttatttgattaccaagttttcctttcactgtaaatggtagctatctgtaatggagaaatggggagcaagatgatcctccttgattttcttttgcttctgttgtgtttcattctcattctaaatagaatctttgccctgttgactaaactgagtgtttaccactattcacgctgctgtgtcactggaagaatcctgcttctagaatttgatcaagggccttcctcacctgtgtttatgttgacatttttcagacactaata

SEQ ID NO: 21759 - DNA, 639 bp, Glycine max
  Intron number 4 from transcript Glyma05g25550.1 (locus Gly ma05g25550) derived from phytozome v7.0 (chr-ID Gm05; pos 31619436 to 31620074)
gtgattgtatccatgaagttcttggttttatattatgctagtttttacttgctaattgttatctttttttttttcgaaacatttatctcaaaattttttttttgatcagcacatttttctcaaaatattacatgattttgagttttccctgcattaaaatactcacatgtttccttctgacaaaaagtattttcttttgcaagttctttacttttagagtatgagatctcagacatttgtgtttctgattacactgtattacttaatgccatttatctttcatttgagttcttttattttcctttttgaattattagctatatatctctaaatcttcacataaagaaaacctctgtttctgttgtacaatttgtttgctttcttttttaaagagtaactatttttttttttttaattttgtcaactattttttgtttgcatgatttgtatatttagattttcctgaaaaccaatatgtttgtgttattaaaatcatggaatgtaatcattagcaaaactttataagattaattattaaatttccaagaggaagttgatcctttcctactaccattgattttacctcatcagctcacttttacccttttctgtatttcttgactttgatgttagttcttg

SEQ ID NO: 21760 - DNA, 641 bp, Glycine max
  Intron number 1 from transcript Glyma06g12640.1 (locus Gly ma06g12640) derived from phytozome v7.0 (chr-ID Gm06; pos 9810708 to 9811348)
tgttaaaaaaaaattaggcgtctaaagggccaaaggtattgcctttgttcctctctcatcgcattcatagtcatgtagtagtatttttgttttctgttttctgttttcatgtctttgatcacaataacttttttattttattttaatttcccccagtttcgtttctgattgttttttctttcttccgttccccctttatgattttatttttcggttttaatatcatgtatgccaaatttcaataaaaaaaaggaccttttcggatatcattcctgtgaattgatcttcctgttgagcctgtagtgcaaagtttgaaactttcagccaagtcttaatcatgtaattgagaaacaagtgacgggtatttatgtaatgtgctgaatccctctaataagattatgctctttattttattttattttataattgtatttatctttctgttgtttcctttgcaaattgcctttgggggaccttgtatttttcttggtttgtgactttgtggtgattatcgtcttgctacaagctttatttttcgataccttaaatctagggattctctatggccttatcctttgtttattttttacttttgtgacagcttagaaagttgaagctttttttgttgaggtgaaagtgaa

SEQ ID NO: 21761 - DNA, 429 bp, Glycine max
  Intron number 1 from transcript Glyma07g11880.1 (locus Gly ma07g11880) derived from phytozome v7.0 (chr-ID Gm07; pos 10146979 to 10147407)
ctggttttccaggtatttctgttcctttttttttctatttcatcagttttgctttccacctccttcagcttaaagtacatgactcttctctttattgctttgttttgcacaaaactgtgtcaagagctggtaatttggagggattattagttctatgggcaagattttcaagcaaaatagcgtgctaatagtatttttctaatggttgagaaattggttttattttattccgtagacagtatgtgatttcatttgattgaagtggtcaaaacttcctgtttgcagaatataaggcaaaagaaagggagaagatcattttgtttataattgattatattgtatgattatcttgcaaaaaattttatcagattatgggatgacttgtttcaaacagtgtactgatttttcggccttggtttaatccagaat

SEQ ID NO: 21762 - DNA, 973 bp, Glycine max
  Intron number 1 from transcript Glyma08g09700.1 (locus Gly ma08g09700) derived from phytozome v7.0 (chr-ID Gm08; pos 6893759 to 6894731)
ttatattgatttttgtgttggaagcagctcgaattgtgagtgacgggtaagtaaaatcgatgatagtaatactctgtttgcgtaattttcaattcccgttgtttcagtttttttttatatctcaatgtcatagtatgcaaactttggtcgtgttccaacaaatcaaacaattgataaacctacgtcgtaaaagtagtttgttcccaacaaatgaaacagaaccattgtgcaaaagttgtttgttctgtcagactctgaatcgggttatgtttttggttttctggttttgaggctttaggcacaagagaaattatcctagggttgggcttaggtaatgagaagagtcctttagcgaaatgttctgttgctagtcactattactagaaaatatcctcacctatgaattcccaacatgatctgaagaagtgagctgtattgactattgagaataactatcaaggcttcctttatgattcaaatgcatctatcaggctcagcattcatttcatctggacctctgtaaaagaaatgaagtactagaattgttatgatgttctgttagtcaaaataaaatcattcttgaatctttagagttttgactagttgaaactttggagaagggtattgctaacaaaagatatctctgctgtacttggataagttaaaaaaaaaattggttggtttcatttttatttatgaccaaatgcagttcccttgtgattttggaagttgtgcctccaaatatgacttctttattagtaacctatactgctgcttgaattttaatgtgatgtactgattcgaattggatctttattgagaagaaaaggcacatttattaatctattttgttgcaaatttatcataatgctttcataagataagacagattactcaatgtgacattcttgtaacctctttttttttccacctggcagctgttttgattgttgattgctttgaatcactgaga

SEQ ID NO: 21763 - DNA, 1026 bp, Glycine max
  Intron number 2 from transcript Glyma05g24230.3 (locus Gly ma05g24230) derived from phytozome v7.0 (chr-ID Gm05; pos 30325412 to 30326437 reverse strand)
cgagaattgcagataactacaattccatagacgaggtaagatatgctttgcttgttggtgatgtacatgtactgttgtgtttaactttagcttgtcatgggattaagtcatggttatttttatctggctgggcattgaaatgtttttcttcatttggctttgttttgtgtactttcatttttttaataaacataatttggcagctaagaatccaaaatatttactttttattttttaaaaaatattttggcatttggtattgggaatctttcattctgaattaaattactttcctgagaataagattgttaggaataagattcttggggaattttttaacatatgtttggttattaatttattattcaactttctttggaatcatttgtttatgattacggctaattaccacagaaaagtttagtaactttacaaataattatcacaggaaagttttattgtcacctctgaaagtgggaaaattttatttccacttatttataacttaacattcccaagaatgcaacgttaggagtttagaagaaaataatagtcacaatgacagtgcaattgcaattgaatgttatattgaattttaaggttgatgatcttttcttcagaaagattcattacgatctcaagaatcaggacaggaaattttaaagcagcccaccttgtgctagctcataaaattaccagtgaatggcggccagctcatcttgcttccatattctgccatttaactatgaaaaattgaattcactgaagtgaaagagaaagactttgcatgcttatatttttctgatgaatttagagctataagtgagtataaaactttttaagtgtattttcatgtgatcaggcatgacttagctgatcataatattgtcttgcaattttcatgtttctgtcactgatggtccttcttattcatctttttattttaggaaatttgttgatgctttgtcatcatttgaattcttacattctcaaatttgtcattacaggtgactgaggctcttgctc

SEQ ID NO: 21764 - DNA, 783 bp, Glycine max
  Intron number 2 from transcript Glyma08g27730.1 (locus Gly ma08g27730) derived from phytozome v7.0 (chr-ID Gm08; pos 22053087 to 22053869 reverse strand)
gtctcagttgcttcgtacagaactttttgactgtggtatgtctctaactccaaactccctgtcctcttccattcccttgttttattttgattcacttttggacggaccccatcttatgtgttatccgttttttgaatttaacatcttgcatatggtcatgtcttgatgcactgtttttgctggtaattccatacttgtgaagcggcaaacatacctgctacattagtaggagcttgtgttgttttttgtttgtattgtcgtacatatgcttcctctttattgttccgttgctcaggactatattgtgaaaaaaatactcataaaatgttttggaaaacctttagtcttgaactatatcatccaaaacattacaaatggtgatgtatttcatacatgcatttttgcaaaattgctaatctaaattaaatgttgtaactaacgagaactataaatgttagaagtgaatcttaaatttaaactgccccttagctcattgtgtgagggatatttttcttgacgccctgatgctaacttgtaagaaggccatgaaaaattaaataagagaaaattgtaatcacctataatttagtttaggaaagctttgctgcgtctgttaatctatgtaactttggtgttaattcaaagtattgattgccgtgtacattaatattcagtagacaacatttaaagaatactttagtcttagatccccttacaatatgggaactgtactccatataaattatatattataactgtttccaatctacctcaaatttcagt

SEQ ID NO: 21765 - DNA, 902 bp, Glycine max
  Intron number 1 from transcript Glyma08g27730.1 (locus Gly ma08g27730) derived from phytozome v7.0 (chr-ID Gm08; pos 22054195 to 22055096 reverse strand)
ccccaacaacaatttcaatcaaaactctctctcaggtacctttttttttctccccaaagattatacctttgtcgttttctcgcataccctcttttgattttgatcgtttgattgccttcttatttgataatcgcaactgggtatctctttctttttttgtttcgtttttttcttttctggggttcatcaatttgggtgttttctcggttgaatttttctttttctgagaattcaggtgttttctcggttgaatttttctttttctgagaattcaggtgtttctcactagacaattgatgtatgtgatttttgtccatcttattttatttattaacgtttcaattcgtaggatggaggcatcgtttgcttttacgtttaaggttgtttgcctaaacggtaaatagtaaaaattagtgattgtgatttttcagctgaaaggtaaatgatgatccttctgctggttgatgtacgagcatagcttaccagtgaagtaacgaatcatttttgccacaatttgaaggaacattgcaagcagattatagctttcccttggaacactcaaatttgtattagtctttttcaagtttttggtgttctctaagttttattgtactttttttttacccttggagggaaaataatagtatgttgatcttattttggagtcctgatttgccaatgatgttttgtatacgtgatgctttggatttgaagcatcaacattaattgaattgcattgctcaatggcaggcccgtagaaaaatatgttattttgatttgtcaattgcatgagtgaaagcttctgctacaatcttcccaaattgtttgttttcagtgatatttatgcggttttggtgtatgtttcaggtgattaagagaatcagagtttgcttatccatata

SEQ ID NO: 21766 - DNA, 431 bp, Glycine max
  Intron number 1 from transcript Glyma07g39320.1 (locus Gly ma07g39320) derived from phytozome v7.0 (chr-ID Gm07; pos 43823996 to 43824426 reverse strand)
tttcccctcacccaactgtgtgcaacaaccacaaagtacgaaccttttcttttttaatttctatttcttggaaatataaaaggtctttttatttatttctgttttagccctagaggagtaaaatctgttgtaggaaaggaaacgcctgataaattagggtacgacagaaaatagtaagaaggtacaaacaaagatcagggattggttatgaatcattcctctggactttatggagaaaacaaaaacctcttatttctgactaatttgctcgtgtttatttttattaaagtatgtctgacataagatacaaattcttttcaccaagatttttactaaattgttcgtgtttctatcaaaaccttgttttgttattcgtttattttgattgctttacaggtgtataccgtgtgttcttcctagaggggggaaaa

SEQ ID NO: 21767 - DNA, 526 bp, Glycine max
  Intron number 1 from transcript Glyma06g12780.2 (locus Gly ma06g12780) derived from phytozome v7.0 (chr-ID Gm06; pos 9979305 to 9979830)
caaaggtgactgactcatccacccttcttctcagtctcatcttattttcatctcttttcagttttgatgctacacatgccatagcatattagcatcccctgctgaagtttttttttctaggaaaagtatttgcttttttaagttcgtttctgttatgtatggtcactcgaattttaagagtgaaccaatcttagtcttgacactttttttgtggggtacataaacttgtatttatttttatttctgtaatttagaaaatataacgatccttttccttttctctgtatctaacttgggtcgttatttttcttattattaaaaaatgttaattgccctccattctaatcatattgttttaaagtgcttaatgatatacatgtttgtttaccagacagagtatcgttttttttgttagtaaaaagtgtaaatttggttttaaaattttgttatgcctcgatagacgccacatcatgatcagtgataataatgtgttgattgaaatgaatattgtactagctgcggtttc

SEQ ID NO: 21768 - DNA, 822 bp, Glycine max
  Intron number 4 from transcript Glyma08g20700.2 (locus Gly ma08g20700) derived from phytozome v7.0 (chr-ID Gm08; pos 15713467 to 15714288 reverse strand)
agaccaccaccggggagaatcttttccttgacagggtatatgcaacttcaccacatttttctgttttcttgatttcattcatgaccctatgatccaaacaactgaaacaagggacttttgtccaggactcaagatccctcctctctctctctctcttcccctccaaccaaacaatatgttcttgtaagaaaggagattttgatttgcaagggaaacttctttcaggggaccaaattagttcataccctttgatttcctatggcatttgggtaaatcagagtggaagtatttttctacctcatagtcatactagcgtgataatttccatcccttccatcccatgtaactcgtgaaccaaaactccatattctattgctatatccaaacttccctacaaaatttcttatgcaagtgattgttgccacactgaataaggtctgaaattgttttgataaattgatttcttttctagctttgtttgtcatttgaataaaactctttgaaagatcaaaggtatataattttttaattgatatattgtaagatgtatcgtacagattgacaactcgatttctgatgtttaaatatctaattttacattgttgaccttatatggcataaccaatggtatcaggagaagatgttctatgcatagtctccccatttcccttccctttagaaaacaaaaaaaataaaaaaattcatggttccacgcacatatatacttgttttgctaaaagatctgttatttgctgctgtttttcctttttgaattgtataattgagttcattttattgtttacaaaattttctaggtgtttg

SEQ ID NO: 21769 - DNA, 965 bp, Glycine max
  Intron number 2 from transcript Glyma07g07780.1 (locus Gly ma07g07780) derived from phytozome v7.0 (chr-ID Gm07; pos 6462596 to 6463560 reverse strand)
ctaggtaaatatccttatgtctattctttggaaagccaagtcagtaagtgttggaggagattagtgaaatagaattggtaatatcaatctgctagggttttcatcatacattttaggtagatttcttgcaatcttgcttttactttaattttttgaggcttgtggataccagaaaacttgtaactaagccacaaacttataattatatttggagagaaagttttatatgtatatgacatccaaataattccttgtcatgactagtgacttctatctatcttacaacaacaacaacaaagtcttaccccaccaattgaggtcagtttcatagatcacataacaccattcgacttggttaaagcaaatttcagcaatgttatttaccatgagatctctcttgataacttcttccaatgtcctcttggcctctctcttccttctcacaagacctgtttattaagcttgtccatattttaagaaaaatgaatttagaattttaactagagctggaaatgaatttacagaattctgactatatgtcctaattctttgcaacacccaaagataagttaaaattttgaattataattcccattctgtcatccaaattgaatcttagggatttatgccttacttgtttaaccttgttaagaaacaaaatttctcttcatttctaaaacacaattatctttgtgttgtaaattcactttttccctttcagagcttttttcaagcctgagttttaagtatttcatcaagaactaatttggcatcatgctctcataatatggtcaaagaatgatgtactatatattttgtttgtcaaatttagctgtctatatttcactattaaaaaatgaaattgcatgttttcttcatgtcttattttagcccctagggcaatgtagagatcactgttttcttctacaaaactttcaggtgctactttgcttgtgaagttttgg

SEQ ID NO: 21770 - DNA, 980 bp, Glycine max
  Intron number 1 from transcript Glyma08g17300.1 (locus Gly ma08g17300) derived from phytozome v7.0 (chr-ID Gm08; pos 12810608 to 12811587)
actgtgctgttgtaattaatcacatgactcaatctctttctttaaatttggcaatgtgtgtttcctatgtttgtttcttgcttagttgaaataaggtacacttgaattggccacatgcatcttgattcatgcatgcatcactgatcactttaacttgctacgtgtcattagatacatatgatgaccattagaaaaaagaggttttgtgtttttttggagattaatttggatcattttgagtttttgactattgtagccaaacatggttaaaatccagcatctaaagtacattgtcattataaagtcttttatactgttatctaattacaaatcattttcgatatgaattttactgtaattattattaagttaataatcttaccatacattaccaatcatgattagattggaattaaaaatatacaaggataacatggtaatctgttacaggacatttttatatgatgttcataacaactgtgactgaacgttgttgggaccgaagccaacttctggtttgggaattggatcacatgcaaatcttggtctcttcattgtctcgatgatgacaatcaaaacttacttgaaacacatacaataaataaccggaccctggtgctaccatttgcatttttatttctccaacatcattaaccttctattcctcacttttacactatttttaagtcattattttacttcatagaaaaaaaattaattacttttattatctaaaatgaagtgaattacattttagtaatattagtctctctcacacacattattagtaaatagttatacgcatgtaaatagatgacagcttaaaaaacattcagagtgccagacctaactatattaacttatagattatgatttaacattttgatattgttattaaaagtgttgacttgaagtgagttgtgaatgtttcatgaatcactttgtttgatgcacttcaattgatcaaattcaatgcaggg

SEQ ID NO: 21771 - DNA, 1038 bp, Glycine max
  Intron number 1 from transcript Glyma07g01980.1 (locus Gly ma07g01980) derived from phytozome v7.0 (chr-ID Gm07; pos 1378322 to 1379359)
cttcactccaagtggtctttctctgagtcatacgagtaagcatgttccattgttatgttattattttttttttttttctcagtgctttatgatctccttctctctgtttctctctctctatgttaattcaagttttgttttttgttttcttactgggtttgtttctttatattctagcttttcttgttatgctaatttgatgggttgctcatgaaaaacgagtttctgttcttcctttagttttgcttttcttaataattttttgctctgtttttactcagaggagagagagaaaagtgaaaagcaacgtaagttgttgtgttttctaactaactgaaaacacctgtttcttctgagaagaatactaaggaaatagtttgagaaaagtgcgtgttaaattttaaatacagggtatcaattttcatatgaaaaccttcgcctcattttctcacaatttattggtaaccatgcacgagttgatgagagtttgcttttcttattttattttattggtatcaatattattttatcgccagcaatgtcttggggtgtgggttgcggacaaatttgactgtaaaaagaggggccttggtggggtttgtttgtctagtcatcatgacatttgaatgaacagtcacaggcccgtgatcgaatttctgttttttttttcctctaaaatctttttctccatcttttgcactttttttttggtatttgattgtccctatgcctccatgtctttttagattatgcaaattttttaacttccctcataactttatttaaaattgttcttgctagaataatgttggtgcaatcttcgtttcctatctttagcttttgaatttatgatatacttaaaaaataatactatttactaattgtacaacttgaaattgaaatcataagctcttgctttcaacgatctaaaacttattcgttaacttaatcttatttataaaaacatgtttggtgattgttgtcaacgtgtcattgttggcagatatcttgttggggtttctgctgctgtggcagctc

SEQ ID NO: 21772 - DNA, 849 bp, Glycine max
  Intron number 2 from transcript Glyma06g43610.2 (locus Gly ma06g43610) derived from phytozome v7.0 (chr-ID Gm06; pos 46615233 to 46616081)
tacgaggtatgcctttttgccacttaaccttatcctatatcatataagcattgatttaggtttattaagaaagatgactctaattaccgtagtacactgtacacatgccattccttgttatacatgtcactgattgaatacctaaaacttttatgtttcgctttctccattgctacaagtagagttgcatcttcttcatttctattttctgtcttatatgtccctactattctgcctgttattattgttgcaacttactagcaacgtagtgtagtcaaaggcatatggaaagtgctggaagcggtcagtgcctcttgctgttgaagcacttcccttttgtgaggcatgatgtgtgcatttccacagttctagtttgtaaaatagtcagaatactaaaagggattgaatgatcagaatgctaagagaaaaactacacaggattttgtaaattgaaaatatgttctgtttttactgtgattgaatgtcatgactgatatatatgcaaaatatgttctgttttttgggtataatgtgcactttttggcacctattgcctcaatgcattaaaataccctatcagtttgtgggtgcctttctcctttgactttcttcatttttacttaaagtgtttgaatgcaaccgttatcttatattttcttgtcatgtatgataatctttctgaaagcctttctgtgtatgatcataattttttaacggtaataggttaaactgttcatgagactgatagttccctaccctgctattaattgaccttctttccagccacaatatttcttatatctgtttgttctttggctataggatacagttaaatacatagagaatcag

SEQ ID NO: 21773 - DNA, 359 bp, Glycine max
  Intron number 1 from transcript Glyma08g21560.3 (locus Gly ma08g21560) derived from phytozome v7.0 (chr-ID Gm08; pos 16394104 to 16394462)
gctagttaccagcaccggtcgccgaatccgaaaaggttaataatttctttgcttgcaaccccttctggcttcttagcttcttctaatgccgctgctaagtattcgttttagtttagtgttctaggttttttttttttttatattacctttgtttcggtttagccttttatttaggtaacaaattttgaatgtgtgaccattctatcttcatacctaccttagcttgagtttttcttctgtttttttttcttttatgctgtctatgcatttgactgacccttttttctttatacactaacccttttgcttcttaatgtatgacagtgacttcaatcctttccactaagggtgtgttttga

SEQ ID NO: 21774 - DNA, 861 bp, Glycine max
  Intron number 1 from transcript Glyma07g19060.1 (locus Gly ma07g19060) derived from phytozome v7.0 (chr-ID Gm07; pos 18975471 to 18976331 reverse strand)
agtgtgaatctgccattaacgagcagataaagtgagcatttctatgttccccatctagtttttttttttgtttttttgttaaattagtttcttttgttgtttaatataagcagatcaggcattttttcagcttttctaaagtgtggatttttactttgttgagtgaaaaagtacttttacttgtactttatttaaaaatatatcatgttatgagtacatatagcataaatcattgatgtttcaaaaagattagccatttaactactttttggattttgttcttttattttgagttttgatatatgaatagagtaaataatctcctttttttttttttcgattttgatatatgaataaagtaagtaacttgatgaaaaaaagggataagtaaattgatctaaagttggttttattctctatattttaaagacggtgttatggtccttggatttcttgaaaatgtggtggattttaagtcaaaacggagtagtctggacgaaatccaccacattttcagaaccaatttttattaaattttcagggacttcaaaatatattttactcttggaaagaaattactattgatatttgaagacattcgtaatttgtgtgtaaatgtattattattattatttgacaattgattttctagtcaatttctggaactagttagtttcagtgagttgttatagaggagagctagatccttatttccctccctattaatattaatatagcactacgatctacaattattactttacaaagaaagtaaatttatacttttttttgcatgcatctaataatggtcctctgctaagagctttacctcttatattgtgtgtcacagtgtggaataca

SEQ ID NO: 21775 - DNA, 931 bp, Glycine max
  Intron number 1 from transcript Glyma08g20610.1 (locus Gly ma08g20610) derived from phytozome v7.0 (chr-ID Gm08; pos 15623023 to 15623953 reverse strand)
ggtacgctatttccattctcttcatcgtcgatctgattcctgcattttttttatgatgatgatgatcaaagctttattcttcacttttttatttctctctgctttcccaattctaactcccatcaaagtttcaatcttttatagatgacaattgttgggtattaacggaaaattggtagttacacttgcatgcgttttttttttctaactgttgcttaactttattgttgttttatttcattttttttttcagttttaagtgaaggtttgtgtgggatttatgggaatttggtgatgtgattgattttgacaatttgatccataatttgtgttttgtatggctgattggttggatccggggcaaggtttagattgctgctatatgttaaaggggagatgaaaagttgagaagggagtgcctgttagaagttcatttaatttaattgtatggaaaggagattagtatccagacatataaggttgacccagtggttggggaagggtcgaatctccccaactgacatttttaacaaaactaatatttgccgataaaaaaaaagattagtatccctgctcaggtttttcaatgctagtgaaagtattggggtttgaattgatgaatggagtgtggaaccaacaaacaagtgtaaatatttgtttgtttatttttgggtactgagaatgaaaactaatgttcttaccagggcagggatggtcaagttgaatttcatgattacatgtgtttctagctgtttatgtcacagtgccatgctgcaatcattcctaaaattccggttttgcttgtggatctcaattagtgctgtacttgaaatttgtgcaagtcttttgcagcaatttattttccctctactaacatggagtatttccttatccagcaaatagtgagacttgttgttcaactcagcttatt

SEQ ID NO: 21776 - DNA, 1000 bp, Glycine max
  Intron number 1 from transcript Glyma06g19460.1 (locus Gly ma06g19460) derived from phytozome v7.0 (chr-ID Gm06; pos 15722338 to 15723337 reverse strand)
tcgaacaggccgaaaacttcgcctctgtcctcaaggtacatcaataattataataatatgatttaatatatttatttcccaaatttttggtattcagtctcaataatcactcatatttttaccaagggtctagctcaggtacttgagaggtagttgagcagcgtgtctcagttgttgtaaattctcccttagttgtcttcaattcctatagataaaaagaaataatcactcatatatgaaaataaaataaatctaacttccttcatatgttaaaattagtgtatgcgtttagttacctgtttgagtccctacatatgcatatacttttgtgaagtgctagcaatacacttctactaacacatgattgactgaaatttattggaaactactcaatcatgaaagagagaagagtcaataaatatgacgttagacccacaatttttttgtaatttccaataaatttcaaccaatgaaagaaaatgtgttcaaaagagtgtgacatagagtgtgtcgctagtatttttctatacttttttggcaaatgctaactagtgtccttagggcattggttaagccattaaggaactaaaaaaagatatttttattgggatatgcaaaattgcattgtccatgactttttacgctctcctttgattttcacaataaatattctttttttagttcctcaaccgatgtcctaagaacactagttagcaaaacccatacgttttaatccattttaatctggcatggactaaaacggattaacaggtgtacacgtagggagtaaaatgacttaaaaagtgtatgtatagagactaaaatgggtggttttttgatgtagatactaatatgtaaagattatgtaggtacagcgactaaaatgggtgtatattagctctcatttaacttagtctaaagctgattttaatgtatgtttatatggaaataggtgatgcttatgtaaattgtgtttgtgtgcttgtgtagtttcaacttg

SEQ ID NO: 21777 - DNA, 414 bp, Glycine max
  Intron number 1 from transcript Glyma07g03780.1 (locus Gly ma07g03780) derived from phytozome v7.0 (chr-ID Gm07; pos 2600202 to 2600615)
acgttactattgaagctcaaggaacgaattgacaggtaaggaataaggatgcaatgctctttcttctctttttagttttatttattagaatttttagttctgtttgtgtaatataattatgggcaaaacttgtatgcacgtggttaagtgttttgtgtgttgttttccaattagaattgaagtttcacttcagtaggtttgtgttaaaaatcaacataggttattatcggagtaaaactcaaattctgattggagaaacaactaaataattgtatctaagttttctcctattattatttattatccagtagttaatagtatcatacagtaataaggtctccatcatgctatttctttttttcctaattttctttttcagagttgggattgatattccaacaattgaagttcgat

SEQ ID NO: 21778 - DNA, 611 bp, Glycine max
  Intron number 1 from transcript Glyma05g32020.1 (locus Gly ma05g32020) derived from phytozome v7.0 (chr-ID Gm05; pos 37023863 to 37024473 reverse strand)
gcctcttgcacttgctttggctactttgctagaaggtagtcgaagaagaaccttattgaggatctttttggacatttttttttccataagtccggtttgtttaaactcttatttgttaaaaaaaaaacacttattttaataaaataaacagttttctattttcttagtattctgcttaaaaaaaatagttttctgtttatttttagaagcaaatcctgcatattaaacacactttttaaaatggcccttattttaaaactgtttttttttttaagtttaatcaaactgacccaaaataagttaaaacaaggtaaaatgaaataagcttctttcctatgagttaatttatagatgctctcatttagcttctccaaaagctggttttaacttaaatgcattagctaatgtttagctcaagggagaagattaatttattttactttcttatttttttctcctataaagtgctttttgaaaagttatccaaacagagcccgtgtatgtttctgtgattgtgaatcaattcgtgttttacgtttgaaatctttgatggaatgtttctttatgtttgtgcagagctgagttcagttagtgcagaaagggttacattg

SEQ ID NO: 21779 - DNA, 727 bp, Glycine max
  Intron number 3 from transcript Glyma05g25980.1 (locus Gly ma05g25980) derived from phytozome v7.0 (chr-ID Gm05; pos 32015296 to 32016022)
gtctgtgttgagggcattgtcaccaaatgtaaaattactctgccttattttttttttgtcctttttttagttgttgtctatggtttaaatgattgactgcacccaatttctcatgaaattaggtgataaagtgtctgtgaattaagttcactatctttttcctctctgaattgtttattcaattgcttcctgatatttaaaagggtttaatttgactttgagaatgatattttacttttggttattttgaggcaatgcatgttttttgttcaaggattttaacttttgtcatgggtattggttatataacctttctttctctctttcgttctatttgtttttttaggatacaagtgtacagtgtactacttcataattttgtttgacatgcaaagcttttattttaatgacaagttaataccgtttatgcttaagttgctcttcgtgtgtcttgagtggcatgttatgcattatgctatgtgatgatgatggcaatatgaagatcttttactggttaaagtttgtcatctctttcttttacaagcagcagtttagttttatctttaggttgttctttttcctcattgattcctttctttctgtttcatttggcatatatttacaaacacagctctatatttgagaacaaatactctggtttaatggatcttaccttttatttttatttataggttctcttgtaaggccaaaggttgttaaaagtgtt

SEQ ID NO: 21780 - DNA, 566 bp, Glycine max
  Intron number 4 from transcript Glyma08g13300.2 (locus Gly ma08g13300) derived from phytozome v7.0 (chr-ID Gm08; pos 9728777 to 9729342 reverse strand)
gacttgacaagagtgactactaaagagttgatagcgtatgtgtacacttgttttcttgccgtgttcattatttatgcagattttaacgtctcaggctcagcatttgcattgctttcatactctgcataaatattttgaaattggtttaggagtaattactgtggccttttccatgtccttatcgataaggtcatgaaattttgatttatttatatttttatggatttgcctgaactgctacatgaatcagtcatgtaaagttggcagtaaaggtaagtatatggtttatggtctgttttgtagttcttatattatattatcatatagagtcaatatgtgcttattcgtccaaattcttagcatgtgatgatttgctcttatttggcatcttttttgtgtgaatatgtaatctaattacacaccaaatttattttgcatgccaggatggtcatatgtttctctatattaacgtatagatctcttcatccctgtaatgataagaaacaggagtattttaaagattctttttctttttttattgatctgtgacagaaaatacggtcttg

SEQ ID NO: 21781 - DNA, 967 bp, Glycine max
  Intron number 1 from transcript Glyma07g36950.2 (locus Gly ma07g36950) derived from phytozome v7.0 (chr-ID Gm07; pos 42173996 to 42174962 reverse strand)
agcctccctcttgaggttcttttctttggtttcgctttctctactattattcattcttcaatttcactaattgtttagccacggggacctgctcattttgctttctgttgcaattaaaaaattgttttccacaaaatttggttctttaactgttagcaattaagcctgtggtcttggattctggctaattgtgtttctttgaagataaaaataaataaagaaacagaaggggctatttttgaaacagaacaaaaaaaaacattggttggagctacgcttacggttgtcattatgatataatgcattcaagtgttttctgagcaacttcaatacggtgttttatttcaggaaaatatatttgaatggcaatttgcgatcagggggcctcgtgatactgaatttgaaggtggtatttatcacggacggattcagctgccttcagaatatcccttcaaacctccttcgtttatgttgctcacagtaagatatgttcccctttagaccgagcagattcttattttaaaaagtttatttaatcatttgttcttacaccatttctatgttttgtttcctatacctagaatctagacatttttagtccttacacatgcactttcaattctgttttagtccttgccgttaactaacacctagaaattggtgatgtaaaatctgcccaaaattgtcactatagttccaaatttgttttgtggtggttttagctaactatcagagttaagagttaagctcacttaactgaagggactaaaacagaattagaagtgcacataatacaagtataggaatcaaatgagtaattaaactattttaaaatatttacctgaatttgttttgggtgtttctgtttcttataatgattttatgtttaagttattggaacttgaaagctaaattcactgttgtgatgtcagcctagtggccgttttgagacccaaaccaagatttg

SEQ ID NO: 21782 - DNA, 1041 bp, Glycine max
  Intron number 5 from transcript Glyma05g37400.1 (locus Gly ma05g37400) derived from phytozome v7.0 (chr-ID Gm05; pos 41009557 to 41010597 reverse strand)
cgcaatattccttgaaggatcttgaaggaattcttgtaagttccgccccgggatacgccattcactgcacatcttaagaacctcaatattattgttttgaaaaaaatgttgatgctgacatgccgtgtagtcactatgtgatgtagtgatatagggtttctttatctagtggctaatacagttaaaaaaatgaaatgggttttatttatacacttccctgtaaggtgaatggcacaactccagttgctaaaattgaatgtataactatgtctataattgttgtaaatggaattggtttccgatatttttttatatgcaattgggttgtgatattggctgtcggaaccatgttaatctatgcattctagctttgttattttagttactgggttctgccaaaaaatttgctctgcatttgattcaatgaacctagaacacctagtactgttaaagattgtttctgacttgtaacattctctgatatcactcagaggaagcacaattttagttccattaaacttaagagaaatgctagctgtactctctctaacactctctttctaagactctctacgattggttagaatttattggaaatcaccatttttggtaagcttgcttctcaatttaatgattttctctcctgattttattaaatgagaagcaaaacctaccgaaattgatgatttcaataaatttgaaccaaccatagagagtttttgagagagagtgctgctaatatttctcttaaacttaatttaggcagagactggccatagattgcaatcttctcaaatttcattacatgaatggatccttgaagatcagatgcctcttgtgcttctttctttctgtttgaaaagtcttgttacttctatattaattaaaatttaagtattaaagctaatgttgttagcattttttataaccaagcttcttaaatgtgtatttcagttttatttgatacaaggtcgttggttgtttacttctatggtgttggtgataggttaaaaagggtgacatatctgggagtactgaaaa

SEQ ID NO: 21783 - DNA, 577 bp, Glycine max
  Intron number 2 from transcript Glyma06g07960.1 (locus Gly ma06g07960) derived from phytozome v7.0 (chr-ID Gm06; pos 5867114 to 5867690)
tggcattgagcaaggtagttgactctctgttatgttgttctgttcttgagatttaaggctttttttatgtttattctaggaagtaggtattttcaattgtttttgttggtttgtaatgcatctgtataaattatgaatgctaatttttctttgttttcttttggttgggaaattgacgtgcttttacttattatgcatgcaatgcatgttgacacatgaactcacatgactctgttcttaatatttcctcttagacaacttgttgttccactaacttatgggcctttggtaattttagaagtcttcactccttcctcttagacaactttgttgtttcacaaacttatgggcctttggtaactttctgaagcattaatcatttttagaaatgcatgggcttttgacagtactgtagaatgtagattatgtttccattcagttacagttttgatcgatggtttcttgtgttcatgaatcccctggtttcgtttaatagcattgcacatttttattgatatctgtgatgaaagtatgggacatctgaactgatcaatttttctgtgaaggggctccagcc

SEQ ID NO: 21784 - DNA, 462 bp, Glycine max
  Intron number 2 from transcript Glyma07g03540.1 (locus Gly ma07g03540) derived from phytozome v7.0 (chr-ID Gm07; pos 2477986 to 2478447 reverse strand)
accttgcaattggtggctacaaggccgtcaaacaggtactactttttacttaagtcaatcgatggttgtttttactacattttggctttggaaggttaaaaatttgttattttgaattgacttttgtgattactagattcattttgtattcatttaagaatctcaagagtctcatagggatagctatagatgtcatagtaattgaagatttggaagttaaatggagtagatctacttgtgtgtttaatttaataattggaatttggggcataggcttggtttttcattgttatttggacttggatttgcaatggatcgggttaaattgttgggggtgggtgagggttgctgattggctttttattttctgaatcaacattaattggctttcattgcagacaattgctttcgtttttttttttgtttattcttgaaatggtgcagctctaccattagaaactt

SEQ ID NO: 21785 - DNA, 511 bp, Glycine max
  Intron number 3 from transcript Glyma06g06440.2 (locus Gly ma06g06440) derived from phytozome v7.0 (chr-ID Gm06; pos 4602529 to 4603039)
ggacaaactggaacgtttgcttgatttgagtaaaggtacaggcttccttcttttctcaaaatgtttttatgtttttttatactaattataagatgtttttcataaaattgtttgttcttttttatagacccttttctaatttctaatttcaaatgtattaattattttttccgtacatatccttatataattattttctctccaaacattattgagaaacaattaagtggtttgagagataagaaaatggtaattttagaatgatagtataaataattgataaatttaatgtgattaactaaattaattacttttcttaaatggcttgaattagttgaaagtgtcttataattacggataaaggaagtacatttgttgaatgctcgtgttaaaaattgaacatgatgggtattaggaaatgtgtttttaagtttgaattatctgcattgaagtgttttttcgttttgtttgtgaagctccattgcgaccttctactaccttgaattatcag

SEQ ID NO: 21786 - DNA, 703 bp, Glycine max
  Intron number 2 from transcript Glyma07g15890.1 (locus Gly ma07g15890) derived from phytozome v7.0 (chr-ID Gm07; pos 15586536 to 15587238)
taataggattaagtctgtgagtccttccaatacaggtcagtttttttttttttttggtggtttgcatcttcatgttcttctgcttgaatgagctaattttcttctggggttggaaatgggcattgtataggctgaaagttgttaactttatggatagttgtgaagacatgtttatgtattcaagtctatagtacatgattgagatccttgccagttaaggcttctatggtttttctggaatggtgatctgtgtctcatggaaaaaggggtttgatttgagagacccattggattggtagactttaggtttgagtcgttatgtgaatagtagcttttctacccctttgaaaatttcacttagggttggtttggaatgggagtaaaaatggggttggaagattttgccctacaattcactaacaaaactaatttatgagtttttcacctttttaagtcctatcaggagtaaggttttctcctaggtaatttttctagagaaaaactgtaatctcagtttgtgggaaattgccttatgacaacggaaggataatttggggggttttgggattccatgtgaatttgttaatagaagtgatgcttatgtttgttttaaggccagtgacggtgagcaagtctttgtgaacgtgtttttctttgtattgatgtagggatcacttctagaagtgtcagcaggagtggccat

SEQ ID NO: 21787 - DNA, 891 bp, Glycine max
  Intron number 4 from transcript Glyma06g13170.1 (locus Gly ma06g13170) derived from phytozome v7.0 (chr-ID Gm06; pos 10313270 to 10314160 reverse strand)
aacctgcgaagaagtttttgcctgcaattcgagaggtcagtaaaattacacatggccgttttatggttttgcgtattgatctttccatatttctcgttccttgatttaattggttcttatgtacagtatatagtaattaagaatttcaaccactagctcttaaaagatgaaataaaatattttgctttccaatcatttacgatcgatgatgtagtttagagttcaagcattattactcatattttttcttattaaaagtaaaaactggatgtgttttttttaaggaaagttggatgtgttaaacaataaatataaaaccaaggagtgttgtttgagtttcttaatcgagtttcttaatcaagtgatatatgattccaatcttaactaatcattaggtatgaaataaatggtatggggagaaaaaatagtcgtctttgtatgctcttaaggtctccaataaattttaatttttgaaaaaataatttaacatgttaaggatataatattagataaaaatccttcatcacttaaaagtttaagctctatgaaagctcaaagaccaattataataattaaatatctattatccagcaatctaaataaataaataatctgttatgtcttaaattagtagatgatacaagagaatgcctaataaactcaaattcttcccttccatcaaacacttttatggataatatacgtactctctgtccagtatacaaaaaattgaatgaatgaatttattgtaagaaaaactacttaattaggcataaatatggttcaattattactggtaaatgttatgcaagttggagttagaggggtcaaatttaacagtttactgaatgattgactgtttgtgccaacagataataagagtactaaaga

SEQ ID NO: 21788 - DNA, 599 bp, Glycine max
  Intron number 1 from transcript Glyma07g07810.1 (locus Gly ma07g07810) derived from phytozome v7.0 (chr-ID Gm07; pos 6485039 to 6485637)
ccgaggtacctatcttctctctctctctctctctctctctctctctctctctctctctctctctctatatatatatatatatatatatatatatatatatatatatatatatatatatattattctattgttatgtaaaaaaaaagtaaaataaaaaattgttgtatgttcattgtatacacattataatgtattcttttgtggtcttttttcctgttggtttcattgaattggattttgaaacactggtgataagcctaatttgaattcaaatggtgatttttctgagataagaaattggagatgttttgggcaaggttttaaaagactgtccccaattgtgatttaggccgcaacatcaaggtttttggtgtgtttgtgaccgcaattgtagccgcattggtcacatctatccacaatttcctgcaatatcaaggaatgtgatgaaactgtgaccgcgactgtaatttaaaaacttccgaggaacatgtttttgattgtgagatgttactctttcttagaatttaggtagagaatctgtttttgttgctgaatatgtccagttgggagatgggattgtcaggtgtttgctctgagag

SEQ ID NO: 21789 - DNA, 943 bp, Glycine max
  Intron number 5 from transcript Glyma06g08750.1 (locus Gly ma06g08750) derived from phytozome v7.0 (chr-ID Gm06; pos 6382318 to 6383260 reverse strand)
gagaacgtgccaccaacacaaccacctatattgatgtactataagtttaattggtttgctatgcttttttaaatttttattattattaagtggttgctattgggtttttacctcgtgatgaattgcacaatgttatttgactttaatgaattgcacaaccacctatttatatttatacaattttatattgttattaaatagtaaataccattagtataagttgtactgaattcaaatataaaattaactaacttttatactattattatcatttaatcctactaataatttttaaaaataactttttctactaaaatactcttatttagaacttgatatactaggaataaaaatgagttattgagttattgcaaataaaatttcaataaattaaaagatactttttagatgatataattaaatataagaagaaaataattattattaaactcaacaagcttacattagaatctatactttattttataatattagcaccaaataaattgacaaactaactttttttttttaacaaatgtgttctattcatccacaccaattaaaataatctacctctgtaacgggtatagaatttggtctgtaaattcattcaaattattattttaatgaattccatacataataattgattactaaatcaaattaaattcgtattttagtgattctgaacataggtaaattttccttcaagaacatacgttaagctttaggagaagtaatttgtcttaaaaacatatttttgtctgatcgtattgtccttatataaagaagaaataatggacactaatttgcttacatatttacccaagatcattcagaaagtgaaaaataagtcatctatgtaaaattcaaaactgatctttacttttgttttggcccctgcaacctcccctaaaaaaaatacacaggcacttatatctgc

SEQ ID NO: 21790 - DNA, 926 bp, Glycine max
  Intron number 3 from transcript Glyma08g06790.1 (locus Gly ma08g06790) derived from phytozome v7.0 (chr-ID Gm08; pos 4871656 to 4872581)
tggggaaacttcaagctggctatctctttcccgaggtatgcaatacttacttgatctttctgtttttggtcttgttcttcttggtttatcttgctcagaaaccaagctcttagtttgattatcactcagtgcataggtgatcatgaagttcattgagttttgattatgtgttgttttcattccccatgcatgcttttcctccaaatgggatgctatgttttgaaattattcatgtattgtacataaaatatttgtgttactgtacatgtctaatcaagccttttgtttttggaatagtggccatgtcccagtccagccattcatatgttgaagtaggtcgggaatgtattaagcaggtccccataattcaagctgaaggattgcatgtctttttctagtgaaataacagtttattgagtaaatgaatgatatacttttgaacattttcaactactgcattttttcgtgatcaatctcctcttttaatctttactttgggtaagtcaagtcatttctacttcatcagaattgatgttcttttggagccatacatgttaccttatgactttggtcaacaactaatcatatgatttttaaaaggaaaaactgattaatttttgtgaaataagatgtagcattgtgttacccttgaatttttattttttttttatctacctcaaaaaaggataaataagggagaattagaaaaaatgtactattttactgaatcattctactgttttatttgtataaaattgtaatgattaatgaatgtgtatatctttctctctctttcacacactccaactttgatattaattctttatatgatatgtaactactttcctgtcactgactctttttttttgcaattttatttcaaaaaaatagattgctagaagaaggtctgcgcacttgctgaagta

SEQ ID NO: 21791 - DNA, 225 bp, Glycine max
  Intron number 1 from transcript Glyma05g30970.1 (locus Gly ma05g30970) derived from phytozome v7.0 (chr-ID Gm05; pos 36204933 to 36205157 reverse strand)
aggagatattaggtgggcttgggagttgaagggagaagggggaggaagaggtcgcgggttcgaatccctcatactacattctaaccaaaactaacaacgaacatttgccaatccaaaaagaaaaacaaaagacgtactccttttttgaatatggaatataataattagaggcatttgacataggcttctgaataaacggtgttgctttgcagaatttttctggcg

SEQ ID NO: 21792 - DNA, 771 bp, Glycine max
  Intron number 1 from transcript Glyma08g26250.1 (locus Gly ma08g26250) derived from phytozome v7.0 (chr-ID Gm08; pos 20599990 to 20600760)
catgtactcattgaaaattgaaatgcttctgttttcaaaatttctgcttggtttttccaattttcaggttagtgacaagtcagttttgttgtccatgacctatgttctaaaggcctcagtggctgagtgttctgcttttgattctctacaaaaaaaatgcactcacatgtttgttgcctctaagttttcaattttgagttgttattgtttcttctaataaagggacagattaaaatttcagatttttgtacatgttgttttttctctctcaaccatggttgatatgctaatctctaactattatgtcagctttatttgttgtcacaaataatcgtataaataattttctttttttaatttgaaggtatatatgcataagcggatgttttacgagagcgtgatactagaaaattacattgtatatgattgattatgattatttaagcaattgttggacttggaattgatcttatgctgcatttgtatcacacagagccactaaatgctgagcaatttaactttctgtagtctaaaattcttatttgtggcaaaattctctttgctatataatttagatggcctctgttatatatccatttcagtttccatgcttataaaaggttcttcgattgagttaaaattaaacatattccaaggttgttacagaactctatttggctggcctgctactttttattattctcatatttatctatatagatttagccttaataatagctacatttcttgttcctaccagggtgtggaaac

SEQ ID NO: 21793 - DNA, 928 bp, Glycine max
  Intron number 1 from transcript Glyma06g30050.1 (locus Gly ma06g30050) derived from phytozome v7.0 (chr-ID Gm06; pos 28937749 to 28938676 reverse strand)
agtgaagagcaggtcattatctctatctttctttgcataataatgaaacacatgcatgattacaatgttttgtttctgaaattataattttaactcaacattaccctcttcttccattttttatcattccatgtttgaaattaataatatcaataaaaaaataattaaatgatatatacaaattttttataatatcacttatcatagtcctctttatttggaagatttttttttacataaatactaataaaaaatacaaacaaaccagaaaataaatttaattaaagtaagattcttttataaacaaaatcaatttatgtatttgaacttttaaaattgttaaaggagaatgtctatgaaagtgtagaataagttgattttagcttacaaaatatgtgtagttattttctctataagcacttattataagtttgttaattttttaataataactatgtatgtaattgctaattaattatccgtgtaaaaaactaatgttagccaattcaactcacatccaagaaccaagtttctagtttattcattttgtttctatttttttattctattattcggttaaagtatttattggttttgtcattcgcctcaaaagtttagttaagtatttttaatgagatatctcatttcaatcacatgttgaatgtacaaaatttgaatttgatacaacttagatccaccgaaccaaaaatatgttggtttactcattttctcttaattattttttgcttgggtctttaatttagaatctgacaaagtgaatgctctttacaatttgtttacaattttgattgttcttattattgcaagttactaactaaatgcgtgatcacaatctgtgattgctgctttttttttttatgcattaatgttattatggttgatgtgaagttcaccgcaggtgttagat

SEQ ID NO: 21794 - DNA, 622 bp, Glycine max
  Intron number 1 from transcript Glyma06g45940.1 (locus Gly ma06g45940) derived from phytozome v7.0 (chr-ID Gm06; pos 48667829 to 48668450)
tttctgctgtttctactggtacccttttagaatccatgtcctcaacaatcaattctgatagctagataagaatatatcttgagattagtttttgatgggtctataatattataatataacatgcacctacaaacttgagagtacacactcatgattgatctctcttcagttttatttcaactattgttctgggtcacttcttggtctttttttatgccattacacttgtcaaatttggaatatatactttctgaatcttattcttatggccctttttatttcttgttcgatcgggatatcaccttgttatcatgatttctgaaattgtatatgcaagctttcctttctcttacgagttatattaaatattttggttttgattttcttaatgtgtgctcatggatatactttaagaagtcaaaaattgaaccaaaaaaattattgaaaataaattaatatattgaaagcacagaagttatatattcatttcattttttagtaatttaaactatttaacaagatatgacatatatctgtttatgcatcacaaaatttgttgtttttaacatagacgtataaagaattgatttgtgttttgtagagaaatcaagccaagtttcag

SEQ ID NO: 21795 - DNA, 889 bp, Glycine max
  Intron number 2 from transcript Glyma06g15280.1 (locus Gly ma06g15280) derived from phytozome v7.0 (chr-ID Gm06; pos 12048116 to 12049004 reverse strand)
gttttagttttggtatgacctcatcatgacttttcccatttcctctcttgaatctttgatctgtcatgcctatgattttaaagatgtcatgcttcttttctatttgttgtttggataaactaccaatcttgtgtgttcctttttggtgtaatacacgtatgtatgtgtgtttgtgtatgtgaagtagtaaagaaggagaaacctttttggtacaatagaattgcatgttttatgagtgtaatttcaccttgatgttatctgttagtgtcattcagattgtacaactttagtctcttggattaagtcattcaagatatgtatcagttgtgctgactatcctaggatttgaaagaggcatccatatgtcttgttggtagttgaataggggacaaattagcatcactgatgttgtaagctactatttttttcagtaaaagagtggttgagagaaaatctgagcaaaaggtatgcattcagatgacaagctgaggtcatacagtctgcaaaccttttgtatcagtggtgttaaatcctaaaatatgagcaaaatctgcaaaaacattttctcatccaaaacaaccttttcatttgcatgttttttggttgagaacttgagatcaataacagaagtattaccattcgtagatcccacaactaaaatagcattaaagtactgagaatagcatcagatgatagattaaaaatctcttctataactagtcaagcaaagaatattttggtatatgatttctttatatgtaacttgtaaggctacagatggttgcttctgaagtctgaacttctggaccattcctgaattctgacattctatatcatataatgctattatgcagctacaactttaactggtctccattttgccacgaca

SEQ ID NO: 21796 - DNA, 757 bp, Glycine max
  Intron number 1 from transcript Glyma05g38020.1 (locus Gly ma05g38020) derived from phytozome v7.0 (chr-ID Gm05; pos 41479577 to 41480333)
gatcaactttctcaccgtaatgctgctgttcctgagtttctgctctcttttttctttcaatttttgagtttgccagttcaaatctttcttttttttatatttcaatttttgggtttgtttgttccattttcctctgcctttcacttttatctactgtcttgtgttcatgtgctttttttgcataccccacttcggttttcacttgaacatgttccaaagttacgatttttagtagccaaccttacttgctgttatcagttaccacttcctttccctagctgtttattttgtgtgctgaaggtgaaaacagaaaataagaactgggacttaagggtgtttgatttctattttactgtatttagtttttaaaatgtaactaaatgaggttgctcagacaactggtggagggcgatgcaaggtacagactagagtgtggaattgagggataggttgaataagatgaaaacagaagaaaagacgatgagaaaacatttccagctgtttctgatttttggttttttaaaaatacttgtttttttaattaattttaaaaagttaatggattttatatgagaatctgattgctgagtagtatggaaatgttgtagaaaacagtttttaaaaccaggaagtgagaagggaatcaagcaggctgcaaattttttttattttatttttagttctgtgactgttgatgctgttttcatgttctccttgtgcagcttttggccattgctgtgataatatttggagtgtg

SEQ ID NO: 21797 - DNA, 569 bp, Glycine max
  Intron number 1 from transcript Glyma08g19000.1 (locus Gly ma08g19000) derived from phytozome v7.0 (chr-ID Gm08; pos 14347234 to 14347802 reverse strand)
cactctggttgagaaaggtcttacaccactcaaaggtatcaacctaatcacgttctttctttgtaaaagtttaagttccataataatccatagacatttataggagaaaaaaaaataacaagttaaaaggaatctaagactttcattttgtacgtagatatttgttcctctcatatgatatcagtgagccttgcttgctgctgtagaatggagcctcactcaaatctagtatatattttaactgtggtgccattgaaaagtcaaaggaaaacatcttctagctgtctctcttttttagttttctaaaacacgttttttaaaacagtttttaaaatttaatagactttggatgacaaactgattgataagtaaagtagaattgtttttaaaatcaaaaactgagaagggaaccaaacaagctgagtttttcctataagataaaatcaacttatacagttaaacttttagagaagttagatatttatgcgtatatttatgtattaacattaattcatacatggaactttaatataaactatttggcttttgtgtttatgatatatatgcag

SEQ ID NO: 21798 - DNA, 937 bp, Glycine max
  Intron number 1 from transcript Glyma08g27890.1 (locus Gly ma08g27890) derived from phytozome v7.0 (chr-ID Gm08; pos 22138837 to 22139773)
cacccgcgagtcgcgcgtcgccctctcgctgaagggtaggttgtgacagttggcgactccgctggggaatcttgttagagagttagaccaatcaatcagtgtgttttccttactatgactttccttttgttctttttctttgtctttttttttcttatgttcttgtatatataaactcttttgatgcttttagtgtgttttaaaatgtatgcatgaggtaaatatttattcatttgatgcacacaaacaccaacactatttgcacacacggtgagttgaaaaggggccctatacccaggtccatgggaacataaggagtggaggtgaatctgtggtcatgctaggtttgcgacttgcttgattacagtgaaccatcatctagagtttttctctttgataacatattgttgttagtagtccctacttccgtaatatgttctttgaaggggatgatacctctagagaccatcaagagagatatgatcaccttggaaattatcactaaaagcccttttagctccctcccatctaggtccctaaaataggggcacgaagcaaacacgctgcgtgccattttttcacactgccatgcatgtagtcaaatgtcgtgtacccctttgattatatttgtttatgaatattgtcgtactatgtacatccccgtattgtgcctttcgcatatgcatcatgcacgggtttcgtcttgatcccctctctttggcaaaaccaacggagggtccatgtcaccttcttaaatacatacgttgggcaccgtgctaccccatgacgttgtatctaagaaggaggcagtttcccgggctcccgtattcataaattgcatctgtgtcatatgcatttcttcatgcattcatccattccaccccatgatagatgtcggagttttgattcgcactggttttttttcactttagtaaac

SEQ ID NO: 21799 - DNA, 663 bp, Glycine max
  Intron number 2 from transcript Glyma08g12660.1 (locus Gly ma08g12660) derived from phytozome v7.0 (chr-ID Gm08; pos 9269046 to 9269708)
cttttgcctccaccagaaggtttcccttgaagcaggtgaaccaaccacaacatttttcccttcacctttgatttttggttcaagtaggtaggaaaattagaggtcaaattagtttatcataattgaaacagatatgggtttaataagtatatatcgtttaattataaataaatgtttatatgactttaaagataattattataaaaatcaataaatatatattatgagttgtgatggaatgattctgtaaaattattttatgttatttcataatttttttctcaaaagcattgtttatactatattttcatacaatttaattttaacaaataaaagagagataaaaagataaggaaaagaaatatgaaataagatggatgatgtaacggagagaattgtcgagaaaataatgtgtcgtataattatattgcatgcaaaaatacaatatctcaaattaaaatacttatttgccttgacccatttacaccagttgatgattggtaaacaaacccgttattgaacatatgtagcaagaaaaataacggaattagagaaagcctaagtcctctttcactacatccaattgtctcaattcgtcttgaagttattggcacattcacggtgatataattatcttccatttaacattgcaggtaccggttt

SEQ ID NO: 21800 - DNA, 957 bp, Glycine max
  Intron number 1 from transcript Glyma08g13190.1 (locus Gly ma08g13190) derived from phytozome v7.0 (chr-ID Gm08; pos 9622808 to 9623764)
cggagcctctgaacagtgagcagatattggatctggtttgctgtttccctctccatcaactcgctctctttctctattccttcttctgcactcctcaatccaatttttaccatttcccttctcactccgactctgaccatgacgattcttccgattaccaatcctcttcagactgaaaccaaaccaaactcaataggtactttctaacttcacttggctatttaattataaattacatcctcaaattaccaataccctaacactaggtatctttctttctcttttagaaaaagacaaaaatgtttacttgtagtttttttgtatgactttgccattattctttaatcacaattgaacttttattttgataatccccatgcatagttaggttatggtggtcgaacactaattttgattagaaaggcttaaggagttgcatcttaagttttttgttgaaaagaaaggaagaaggtccgtctatgagaaaaagaaaaaaagaaaaaaaagtgtcgctttggtcctatgaaaatatattattaggtgcatccaaatttctccaagaatggttttattcaaattccatcattattgttaaatgatgttgaaacttgaacttaaagcctgatgttgttgtcattatggtgtaagaggaatcattttatccatctctctgacaagaagaatttctgcatacctaagttgagttcattttactagagaggtaggaacatctatatatattgtatgcttgttagttatgaagctcaagtaagcataagaatttgagtaaagtgcaccagtaaaccagtgacaacgtaagatcttaacaacttccattccagaccatctttgaacagctttatattttgagcctaatccctcctttgtgtctctcgttgacttttgttgttgctggagtgagttacaagtgtgcttattaacaagtacagaaacacg

SEQ ID NO: 21801 - DNA, 268 bp, Glycine max
  Intron number 1 from transcript Glyma06g47340.2 (locus Gly ma06g47340) derived from phytozome v7.0 (chr-ID Gm06; pos 49824741 to 49825008 reverse strand)
aggtgtgtcgcgccgctgtcgtgtcgtacgaactggtaagtacccattcttgtactagttttgagtgtttgaaaatttgtatgttcttattctatatttgcttcggtggtaggtaggggcttttgttttgactgtgtaatgaatgtcattgtcattttgattgtatttgctttatcttctcaccatcatttgtttttgcctttatcgattttcaacccacggacgaagggcagcttggttgcggcttcagtatcggcttaccaaaccc

SEQ ID NO: 21802 - DNA, 621 bp, Glycine max
  Intron number 1 from transcript Glyma08g09000.1 (locus Gly ma08g09000) derived from phytozome v7.0 (chr-ID Gm08; pos 6399135 to 6399755)
cttctccaaagttatcatattcgaagagaaaaaaggtaaagacagaggttgctcaactccttcgatttttcatattctctcgccattctgcgtttccctttcttacgctctttttttgctttcagttttgttttcctttaacctaaccgcgtttaattctcaaagccagcaaatggatttcgggattgaacatcgaatccttttcagttttaattttaatgcttgtttgttgcctcaaattcttcaattgaaaaccctcacaatcacacccactacctgattgaataacactattgtgtgacgtggtacttgctctaacacattcacgcacttttccttttgcatcaccaactccacccgttgtcctagcttgctggcatttagtgtaacaatatctgtttggaactgtattcaggaatactgaacatagtcttccatctgttggttctcattcgtgtaattgtatgcggcaatattttatttttaatcaaaattagggttgcagtatttcccattccaatattagcatttgaatttttctaattgtattctcttaatcttttcttattttgtattttttgtccaggagtgactgtccaggttgggcaattagggacggaa

SEQ ID NO: 21803 - DNA, 771 bp, Glycine max
  Intron number 4 from transcript Glyma08g09000.1 (locus Gly ma08g09000) derived from phytozome v7.0 (chr-ID Gm08; pos 6400349 to 6401119)
aagctggacctgtccaaatctttgtttcaaaccatgtaagcttttgtcttttataatctttaagaaatggtctctattatctacatgttatattgaaaggttgttacttttgttcctcattttgaactctaaaatggtgtcctttattattccagtcattggaaattggaatgccgtgcaagtttttgattttgaaagctaaaattatgtttttggctgattattgtcactattggaatgcaatgcaagtttttggcagctttccaatagccacaataatcagcaaaaaacttgcattacattccaatagccacaataatcagcaattaaggtggctttccaacactatttgaacatcttgctttcaatttgcatactctagaggtcttcatatcagagtctatgagaatggttttgactggttcttgctaaggaatcaaaagggctaatttgcaaactttaaattgtagtgagagcttagattccccaagtttgccttcatctttttatatattaattgctggtaactgtgtcagtttatactgtggtgaccggtggcatgcaactgatgcaagccatctcaaaccattaaaagtttcccttatgatatctgcaatgctttgaatcagaaggattattttctgttttttttccctcattaagttagattatgtcattactttgcaactgaaaagtttcaaaatgtaggtgtagtttttttatatatatttgtttgttaagacctttttttctcctcttagttgattccgg

SEQ ID NO: 21804 - DNA, 336 bp, Glycine max
  Intron number 2 from transcript Glyma05g35460.1 (locus Gly ma05g35460) derived from phytozome v7.0 (chr-ID Gm05; pos 39495664 to 39495999 reverse strand)
gtttgcatttctaaaggtggcattttttttttttttgtatttttaatggaaaatggaagctgattttaacgaaaatatatattccatcaatacctaaagaatacttttatgtaagaacctttaagttcaagtgatacgcatcacacttttgatttccagcttttattgattttgaattttgatatatctcttggcggtttcagcaatttgccttgctggtaagttaagttggcatgtgcaactttttgattgattgaagctagttgattttgatttattgattatggacaagtttcttggcaacctaagataatgtattggtgtggtaggattcag

SEQ ID NO: 21805 - DNA, 546 bp, Glycine max
  Intron number 1 from transcript Glyma07g01760.1 (locus Gly ma07g01760) derived from phytozome v7.0 (chr-ID Gm07; pos 1165266 to 1165811 reverse strand)
ctgtgaagatccaaactttttttagaggctacttggtatgtatcttgtctttttgtgatggttcaaatcaaaattttggtgttggttatgtgggtatgaatgtgtgtatgtatgtctgttttctttgattttgaatatgctgtttggtaaattgcattggtttgtgattgtggtggttctgtcttggacaaatttatttggttggtttaagtgaagtgttttgcttgattcctactcctttgtctcctctcaaaaattattttagattcttaatgaaacagtgtctttcactttctgtttgggtcattcaaactaccctttgcactttctattctccacgttagagttgacttgtcttgttattcaaatccttatttttctgtttgatgcccttttaattaatccatcttcattatttgacaattttttttatacgttttgtcaatttcatgattttatcaagtactatactagccctttcaattcaaacttttatgttttttactttcaggcacggaaggctcttagagcactgaaaggattggt

SEQ ID NO: 21806 - DNA, 704 bp, Glycine max
  Intron number 1 from transcript Glyma07g35950.1 (locus Gly ma07g35950) derived from phytozome v7.0 (chr-ID Gm07; pos 41336863 to 41337566 reverse strand)
aagtacaagtaagttgatcatattcttaacccaaatatgaattatccttcaattttcaaagctttctctttttgaaatccaaacggttgtgtgtgtttatgatacaagaatatagaagaaaccgaattcccccttttctgtaatttttcattttaaagccgaggaatgtatgctgtagtagcatgtctagttgtctttaaatgggtatgtggaagtttgagtgatctttgtgagtattttttttcagtttctgaattttcataaactgtcgcagacagcgtccgatgctcgatcaaatagtgtatttttcaaattcagtgactttgttcggatttgttcaatttagccctagttctgatgcaaaacgcggtttcagaattcaatatacacctttctttttttggaaaaataaaataaaattgtttaatttgtaaagattttatactcctaattaatacgaaataatcttagatatggtttttaaaatgatttttacgaaaattaacaactttactatacatgtttgtatgattagatgtctgagtaaaaaaactttatactggcgatgcattataattaaatttaaataaaattgtttatctgatttgggatagctcctttgtttttactatgggctagaaaaatatttagctgtttttctgttggcaggttatcagaattgttggttctgtggtagttatctg

SEQ ID NO: 21807 - DNA, 416 bp, Glycine max
  Intron number 1 from transcript Glyma07g39630.1 (locus Gly ma07g39630) derived from phytozome v7.0 (chr-ID Gm07; pos 44045370 to 44045785 reverse strand)
aggcaaccggaaattcacgccagaaaagaagaaacgtaagcaccaattaatcttttcttatgctttccttcaacgtcaatatctataactatgcctctctttgcttcatgctttccatcataacatacatggcacctttctgttttttaaattttaaaagtaaacgtcttctgggcacattctgttttctaaaattttgctcatgagcattttaacagaacgcttaaagaaatcagaagaagaggttgatgaaagcatctttcaattttggaaacaatttacaatttgtaatagattgttagaaagcacttttttttgtgcgagggaatcaaacaagctcctatagtattgtattttgttgtttaagttaagattgaagagatagattgagtgtggagattattaatttcagaccc

SEQ ID NO: 21808 - DNA, 204 bp, Glycine max
  Intron number 3 from transcript Glyma08g20120.1 (locus Gly ma08g20120) derived from phytozome v7.0 (chr-ID Gm08; pos 15194410 to 15194613 reverse strand)
tggagaggtaacagtctgctgtaaagtgatttctgccttcacaagaaattcatttacaaaaaaaaattagttgaagattgaaaacatacaggaaaacaaacggcagggcattatcttctgttgaacaaactgagatcaaatatctgtttctttgaaatactacaaagtgctcttctgataattttaataaatgaatgcagggcc

SEQ ID NO: 21809 - DNA, 779 bp, Glycine max
  Intron number 1 from transcript Glyma06g03590.1 (locus Gly ma06g03590) derived from phytozome v7.0 (chr-ID Gm06; pos 2515783 to 2516561 reverse strand)
ataatttgactcgccccctcaaagattgttccattgtaagccttaccaatcatctatatatattaattcaatgccacgctatatattagagcatatatataaatctataacggtaatgataactcataaactatatcacgtacgcaattctaatttttttgtcttggctaattaatttcgctttgaactccatgcatatgaaccttgcgtatctacgtatgtttagaatgtaaaaatatttaggtaacttttatcagagtgatgttacattatgaaaaaatatgccgctatctaaaaaaatgaaaaatatatcacgaagttatgtacggaacatgttactttttatttgttaaaagtaaaataaatatagaaaactagagagagatttaacagaaattatgggttactcttcatttgccgtttcataaatttcctcacatctgaaatctatcaatagagagggtgttatagaattaagaaaagagagagacagcgagagttagaggtgtgttaagttagaattgtgttgctagcaatcttttgaattatgataaattgaactttttttttctcaccccataagccaataataaactgtgctagatagagtgtagaatattaaagtagtgtgtggttaacatatcttatatttttatatacaaacatgtatttttcttggctattagtttccactacaacactcaatagtttcattagttaaattaaatgggggcctgcatgcagagagattcgactgccaagtacatagttcagcagta

SEQ ID NO: 21810 - DNA, 471 bp, Glycine max
  Intron number 2 from transcript Glyma06g21780.1 (locus Gly ma06g21780) derived from phytozome v7.0 (chr-ID Gm06; pos 18345781 to 18346251 reverse strand)
ccaaaaacttcaggtgggtgtttagttgacggcctctccatgtttgagcaacaactacaaaatctgaaataaaaatattcatttcaatgagtttcaagtctgcttattagtcaaccattttaaactaaatgtttgtgcttcagaatttagaattattccactttcttatttttgtttcttttgttctgcattttggctgatttcattatataatctagtagggtcagaagagtagcttgacttattgtcatattttcatatgtttgtccgtcaaaacttagctctcattcatctattactctgcttgaacattaaaaagtatatttgaatgctagtgtattctgacatcttgtgggacttacctggaaaggggcaaattgaaggactatttggtgtatttttatgccttttagatttttatgttaaatttcactgaatacattttgatatagtctacattatttgtagagg

SEQ ID NO: 21811 - DNA, 745 bp, Glycine max
  Intron number 2 from transcript Glyma06g17460.1 (locus Gly ma06g17460) derived from phytozome v7.0 (chr-ID Gm06; pos 13812967 to 13813711 reverse strand)
ctgctggtcaaggtgtcaagttcactgaacctcaggtaccacaattttaagctgctgtctgccactggttatatgtgtttttgctttttgcatgtgcttaattgggttttgcaaccttgggtgttgtggattttgatttgggttttgtttcaggacatggtattttttttttttttgccttgctatggctaagtaaaaattgtttcttcatagagtgtatgcttttgatctttgctcagagttttctaggggatgttgggtcccatgcacaactttaaaaattctttgatgtcctgagcttctcgcatggtgttttgaaaattcctttatcgtgtctctctatgaagtaaggttattgcttaatttggaatatttttgctttccattctgatggaaagaaatcttacttttaggaaataagtctaccttcatgtttcgacaaatattaatattctgtgcatgttgagaagtctaatagattatttggttattatgaagacattataatttttatttctagtctatgtctagtttaaatggaaaacagagtttgcatgttacatgttaggtggatttacagttacatatacttgcatgtagtgtttgatggagttgtatgtagcagtgttactttttaaattattgacaggctaggaggaagatagagttattcaaattacaaagtaaaaggaaaactcatactgaaaggctgatttgtctctcagtatattctttgacaggttaa

SEQ ID NO: 21812 - DNA, 635 bp, Glycine max
  Intron number 1 from transcript Glyma08g19360.1 (locus Gly ma08g19360) derived from phytozome v7.0 (chr-ID Gm08; pos 14649940 to 14650574)
ccgcttcttctctctttccaacgcttccccctgtggttcgttagcctctcttcttcctattctttcagatctatcatcttttcgtaattcgtgattttaatgcatctcattgcttaggtcgcagttctctgaatttgtatattttatatgcatgtgattgatatatgatgtagtgattctgtgaatgcataacatattgcaaaaacgcgttgatgtttttcaatgtgcttgagaaatactcactgctctggttttggttttagagattattgctttatcttctggaagttgagtattttaagtttgatctttcttctgtttccggtggctgagttccctataatggcctatataattttttttcttttaaaatatggatttgaaggaaaattaaatagatctgtgtatgaagtgttgtttccggtcaaggcgctgtttccttttgcgcagtctttcttgcacgccaagtatttgatttaaagtggaaaagaatttcttatgcatttttatatgttttgctccttaaatttaccaggaaaggaattggtagggtggctgggtttcatttctttttttttataatttactcttgctatcacatttatgtcaggtgttctcgtgttgctggtaacaat

SEQ ID NO: 21813 - DNA, 328 bp, Glycine max
  Intron number 1 from transcript Glyma06g01470.1 (locus Gly ma06g01470) derived from phytozome v7.0 (chr-ID Gm06; pos 916875 to 917202 reverse strand)
ccttctctcaatttggcgaaatcgtcgaatcgaaggtccgttagtcgcagggattggatcggatttggattctctcatcccttctgatctgttttgcgttacttgatctatgatacttgtgttgcttgatctataatgattcttttattactcacaccaatcggtacgttcatcttcatctttgattcaaaggcgaagatcgatcggttctaattaatctgtttttttcttcttctgaatttcgagattccgttcccgatctgatgcaattctatgcttttttgtgtgttcaggtcatcaacgatcgtgaaactggaagatccagagg

SEQ ID NO: 21814 - DNA, 1052 bp, Glycine max
  Intron number 2 from transcript Glyma07g31670.1 (locus Gly ma07g31670) derived from phytozome v7.0 (chr-ID Gm07; pos 36632272 to 36633323 reverse strand)
aaaagctggtaccttgttgacttgcctggttacgggtcagtttagtcactcgctaattcccaactagctctgcttcatgccttcatgtttctatgcttctaatggatggttactgtcatcataatctaataagtctatatatcaaaaagcttttaaatttataaagtattaagtagtagtcatatacacaaattaaaatgctcttgctgcatgtgtttgggtgatcgttttgctaaattggtttaggttaatagagagtttaaagagaatgttttcaagtttttatcttataagtagaattgtggtatgaaatttttaaatcgaaataagagttacatttttaacttttagtcaaacgtgctttcagtagtaaagttttaagtgcatgcttggatttacaattttcaaatcaagttgaaatcctggtttatgtgattttaggtacaaaatgaaatgtttgtcctacattgaggaatcgattttaggtccaaaattcattttgacttaaagaaactttaagtagattttgcattggattcaaaattttatagttttactactaacttgttttaataataaaagtgtccaaacataaaccactttacttcaaaatcaatgttgcaaaatcaattagtataaaaccagcatgacataatacaaactacatggaaatgtatttttttattaaatctcaaagttatacagatagatccatattgggagaggtcatctgattccatatttgattaataaagctgattgatgcagtccatagataccctccttgctttttaagtttctctagttgtttaatagtagtagcaaataatttttttaaaacgcttaatagcagtgtcgtatgtttacttgtatttcctaattgtcccgcttcatccatgttttcttgaatgattttcttccatgtatttccacctccctcttggttggagaggatttagggtttttgattggtggtgatgctgtcaactactcatgatatactttttttttatgcagctttgctaaagcacctgaagctgctaaaacggatt

SEQ ID NO: 21815 - DNA, 1035 bp, Glycine max
  Intron number 4 from transcript Glyma06g22050.2 (locus Gly ma06g22050) derived from phytozome v7.0 (chr-ID Gm06; pos 18790995 to 18792029)
caagataagcagggttttgaacaaattgaattctggtaatttttgcatttgggtgatgttaaacactgttttttgttttgtttgactggattgtttttagaatgttaaaattgaaagggtttcgaaatgtataagtttgtaatgtttgatcattttatgagcttaaatctctgaacataattcgtaatgcatgttcccaaaatattatttacctagattattgggatgaaaaatagcagatgaagatgatacatgtatactgcttgtacaagggtaaatttgaaatggttcatattttaaatgtctagtacaaagttttgggtgttggttcacatgcagatgtccagttttgggtgtgttaagatatctcactttgtttaggaatattgttagaatactttggtaattcttcaatcctgagctatcttttgggttcacataggccaagtccatttttagtatagtatccgactctatccaatttaatgtctatagatgtccagtccaaccaacttcactctagatgttcgtctacagtgtgaagggtgtgttaagatttctcacattggctagaaatatgaacagaattctccttataaggcatgtggaaatgacaatctttctcacttgaactactttggtggttgagctaagtccagttcatttataattgcagcgttgctcaccatttttttttttttgtattctgagttttactacttttagcataagtataaacttatttgagtcctcattttcttgacttatgttattatttatttgtatcagcttaagactatgacttttgactattaatcatgaatatatctcaaatttggatttttttttagcatttttatgtgtagtagtataaaatatttaatttgtatttaaaatctttagaatagtggccatcccactatcaactatctcactaatgtgttttctgggttgaccactactatccgaaattgataactatgtttctaattatatacaattttactacaatagggcctgataaagagacaaaat

SEQ ID NO: 21816 - DNA, 674 bp, Glycine max
  Intron number 2 from transcript Glyma08g36600.1 (locus Gly ma08g36600) derived from phytozome v7.0 (chr-ID Gm08; pos 34727216 to 34727889 reverse strand)
cattgcgcgcttttagcgacttgagttgctttcaggtaggatgctcaaaaaaattagtttttaaaaaataattattactttcattaattttatatcttccttttctttttatttataagattcaagtttaaaatgatatttttttattataagatttgatctataatatttctttatattaattatttttagactaaaaatatctctcattaaaaaagaaaaaaatattaataacaaagataattttaaaaaattataaatttaaaataaatttattcaaataaactaataaattaaacaattgcgtcttatatacaggaaaaaatggaagtaattaattatataagtttaggtataaaattataaccaattttataattatgaatataactagatttatagaaatggttatttcaaataacttatttttatacatccataattaactatatatacttgattttatatataatttattatataattgattaaatagctactttattcataattagtcatatatccatattttaaaaattaattataattatagttataatatttaattataatttagttatttattaaatatgattttagttatgtaaatatctaaatcatgatcaccaatactttcagggtaggcacagagtgattgatattagagacgaagt

SEQ ID NO: 21817 - DNA, 772 bp, Glycine max
  Intron number 1 from transcript Glyma07g04180.1 (locus Gly ma07g04180) derived from phytozome v7.0 (chr-ID Gm07; pos 3041704 to 3042475 reverse strand)
ctccactttctcaaggtaagatcacattcctgggttcttcaaaagtttgcgtcttttcgtttctgggtctcatgggtctgtctctttcatccttcaattgtggttagtttattcttaattgcagagttgaatcaagtttttattttttttatatgggtttgtgttattttattgggaaaggaagacttattctggtattgacttggcttttgggattcccactactgtggttgttaggtgcttgttttgtgttgtgttgtgtgtgttgtttcctcctctgtaccatcttgatttcattggtaacagtaaaaggaaaaggttctttcttgtggaaattagaaaagggtcccttgctttaggacagtgagagagaaaagtatttcttcctggtgatgtcttttgattcgtctctggaatcttatgcaaacccttccttcccttttgcttgcttgcttgggagatagaggaaataataggtaaaagtatgtgtgttgttgatcattgtgtttcccaaaattcctgttccaactgagtcaactttttcaattgcttttctcatctgcaacaatcagctagattaagcatcctattcctacttgattgtctctttatatttaaattttgtaagaactctcacatttttgtctctttttcttgttcttcatattcatcatggttattagtgttagcttttcattcacttgttattgtttgttattattattatttttttgcaggattatttgctaactgaatcctaagtgtaattgag

SEQ ID NO: 21818 - DNA, 681 bp, Glycine max
  Intron number 1 from transcript Glyma08g40860.2 (locus Gly ma08g40860) derived from phytozome v7.0 (chr-ID Gm08; pos 40712624 to 40713304)
cttttctctcttctcacagccttcttcactcacaggtcagaagccctctctctttctctttctgtcttccgatttcgcttaaaaatccgttttttatttcccgtgcatggctttttctgaaattaattcttacccagatgaataagtgctttggaatttgtttctaagaaccccttgttttgtgggtagcttcctactttgtggtggaattggagtaatcgatctggggtatctgctatgaatcccagctttgtgattgtgtgaagaaagttttaatgggtgtttggaaactctcgattcttcttttttcttgttttgggcttttaaaaggcttgaattagcgtatgcacactttgttgtttcagtttctgagtgaaatgaatcttttttttactcactggtgcttattaggttgttcagttttgattggtaatggaaaattctgaagtttgttcataaagtattagtggcgtgataattgttaagctctcagaatgtaaatttagctctattgtcttgtgtttgcgttctttgaaccttttgatgtattctctgatattttatcaaaggttttcttgtttactcactcactctccctttctatctcaattttttttatccgtgcacatgagctgattactattgtttgaattgtacttgattgggataaaggaggtgaag

SEQ ID NO: 21819 - DNA, 611 bp, Glycine max
  Intron number 3 from transcript Glyma08g40860.2 (locus Gly ma08g40860) derived from phytozome v7.0 (chr-ID Gm08; pos 40713582 to 40714192)
gaggtacaattatatctatcttctaccttatatataactgagactttgtttcttattcaatggttccacatgttataattgtttgagtttctagtgttctttaacaatgtggagctagcaatagcatctgtcccattaagcattttatgaattatgatcaacattgatatgtagaggatgaaaagatttttgataaaaaatatttgataaagttgaagtggccaactgcacatccatttgtctattatgtacatttatatttctggtgctgtaatatcattaagttttttcttattgatttaaaagtttgtctttcttgtgttctaatttgttttagaaagtagaacaattcatggtgtctattggaagtgtctaatatggtgttattcttttatttaattcataaaaacatgatttcaacttgtaggtgtttcacacaaggtttagtatttgatgtattttaggtactgaaagataaaggtttaaattgacccgtgccatgctagtttaattgagcctagttacagaattttctaattcatggatttttatatgactggtatccttttctttcaggtacgtttaagttgacacttcagtttacagaggat

SEQ ID NO: 21820 - DNA, 461 bp, Glycine max
  Intron number 2 from transcript Glyma05g29730.1 (locus Gly ma05g29730) derived from phytozome v7.0 (chr-ID Gm05; pos 35251715 to 35252175 reverse strand)
atacttttcttcttaacagtgtacaccatcacaaggtattgctctctgctgcatttttccttcaaaattcaaatagtcgttttgtttgtgcctgtgggtaagaagtttgattgaacagttattattggtcaaatgagatttacacaaactcggttagttaaaaacaaggtgtcaacactcaacagctttagttaaggtatgtatatagttaaattaaaataagcacagaagaggatgtggttttttactagtgttcagcatcaccaaggtgtggcagagcctggagaaatcctctgcagattgtgtcctatcattgatataattatttttactcattttatgcctctgaataaatatattttcaagaaaagctacgttttgtccatctggctttttgaccatgcatcgttgttgacaattttgcaggatttacttttttcgtacaatattgccgtggatag

SEQ ID NO: 21821 - DNA, 939 bp, Glycine max
  Intron number 4 from transcript Glyma07g06310.2 (locus Gly ma07g06310) derived from phytozome v7.0 (chr-ID Gm07; pos 5037736 to 5038674)
tgtgagtttttctgcaaccatcaacattttgctctcaagtgaaaattagctggttttgtgtttgcttgtactcggaatgataataataatgataatgtagtgttgattttgggtatgttgcattgctcttgcttagattttagtctaaactttgccaattttaccacaaaaaattcgttatggctgtctgtctatcttttactactaatgcttaggggtgtttggaaaactgtttgattggtgtggaatggaagttttacatattagaattccaaagcataaaagtaaaagaggtgttggatttatgttacattggatggaatggatatgcaaacacacactagttaaattaggcagtttggttagtaagtagatactagttatatttgctagacagttagcagaattagttctctccttcatcatgtattcaccacagctaccaatagctgaaactgtaattaaagttcaaaatctggtttttataaggacaaaacttggatacagtcttttgggtacttttggtgatgttattcaacattgaattttcacctcaataatatgcacaataaaggtttgcattaaatgttagtgaaggttactgagatgaaacatcaattctaattggagaacaactccaaaagcatctaaggagttgcatctaaatttttcccttttcataattcttcatttgcagcttctctcactctattactctaacactatttgatgtaaacttaggcgtaaaaatgaacatcatagtttggctgctgttttatttattcaccgatgaaagtgcttgaagaagatgctctgtatggaattatgatttgatttggctgaactaaaccttgtgagaagtttgttcttgctgttttggtaatatttttacttttggctataggtcaaacagattacaaatcaattctctacggaggt

SEQ ID NO: 21822 - DNA, 509 bp, Glycine max
  Intron number 1 from transcript Glyma07g01660.2 (locus Gly ma07g01660) derived from phytozome v7.0 (chr-ID Gm07; pos 1086701 to 1087209)
actatcctcattgagcaatctgatcactttggtaatattttgtgtttttgtttgtaatctttaactttttttagcaaaatatataattaatattattattattattattattctttgagaattatagagaagattctaatattggcaatagaggttggcgggttttcctgaatttacaagggacatgtctttctttaatctaaactttttttcaaaaaaagaaaagtgcaatatttgtaattatccgtctaatgaccggaagaaaataagagatttcattcctataacttatagtttaagataaaatggctttatctgtttatttttccatgaattttgtaccattgtgttgtgatagtaattggtgcaaaatctgtcttttttcggcctgaagcacactttttttgatttggaagtgcaaaaaggttctcccaattgtgtggcttttcagttactaggtttttaaaattgcaggggctgaagtagaggcaaagactgaaccaataaat

SEQ ID NO: 21823 - DNA, 531 bp, Glycine max
  Intron number 3 from transcript Glyma08g25750.1 (locus Gly ma08g25750) derived from phytozome v7.0 (chr-ID Gm08; pos 20148644 to 20149174)
ctagaaagctagggtttgtcagaggactcctctcttataatggacagtcaacgtggtaatttgttcttatctttttttgggttttctattgaggactcgtgtttttatgtgaaattttcatgctccgtagaatgaatttgtttgcacttgagtgatttgatttattggtgaggccattgaagatgaaattgtcattgaagatgaaagtgtgatagatatctgcattactgtttcttttgagcatgtgaaacatgtaaccgtaaacacaaaatggctactttttctcattgttgttttcctattctctctttttgtgtgggtgggatttgttgattttttgtgaaaaggctgcagaagtcatgatgtcaagtatggttagatattccgatgaaaccttttgttacttattttgcagaagtcatggtttcattgatgatgacacaaataaagcactagatggctatggagcaagaagagactaaaaaagctttctttattttgactgaagagaagagagtaagctattagagg

SEQ ID NO: 21824 - DNA, 425 bp, Glycine max
  Intron number 1 from transcript Glyma06g14670.1 (locus Gly ma06g14670) derived from phytozome v7.0 (chr-ID Gm06; pos 11510464 to 11510888 reverse strand)
tctccgtccaccgtcgcagtcggagcagccaccaggtccgtcgaagctcgtactctgaagtctgttcttcacttcttcccctctgtacttgatttctcagaaagggttgttgttttggttattttctctcttttgtaattttcccctttgaatttttattataattgttttatctatcattcttttattcccaattgtaatgatgccacggaggggaagtaatcactggcttgcatttgcattatatattgttttgaaatatttctcttttgaaatactgtgttgcactctgccatttgaaaccttagcttatttttggggtttctgaatactgaattgtgcacacttctctttgggttagtctgctaagctgccattttttatatgcagagtttagggagaaaccttggcaagtagaaaattag

SEQ ID NO: 21825 - DNA, 431 bp, Glycine max
  Intron number 2 from transcript Glyma07g10850.1 (locus Gly ma07g10850) derived from phytozome v7.0 (chr-ID Gm07; pos 9050473 to 9050903 reverse strand)
agttgtgattttttttttccagtgaaaatcctgtggtaagagacaaaattcattattttttttaaagttcaaaagatctcaaaattaaaataggcaggctaataccaatttatataaaaaatatgaaaaaacatattttatcaaaaaaaattattacatgagaaacactttcctattatttcttgtctttttgcattttcctgagttatttttgcataagaaatgtcattttctagtctaccaatatttttatattgtttattatgttaattaatgttcttaattaataaattaagtatatatatatatatatatatatatatatatatatatatatatatatatatatatatatatatatatatatatatatacacacacacacggattatttcatagattgttaactctattagctgtggcacttggtc

SEQ ID NO: 21826 - DNA, 697 bp, Glycine max
  Intron number 1 from transcript Glyma06g13940.1 (locus Gly ma06g13940) derived from phytozome v7.0 (chr-ID Gm06; pos 11021410 to 11022106 reverse strand)
gtgtccctaccctcaccactgaacagattcaaaaggtgccaactttttttcattcagtcatttctctgtttcattaatgttatcatattactttcttttaaccttcttgattatctctgcacctatgtttgtgttgggatttcataaaaatgtcacctttcaatgttgtgcattttccttgtccaaatcttgtttatttaatggcacagaatgtgcatcgggctccactctttgtttttccttgtgccctaagttattaatctggttttcagcttttgttatttttttttgcttttcttgaactgaatgaaagggtcaacgttaattgtatgtgtttcttctttaaaaaaaaaatgatgcttctgtgtctatgtaatcttgtgatatcaaattcatttcatgccatttatattcctctttgataacatgggggcgtggaattttgcaaaagaatgtgtggtgtgtgtggtgggggtggagtgcattagatgaatacgtaagtattttggtgcgtgtatgtatgtatatcttgttcagaagttagatgaatgcatgatgcatttggttaaaaatatttggtttggttcttttattgaagcaatgattactaaagtatctatgccagtttatctcatatggacaagttcttatgcttggtgcagtacttggaggagaataaggagctgatcctggcaat

SEQ ID NO: 21827 - DNA, 568 bp, Glycine max
  Intron number 1 from transcript Glyma05g30120.1 (locus Gly ma05g30120) derived from phytozome v7.0 (chr-ID Gm05; pos 35552353 to 35552920 reverse strand)
ccaacctcgacgctcgcgatcgctggggcagcacggtaatttcactctctcctctcctctcctctcctcgccatatattatcttattattgaagaaattatagtcataaataataattttgttaatttttataataattatttaaaagagaatttagttttacaactctgtatgctgaaagtataaagagtatttatattcttgatgaaaaatgtttatatccacgatgacactatcatcgtgaaaataatcactctttatattgtcatttgataaaaaaaattatgacagatataacttatttttaagttttaaggtagtttacataaaattcaataaactcatacctatgatgattactgtaaaattcatctgacctttgattggttgataatataaaaaggtgcatggcaattaaactctgttattatcaagtttaatttgtaaacaataaacaaatcaataaactttaacatacaaatctttgagatcggatgagagtgcaaaattgatttgattttctctgtgttaaatggtgatggatgtgtggatgtgcaggcggcggccg

SEQ ID NO: 21828 - DNA, 906 bp, Glycine max
  Intron number 2 from transcript Glyma08g14460.1 (locus Gly ma08g14460) derived from phytozome v7.0 (chr-ID Gm08; pos 10496709 to 10497614)
ggaagacagtgagcaattgcgaaaagcttttcaaggttaccttacgaccactcattcatttctttcattttgttgacaattattttgtaattgttagatcatcgatctgttttacattttttcgatctatctcgtttgtatttaagtcttttggtgtgtccacgatctgattgcgcggttttattatatatcaactgttaataattagatcatggaatagattattgtgtctggtttatgaaatcactgttagtatttctgcttgacgagtgctggaacggtggaaccgcatccggtgcagttatatttttcatacattcacgcagtcagtaaattgtgaccgttggatgaatatcagacaactcaggcctagaataagtgttataagttcaatctacaagatagaatacaactatacaagccttccgatcttcatccaacggttacaatttgctaaccgctgggaatgatgatagttcagattattttttttaatttaagcttcattctcatggtttggttgaataaacttccccatatgtactcataggagaaaaaaattaaaagaaaaaaaaggaagctaaattagtatgtaaatcttgtctttttaagaactaaatgggacgatgtttggcacagcgttaatgcagtaatactaatagttaatattagtatgtgtgtgtgttcagaagtgctcaaataagtgaagataactattacagaaaatcaatacatagtgaagttggatctttgaataattccaaagttctcaaacaaggaaacttactttgttcctttgtttttatcatggcatgaggcattttttattctctcattgcatcagcatgttttgattgtccatccagttgttgtcactgtgacatatcttcgcagggtggggaacga

SEQ ID NO: 21829 - DNA, 971 bp, Glycine max
  Intron number 1 from transcript Glyma08g15150.1 (locus Gly ma08g15150) derived from phytozome v7.0 (chr-ID Gm08; pos 10979948 to 10980918)
ttcacttcccttctatcactcttctcacttctgaggtaaacattcttatttcttcacaataatattggaaacaacctcagtcgttgttgtcatttttttgcttccaaatttgatgctttgtttgttaaatactaaccaattctgttagtttgtgatttggttagtggtggagtcgttgggccgtaatgggtctctttacactgtccgttatggttaatgactctgccatttcattaccaggtgggtaacccatttgcatttcgtgtcttgtgttgtgtaaatgtgttttttgaatttgtgacataggttagtgggattatatttatgtgaaaatttataaatgtgaggtttatctctcttagctacttagggttaggggatgtgtggaggttcaagttcaacttgtgatgaccaattacgtatggttgttgtaagatgatttttcttctttcatttttcttttagttacgattattattctattggtgagaatactggagagcttattagtttcacaatatacaactgcaagtgtattgagaaacggagaaattacactttagtaattttgattttgctgcccttatttgttacgaggatttatgatttattgaatcaagtagcaccattgaaaaccagaggttttcttaattcaacatttgtaatttaggacttaggattatattcggggagggagtaagcaaattatggattgtaccatccgtgttataaatgatcagtgaaaagggagtatcatttttacatataaactaaagttgttattggttagtatatttgttattttagtgaatgatttagtagatagatctatagggtgaagggtgagagtctcatgttcatgtgtgattttagcactctgtttccggctggtttgtggtatctgcttctcaatttggaggatatatggttttgcagatacttgtacgaaaagaaagcagaacttacttctg

SEQ ID NO: 21830 - DNA, 810 bp, Glycine max
  Intron number 3 from transcript Glyma08g15150.1 (locus Gly ma08g15150) derived from phytozome v7.0 (chr-ID Gm08; pos 10981431 to 10982240)
tatacccaattgacacaataaaaacacgtctgcaggcaggtttttatgacaaaaactgtaatgaagattaagggttgtgctttgctgtgtattatactgattactgtttgatgctgaaatcttgaatatgatgccaagtgaataaggcttcatatcagagcctgctaggcatgattcttgacaaaaattctctaaaattttattttggcatttaagatgtcccgcattggcaaggaatatggcccaaatacctccagtaagactttggcaatcctccttctttgaacaagtttttgggggcaggagttaggcccaatttgtttctaatggcccattttgtttgcttctttgatttctggagggaatatggaggggggtgttggaaagttccacgtcaatttcctcaattgatggttgtgagttatatacttatcggtcaacttcatttaatgtcaattggttttaagatgaaatttaacaatgaggaaatagaaaagctataaaagtttttcaagcatttgatatgtatggaatacttaattagttgatttgcataatataatggactttcctgtatttgaataaaattttcaatatgctaagtttgggttaaaaatttaatttgtgctcttcatgacaattttgggtgtactttagtttatgtccactgaccaatgaccatacaattatatgccctttttatgtgtgcatgcatgtatgtctgtagtttgttgtgttgacataaaatgtgctgatgatatatttttttccctaggctgctcgcggaggagaaaaactaatattgaaggg

SEQ ID NO: 21831 - DNA, 1003 bp, Glycine max
  Intron number 1 from transcript Glyma08g05220.3 (locus Gly ma08g05220) derived from phytozome v7.0 (chr-ID Gm08; pos 3703555 to 3704557)
atttctccagtttcatcagacaactcaatatctatgtccgtctctctcttttcttcaattcatttcgattctgtttctttgcctttgtaactttatatcttcatctgcaaattattatatgattattgctatcatatattccatctgattgtttttgtgattcataaatttactgcaattccaatattcttatccagtgcctgaaattgttgcaggtgctaaaaaattaggtcatgcttttgatgcatgaactcactcacttttttatgcttataattcttccgtgcaccttgtttctgttgagtgagcctttgaattctgcactcgttgttgctcgcagaactagatacaatatagatttggtattcgttcgcgtgagttttacctgctcaacaattcgtactgtagatattatcttagaatagtgttcatacttttccatcatctatactatgcattcttcttggcttggttatgtttggtttccgtttcacctcctacaagttatgtatttggtgatatgcttggtttctttcaaagtatgttttcacacttacatttagcttgaaaccaagtttcaattgaaagcaatatcaagcttgctttgctaactcggtttgcaaaattcattcattcatactcttaagtttaatccaaacatgcacttagacttagaagaatatttgctgttccattccccaattactgactttattacctagatagtggttgttactttctgacttaaccttgttccatgacaacctagccctggggctctttgttggctgataaataagcatcttaaataacacttgaccttgtgagaagctacaacatctgaaagagcattggcttgtttatattggtgcctctatctttttatttctttgtatttgtgtcattcctcaaggttgaggtgagtctttttttcaaagtgactaattggtaactgtaaaatctaacagggtttcaggaaaattgatacggattgctgggaatt

SEQ ID NO: 21832 - DNA, 663 bp, Glycine max
  Intron number 2 from transcript Glyma06g43820.1 (locus Gly ma06g43820) derived from phytozome v7.0 (chr-ID Gm06; pos 46833919 to 46834581)
ttgatactcccgggcacgccgattttggtggtgaggtgaggttttcatcgaaattgttccaattagtctggaactatttttttttatcaacaaatggaaataaattgttaatttgttagtttttgttagcagcaggattgaacgagcaacctttccctctttcctttctttcttaatcacccaaccaaccttatatctccaaccgacctaataagagaagaaaataaagaaatgagcttttccaaaagttaagctaaaattagcttatgcataggttaaaaatcatcttatagagaaattatatgaaaaaacttttacagattagcttatataaacatatgctaattttagcttatgaagaagctcatttcatttttttttcttattttcttttcctggaagtgcttcttgaaaaagtacgtttggagaagtttatttaaacaggcccgataacatgtttgattgcaaaattggaaagtttttcttttacttggaaaaaatgttaaaaattgcctttcgttttttatttgttttgttagtgtggattttgaagtaattaagtgattattaattcatggaaactatatactagttgtagtgttttctggctgcttttatcatttttatgtttgggttgatgagtaggttgagcgtgttgttggt

SEQ ID NO: 21833 - DNA, 971 bp, Glycine max
  Intron number 1 from transcript Glyma06g04980.2 (locus Gly ma06g04980) derived from phytozome v7.0 (chr-ID Gm06; pos 3518193 to 3519163)
agataaccgagtgtaccataaggcttgcttcagatgccaccactgcaaaggaacactcaaggtctctctctctctctctctctctcttatgcactctttggatttgtatctacagatatatataataataatgataattcttcatggttatgtagcgtttgactctagttgttcagatctttctgtacctggatctggtgtctctagttgatcatctgaacaaaccagtggcatcaattttagcacttgctttgattgattgttctgtgtttttaaaattaagcattttcattacaagacacttcctgtgaggactcttacctgttcttgatattgttgtaattttttttctcttaattttctttccaaaaactcgcctggatttcattttgtcgaattatgaaccagcttttgaaattaaaaagtgaaaaaacatgtattatacctcagaatacaatccatccaaatttagattggcaaatctatctacttgtgctcatttattttcttttattttttgattgatgaggtggatggatctaactctgcctcctcccttttacgagaaattacagtcttggccaattaccacgtgatgcattattaactccttttcataaattaaaaattgattatactaataatttaggacaacataattctgaactatacaataatttttttcccttttactgtttttccactaaaactgaaattggtttggcaatctttagtttttggttgatatggtttaatttgtagatgttctgttagttttcaaaaactggctatggcaaataatattggtacctctttgccttcttgtgtattgaggtgtgtaactggatttaattttataaagtttactcacagagtattgtacttttaattgcagcttagcaactataactcttttgagggggttctttactgcaggccacacttcgaccaactgttcaaaagaactggta

SEQ ID NO: 21834 - DNA, 801 bp, Glycine max
  Intron number 1 from transcript Glyma08g20410.1 (locus Gly ma08g20410) derived from phytozome v7.0 (chr-ID Gm08; pos 15434207 to 15435007 reverse strand)
ggatagggaaccaaagcctaaagactcgccttcaggtatcgtcgtttaaaactctcatcttttcatatttatcgtttacaaaattcttatacttggcattatgctatcatggggttttgatctttcatctgttaccattttttattttgtgaccttagtttcaaaacattgcttgatctattaaacgttcttgttgaaattgattacaatttcaatttggtaataccctttgagttctccaattagaacctatctgtagggaactgtgagaatagagaaaattggatatattacccttgttttatatcaaaagctgtgtaactacttaactgacccataacagaagaatccatttatgactcttgtttttttaattcttatgagtttcttctgcatgcctattgctgaaagttctttgctttttggttgtggacttgtggggaagatgtggaggttatttgatttcctatgttggaattatgggttccagagtaaattataatgattgatgacacctctttgaggttttttctttcctttttatattcttacactaactctttgaaaaacattacactgacagccttttatacattacacattacatgtgtaaacattaaaaaagccagggattacatgtaatctgaaaaaaacctcaaggttgtaatttactcttggttcaaagttcttgatatatatatatatatatatatggactaattccatgatataacagtttttttcttgcttaaaagaaattaaagatttaagtccttgtgttttatttcatgaaagaaaaag

SEQ ID NO: 21835 - DNA, 892 bp, Glycine max
  Intron number 1 from transcript Glyma07g01530.1 (locus Gly ma07g01530) derived from phytozome v7.0 (chr-ID Gm07; pos 992927 to 993818)
caagcgtgtcagttccttcttcttcttttctgtctcaactttttttgttgttgcaatttctgtttctatgtttttgctcatattcctgtctgaacttgtttttttcatctttaactggatggtgttgtggttgtgactatatgctatcaatcatgtgatactagcttgatcattggatttttattttttatgtttctggtttatgtcattagagtattatttatagggtggaattgttttctcagcttcttaattatgttccccacatcttgggatgctttttcctttttttcttcctgagttgttggggaatcttgcagccgccattgagcaatggagcgttttaaacctttaaaatagatatgattgctttctctagttaaatgtgtctgttactgcttcctgtttagtgaagcttaggactgagtagaactaatttatgtttctcataaacttatgattggaactgttttgcttttaccaattcgttgatttgtgtttccagaatgagaaattgaaccatatagtcttgtcattcttttggagaaacattatgatttatgatgcctactccctcgtccctaatctatatgcccaagataagctacaaacagattttcagaagaaccagatatagttttagaacttggctgtggctttcccttttcagccgaaatttaagctgtttgttattaggaaacttacccattttccactgtaacttcctgaattcgattcattatcatataaaaaattaatgtctagcttgtgtactacagttgtctttcttgaatttgtttaaaggtttattgaaatttgcataagatttgattttgaaaaaaacttctgtgatacagggattggtataatcttgaaaaatcaaagcgggtaa

SEQ ID NO: 21836 - DNA, 902 bp, Glycine max
  Intron number 2 from transcript Glyma06g14760.1 (locus Gly ma06g14760) derived from phytozome v7.0 (chr-ID Gm06; pos 11570742 to 11571643 reverse strand)
aggtaaccgggctctaactttatttgattaggccattaacatcatcagtgtcacatgcttctgcttcccttgcttattcccttcttctcctttctttggatttataagaatactgcatgtggttatgcccttgatccatcagaaataatatcgtatgctaactgtagttgtgaaaaaaatattatttcaattcaataattgcttatatggaataagtttaatatttggaaatagtaggcaaaaaatgtttttaaggtaacctgtttcatttggattgtttggaagaatcttttttatgtagtaaaattacaaaaaattattttaaagttttttgtagtagctggttttgtatttaaattaattaattgttggggataaaattgaaaaataaaggttagctaaaatataaactgttagcttttcatcaaagctccaaaaatttgtttataatcaaaaagctatttcctttgtagagattataatctttgattgtgaattgtaattcaaattgctaaacacatttgaataataacatcaacactctttttcttctatcaaccagattatgtgtccatttggcaaacctccacaatcaattcctcccattgtgagacatgcttcggtgtaaaatctgtggccgagattaattttaacacagattcttatttaattcaatgctcaaaattaattctgaaaatcaattttacctaattttgagacaaacgggcccctctagtctttaaaagcaatctaatccaaacatgctataattggccgttccttaacaaaatttatatgctccccagaacttgcatgttttgtgcttttcctgttaattatcctgagttgtatattattcaaatttaggtgttgaagtgggtagcatttgcagaagccttccc

SEQ ID NO: 21837 - DNA, 580 bp, Glycine max
  Intron number 1 from transcript Glyma06g14760.1 (locus Gly ma06g14760) derived from phytozome v7.0 (chr-ID Gm06; pos 11571703 to 11572282 reverse strand)
tattggctctctccaagtacctatcattggatcctgtaagtgcatgctatttttatttttattttttccaattttccactcacattttcattgagcacttcaaaacccatgcagaacagtttcatggggttgcattgcatttacctgttagtataatgtttgagtaattggcttgatttcacagaaaaccaaaacggtgtttttttctcttttccaaatatccaactaaaatccagactggattctgtttgtatgaatttttctatgaacacttaaaagaaaagaaaacaagaaggtgaaatgaattgagtttttttggagaagttagatgagagagtttctataaaagttaagtgcataagttgattttatcttacaagagaagttcaattattcattttaccttcttatctttgtctcctataagtgcttatggattagttgatagatggtaaaaatattagctgagtccttagtatgagttctcaacttcagcttgataattatgatgatgcaaattctaatgctcctttctttgattgcagagtgttgttccagccgatacttcagacagtgatat

SEQ ID NO: 21838 - DNA, 384 bp, Glycine max
  Intron number 2 from transcript Glyma05g36490.1 (locus Gly ma05g36490) derived from phytozome v7.0 (chr-ID Gm05; pos 40311260 to 40311643)
tttttccagcaattcaggtaataataatgcctttgtatgtcttcagttgatgtttccctcccttttattcgctcatgaaattttctctatgttgagcctaacacaatctggattttgtgagaaagcctatggtagtgctgtgctacaaagtttataacattatggatcctcattactttaaatatagattattatatgtgtgctacaaagtttatagcattaagcctatggtttgccatttgatatgaagttaatggtaatttttttttttttttgaattcgatgaatgaagtcaaagagatctgggatcaaagtgttagggttttttcattgtgttttcccccctgttttttcattggatgaaatatatattgacaggaagtt

SEQ ID NO: 21839 - DNA, 864 bp, Glycine max
  Intron number 4 from transcript Glyma05g36490.1 (locus Gly ma05g36490) derived from phytozome v7.0 (chr-ID Gm05; pos 40311874 to 40312737)
ttgttgaagatgtatcctttgttttccctcctcaattttgtacacttggtcatcatcatttaagtggatgcacaattaggttccttcctttttggtgcaagtattttgtactctctagattcttttgttgttattctcttcaagtgaatgttttctggttttgatttgtgaggctgattgagtattctgatgaaatagatataagaaagttcaggggttgaatttctgacagaagaaacctaaggctttaagaaactgttggagaagattgctctgacctaggtattataataataagtagaaaaagtttaataaattgcagacactgctgctagaagcaaattcaccaaatgatggtagtaagtggtccacaattgtaactaagccaatttcattttgtggaaacagtgatggataactgaagtcaagagattgagctgtgaacttataatcctagttttttttttgggtgaatatttatctgagtttgttcttaatgaaataatccaaagtctatttttttggtcttaatcctccggttcatcaggggaaagggaccccaacttatccggagtttggccaagaaggtaagtaatccaaagttcatttcatccagtgtaggaggtacgggagttttcatttattctacatgtttaattcaaagtgcaatttgattattattctcaaatttaatgtcttctgagttgttcttcctgctcctttctgagcattattctgctgattatctttatttttataccatatcacaatcataatgatatttgaaatgttatgttgcttcccgctggatttatctagatttttcttgacccaagctaacacaggatcagataatatttccca

SEQ ID NO: 21840 - DNA, 435 bp, Glycine max
  Intron number 2 from transcript Glyma05g08320.1 (locus Gly ma05g08320) derived from phytozome v7.0 (chr-ID Gm05; pos 8276948 to 8277382 reverse strand)
aggagctctctgtcatcatagatctcattaacactgtaagtaatgcatgttactttctgtcattcatgggaaaaacctcaaggacttcctttggaacattctttagaatgaaatgcctgtatgtggcttaaaggaaactgtgttagtttctttcatcaaggaatggaatacagtgttgagagaacttttatgaatgtcaacttacaatgctagagaactaacaatcatgccatttgaccgtaatgaaacctttctgtataaccaacttctttgcataatgggtggcaaccgtgttttgaattttgattaagatttttcttggagttttttggtgtggtgcagttgtttatagtgtaaatctgtaactgtgtaagttatgtgcagtttgacaatacttgatgctttgttcttattattgtttttaggttgaagcaa

SEQ ID NO: 21841 - DNA, 333 bp, Glycine max
  Intron number 1 from transcript Glyma06g20570.1 (locus Gly ma06g20570) derived from phytozome v7.0 (chr-ID Gm06; pos 16987772 to 16988104 reverse strand)
ttcttgctgggtatgttttgctttttcctacttttctaacaaagcactttcctttcttccaaaaaaataaaataaaatgaaaaagcacttttcttttgttgctcttacataccataccctctgtgaaacacactactctttatctttgaaattatttctaaaatgaattttgattatgtgccacagggcttcacaaccgaacccatgactaaatttaccatatttttcaagttcagtgtgttttttctttgtgtattaactactgatgatacctttggctattggatttctctttcaggcctgtgcttagtcttgcctatcctctgtaagtgc

SEQ ID NO: 21842 - DNA, 510 bp, Glycine max
  Intron number 5 from transcript Glyma07g05580.2 (locus Gly ma07g05580) derived from phytozome v7.0 (chr-ID Gm07; pos 4208754 to 4209263)
aagacaaccaactgcgttttagcctcttttgccaggttctatattggtatccttttgattgcaagagttctgttcacaaatattgcagtttttataatacatttggtagaaaactatttctttgctaccagaaaagaataaaaaaaaactactattttgcctgagatatatgtttcaacttgggaggagggggcatgggatttaacagttgtactagctacataaattagtaggcataatatcatttccatggcggtatgacacattttaattgatataagaatacatgtagtttgtcactggaaatactctcttttgcagcatattttttagtagtaataggcagttctgagtgcaagaaggctacttgcatttgagttatatgatggatattgtaatatgtgctctttattaatatccatctaatgtctactcttccctttccttatttttttctctttgaattaatgtccaggctgctttggaagccccaagggttctgagtcttaa

SEQ ID NO: 21843 - DNA, 676 bp, Glycine max; identical to SEQ ID NO: 17518
  Intron number 1 from transcript Glyma08g22620.6 (locus Gly ma08g22620) derived from phytozome v7.0 (chr-ID Gm08; pos 17178818 to 17179493)

SEQ ID NO: 21844 - DNA, 443 bp, Glycine max
  Intron number 1 from transcript Glyma07g15410.1 (locus Gly ma07g15410) derived from phytozome v7.0 (chr-ID Gm07; pos 15252290 to 15252732)
ctcaatatctagctttcaaaacatatactttttgggtcagtaaggtttttgttttggttttgattttgattttatatttcagtttcctactactttccttatccgtgtcagtgtgactttaactgtgcaagtttcttgccattaggcatagacttatagtagctcatgaaattgagtgtggcaataaagttatagctctgcactataatgtccactctgaaatgcttgaacttctatggaccaagtttacttatatctctgtgtggtgcatttttgtacataaatttgtttttaaccttttcactgtggaacttagctggctcatggaagaatttcaattagaagaatttgatcatttaatttaacttttctcttacttggattcccatttttctagttcctagtttaatgtggatttgtcttttgtgcaaccagagatcctt

SEQ ID NO: 21845 - DNA, 683 bp, Glycine max
  Intron number 1 from transcript Glyma06g07900.1 (locus Gly ma06g07900) derived from phytozome v7.0 (chr-ID Gm06; pos 5811342 to 5812024)
ctttcattttgggagtcatagccgagaacaaaaaggtaatcaattatttttctgcaagtatttatctgtgacatctttttaaatcgaacgggttaatctttgtttgatcaattataaattgagtatgaatattgtctgatatgattgatatataacttgtctgttaagttaagtatgtgattaagattttgatggttagaattgggagattaatttccttaaatagatcccgataattggtatatcaaaagattagtccttcatatattaatagatgtttggattaaagttaaaaaaactcaaaaacatatttactgactaaacaacacttattttcttattcatttggtgtattcaaatttgttattgtactttggaatttgcaagatatattaggtttaaaaaatgacatatatgaactgggtcatgtgataattatgtgtacacataaaatttgttaataagagttattagattgatttggggattaagaaagaatgaaaagaatgaaaggtcataaatttcacccttcggcggacaaaaaactaataaattaatcaccattgacctttaaaaaaaatcaaatttgttgatgcaaggtaatatgaaattgcttagcgtgtgataaaaaatagagcggaaattctgaatatttgttttaataattacagcctcctgctgga

SEQ ID NO: 21846 - DNA, 973 bp, Glycine max
  Intron number 4 from transcript Glyma05g22480.2 (locus Gly ma05g22480) derived from phytozome v7.0 (chr-ID Gm05; pos 27713298 to 27714270)
tgggaacgttattgtcgtgcagtttctgctattgtgtacggagcaaacttctcatttccttctaattttaaaatttcttctgtctagtgtagcactcgtgcatgcaatgagacacagacacaactgataaatgtacaagtctactagggtacatttgtgttggtaatttgtcaacatatgcatgtaggatgttttccatacatttgatatctggtaataccataatagacttgctgatcaaattacatagtcgcttgttttggtcttcatagtagttagtttcattgccggtagattttatccttctcaagactggtggctgagttgttcttttacctccacgagcccaatttttttatcagcaaacttgatgcaaacccacttgtctattagaggcccatgtcaagagctctgcctggtctaatgtaaatattaattgaaagatacttgcctgtactgtacctgaaaaaaagggggaaaagtgcagaggaatttgtctgtatgagttgattttactaatgactctgcaagccatgtgtcacaataaagtttatttactagtttatattgcttatcatagttagagcagtttgtacagcgagaaagtaagcatggctctttgaaaatttgtcctgtctctagatgggattgtccttcactgaatgagttctatgcttccacaaattgaatctttcactgtctaagcttactgcttccagttctgaaagacttggtttgctatattacaatgtagcttttctagtcatggaaaagttatgatgccgtcgaatatgtcttcctcttcgatctttagcagttgtgtgattggatcatgcagttgttgccaaaatttctctgaattgatgccttttatcctcctacatttacattagtgcaggagctcaatgctatcttgatctagaaatgattagatttcagttgcagttcccctaatatgatgtttcctgcagtt

SEQ ID NO: 21847 - DNA, 568 bp, Glycine max
  Intron number 1 from transcript Glyma06g21310.1 (locus Gly ma06g21310) derived from phytozome v7.0 (chr-ID Gm06; pos 17891199 to 17891766)
attgtttttttgtccaccatcaccacctggcactggtagaccattccaaccaaaacacacaccaatggctttacagttttgagcccctcaaagattcactcatattttattccatcaagtacatgagttttgttgctcatagaagaaaaaaaacacatagcacaagagaaggaccatcatcattaatgtcagagcaggaaaccgattcatggggcttcctgtttgtctgtttgttgatccttttctcaggtactaactcaaaactctgttcccttttccaaaaaattaaaagtttttgcctcaaactcctttttggggtaataataattgctttattggtgctgatgattggtgaaccttaataagaatcaatatttattattaagttattaagcaccaatctaatttggtggtggggtgttgttagattctctatttattttatgtttgttctggttttcctaggttgatcattgatgctgttttgttagttatctttcatgtttaccaaggttgtggtaccttttgtacaggtaaactagttgttggggattcattggaaactgac

SEQ ID NO: 21848 - DNA, 822 bp, Glycine max
  Intron number 1 from transcript Glyma07g14340.2 (locus Gly ma07g14340) derived from phytozome v7.0 (chr-ID Gm07; pos 13708931 to 13709752)
agttggaccacctcccccaccttctggtggattgcgtatgtgtctctctctctctctccctccctcttctcttacaattcaattcaatccattttgaagaaatgatgattagttgagagtgtaaaaatctctactgatagtgcatgaaaattgatctctctctctctcttgctgatttctttacagaacttggaaaataatttctttaaaactgaactttttcaaatttgtatttaattttgatttgattattcatgcgactgattagtttagattaactcctttttgccttttatttcttaattgatgtacatgtgtgcaaatgtctatgcaatgatcataacttgtctagtgaaaatcattaatgggtcatggatgttgcattaaaagacgagggcttgagggaagaaacatggaaattggggtagagaagttttgagatagaattgaaattggttttagagggaaagataggaaaccagcaaaaatctgaaaaaggggttttgtgacatagtagtagtattgtaccacgggacagcaagttttgaacagaaaataggtcgtgcatgttgcattatatgatgagagaagaaaaatagaaatggggtggaaaagtttgaggtagaattgagtttgattttagaggtagatttcatttatgataaagggttagaggcaaagacaacgaaaacaaaagaagaaaagaaagaattcttgaagtggggttgttattagggacataaagaatgtagtttgaagatgttataattataaccatggtgggtgtgttatggaatatggcagctggaacgttgaactcag

SEQ ID NO: 21849 - DNA, 758 bp, Glycine max
  Intron number 2 from transcript Glyma08g10070.2 (locus Gly ma08g10070) derived from phytozome v7.0 (chr-ID Gm08; pos 7241665 to 7242422 reverse strand)
tgttcagggagtcaagcgtggctaagatcaccgatgtgagtctcggatatcttgtatttttttttgttcttcattgtagatattagaaaaagattttcaatttgatcctctcaagatgtttatgtcaccaaattagttcttcaattcaaagatgggttgtcagttgtcaccacactagatctctatgaagttcagtcacatttttctctaattaatagcttatgaagaaattatttcaaaaggttcatagcagcaaatcatttacttatttgcattcaaattattcaagtctgttaagtacatttgcggtttagaaagatattatacaaagttagtgtctttggtgaagtgaaatttaattgagatgcatattgatgctttactaaatcgacattggtttatgtgatgataccatttactgtatttactattttaaaactggtaatttaatacggttagttaaagaagacttttcctaaacctgttgtctttttctaccacgataaatagtactgtcttgttattgatgctttatgaccttgagaatcatagttattaaacgtgtcctttcatcagcttcagaatcatagtactgtgtcttgttcttgttgttttatgggtaaattgatttttgaagaatattttattcatattctatctttggtgtttattagaatcttgttctagtttctgatcttcgcctgtgatgtttgttaatgaatttcctttttgccagacgccactttctcacatatctg

SEQ ID NO: 21850 - DNA, 833 bp, Glycine max
  Intron number 1 from transcript Glyma06g30020.1 (locus Gly ma06g30020) derived from phytozome v7.0 (chr-ID Gm06; pos 28801905 to 28802737)
gaatactcgccatctctctaccaggtttttatttatatttatcttgattccaattgtttcactcttctttaaaacaaattgaatggaaaagggaactcttcaaaagacccacttaaacaatatgtgctcctttttagattgaatttagtaattatctgtgtttggttcaggagtactaattgctttgactattaacaagatgaacgaaacttatcccttgatctttagtgcggtaacttatgttaacttccctctccactgaatgaatttatagatatttgctgttatttcttagagcaaagagtgtagtgcttgttactgtggtcagtgatcaattgctatgaaacatggactttgacacggacactgacactttgacatggttaatgtctaaaatataggacacagggacagcaatacacacacagacagagagatactaatttaatgaagtatgagtagcatatcacaaaatatctaaatgatggtaaattcatctttttaaaccaaccttctatgttttttcaagtgtattagttgtgtaaataagacaacttaagtgttcaagccaacacaaaagtaatttttgaatcaaacctctaataagaagtgtctgggtgtgtcggtagcggaaaagtttccgacacggtgacaattcgaacaagagaggcatccgtgcttcataggtcaattgtctctactcaattttagagagaaaattgcaaccatttaattttcttcccttttgttgttggttgtaattattttgtgccacacttgctgtttcaaactttgcagcagtgagctagcaaattttgatcccttgggtatta

SEQ ID NO: 21851 - DNA, 918 bp, Glycine max
  Intron number 1 from transcript Glyma08g06380.1 (locus Gly ma08g06380) derived from phytozome v7.0 (chr-ID Gm08; pos 4524092 to 4525009)
aacttcaagcttgtacttctctgcaccaccgtaaggtacaatcaacttcatttcacttttttctttcttttccacaaacacaacttgtttttccttctctgttttcacttttccatcgtgcttcctttatcatattttcgcatctagttcgctgaatttttcattcaaggtagatccatccacattgcaataaaagcaaacttttaaagccatttttttttccagaaatacattcttaattattctccgatcctctgcatcaaactgtgctctgttctgtattcaagttacaacttaaattgaatttatagattaggtacattgacattacatgagttatgagtgaatagatctacgaagacttacgcaaaattgtagaattgacacacatatcttacagaattcaacccgtataagagaaatgtatcttgtgttctgacgcggtaatatggaaagctgtgattaattttgataaaaaaaaattagtacacggtctagaattattatgatccgattaatcttcacatgacacatgattgactgttaccaactcttttttataaattgtaaatcatgattatatgtggcgtaaagattactgaacactatgggcatacattggtctaaaatcatgtagtaatttcttggatagctgtctgaaatcatgcaataatttcttagttttgataaattcggcgaaaatgattttaaaatgattatcacataaaatcaataatgctaatatacaatccacaatttaaggaaagttacaacataatgaattttatttgattttcaaaaatattttaaaaataacaatgtatataagttaaatactgtgatatatttggtgatgtgtgagtgaatggttcggttgatgcagtggtggaggggttctggcttacggagaggctgtag

SEQ ID NO: 21852 - DNA, 824 bp, Glycine max
  Intron number 2 from transcript Glyma06g47790.1 (locus Gly ma06g47790) derived from phytozome v7.0 (chr-ID Gm06; pos 50188126 to 50188949 reverse strand)
ttgataaactttacgggctctgtgatccaggtgaagggtttttttaatctattttttggttaatttttagtttgatttctgttaaatgtaaaaaaaatggacttttatttgtttttttttttgttggaattcattttgttttgcaaatttgtaatttttttttctctgaggtgtgtgtgaatgcttgctggacttaataaggtagagtttatatggaacaaatgaggaaaacaaaatggatgtgtagtaatgagggaaaaaaagaaagaaaaaagagagagttcatgcatggttcttgtgcaatttagttatcctggaaatgtcaaataatatcattgagtttgctctatgttatcagtttcggatactaaagggtcacatctattctcactttgctaggttttaatttcactttactccctctgctatcagttataaataaaaaaagacatactttatatttattaaaaaaataagttaatttgattaaattatgttatttttaataaaaaataattttttttcttaaattatctttcactgtaacctaatatcaagcataaaaaaaaataaaaattgggccttattaaatgaaggatactcttggagatgatctcattagataaaacataaataattgagaattgtttatatatgaaaacaagaaaataaggaatttttttgtttatatttgagacaggagagagtaatagagattatttatttgtctgactttgtaatgattaagcatattatgttgtgtccttccattaaatttgaagacttatgtgtgtttctttaaggaaaggagaatttgtgcctct

SEQ ID NO: 21853 - DNA, 956 bp, Glycine max
  Intron number 1 from transcript Glyma08g20050.2 (locus Gly ma08g20050) derived from phytozome v7.0 (chr-ID Gm08; pos 15132236 to 15133191 reverse strand)
gtgcttccattttctttgagagcttgccctacaaggtgaaccctcaaactggttacattgattacgataagctcgaggaaagggcgcttgattttcgccccaagatacttatttgtggtggcagctcctaccctcgagagtgggattatgccaggtttaggcacattgcggataagtgtggagctgtgttgttgtgtgacatggcgcagattagtggcataattgcagccaaggtgtgaaatattttcgtcgtcctaaacctttatatgttgttcatggttgttgcttgtgaaaatttgtgtttgttgatgtgtcactacattaattttatgcgttacttatgttatgactgttgccaatttttcttttccattttatccctaagctacagaagttcattgttgtcctccaatggttgctcattttgtgtaaatgatgacaaccccttctttcatgttcttgctggtcatggctatcctacttagttatattgtccgaacgacattgagtgctggttttggactttttgttgcaactctcttcgctttttttttttttaatcttttaattcctgtaaaggctatttgggtttctgcttaagatttgatttgattggattttgattttttcttcttttaagttgcactaattcagaaagcttagtgagattataattttaatcaattgattgatgattgatgtcagagttcctttatgatttataagacatctggatcatggactgtgaaaattctatttagtttttgacaagtgatgctattgtgtcttttttcacttttaaacttaaatacaaggtcatattctggcctttatagataaggctggattagtccactattgtctcttgggaaaatatccaataaccaatttgtcttcaattttgaagaaatgctcatcatttgctttaatagtatggtgttgttgtctttgcagga

SEQ ID NO: 21854 - DNA, 769 bp, Glycine max
  Intron number 1 from transcript Glyma07g06370.2 (locus Gly ma07g06370) derived from phytozome v7.0 (chr-ID Gm07; pos 5097487 to 5098255 reverse strand)
ttttcttttttgtgttctcttctcacagttgtgcggtaagtggtaacttaaaattatatccttttattgaattttctttctttgcttctcgatatttctctcagctttatttctgtgcttcacaatttttcaattttcgtattggtgcttggaacagatcttcctttggaatagtttggttgacttgaataaaccaagctaaagccaaatatcgaacctcataatttcctctctgatttctattcctggatttgttgttttgttttctggcttcatcacttgctaatttggttcctttctttcgttttctacatcgactgtttttaaatctttccctttgtttttggcctttctaatggttcggagcaccctttggaattgcatttgtcctgtttctggcatttaattttcggtatttattcatctgggtcctattgctagcaaaacaaaggagggaagatcacaacaccagaaaaaatattaattatgatattaagtcaaataaatataaaaaaaaaaccttaatttgaaggtgcagttttggctttatccatattttgcttctgcaatgcaatatagcattattcatgatgtttggctttttcaaaattgtttcttttatgtaaatcaattattcccccccccggattaacatttatggaagttacagggaaataataatgagtcataactaaattcttattactcctctatatataattgagtactttcttttataataaatagctgcagctgaaggactgtgaag

SEQ ID NO: 21855 - DNA, 514 bp, Glycine max
  Intron number 1 from transcript Glyma06g10680.1 (locus Gly ma06g10680) derived from phytozome v7.0 (chr-ID Gm06; pos 8084272 to 8084785 reverse strand)
gctttgctttggaaaagcaaaaaaaaaaaaaaaatgtacttcaatttctgttctgttaggcaaaaaattcacatttttattttttgtcgggagggaattttcttgcctttatattttctctgcttcatgttgttggggatgtctgtgagatgaacatgtaaagttgagattttttcaattatcttcaatttagcaagtttaattttgtgccctcaaaattccccttatcttccagttttcgatctctccaaccctttccgaaagatgcttccttttttactggttattcagagaatatttcaatttgaactattcattcacatgcttgtgacagatattttggtgtatgtgggtgtgaatcactgagtctggaatatgctttttcatctttgttttttctgtgaagagttccatttttttttgttaatgcttttaattattatatgcatctctgtatttaatgcttttaattattatatgcatctctgttcaaaattgttattttatagattgg

SEQ ID NO: 21856 - DNA, 1032 bp, Glycine max
  Intron number 4 from transcript Glyma08g22140.1 (locus Gly ma08g22140) derived from phytozome v7.0 (chr-ID Gm08; pos 16811979 to 16813010)
ctggaactgtctgtatctggaactaccaatctcaggtatgtcaatttttatgagttgtatattttaataaatatgtgccactggattgagaaatgtaatgttgaattcatacatgtgttggcacttgagtcagacacaggtgtttcttgatggattaccaaacaagccaccttttgcatggtgcctatgtataatgagtcgctaatccacaaataaggagacctatttattgtggcttccttaaaattcaaagctgctgcatattttatttctttgatgaaaaaactggtgtatgtctctatattacttgaaagcaatgttaaaagatattggtgttctactaaatattagaactatatatcttaaactactatatatatattaaactttagcagtttagcattaaaatcccaaccaggttgatttgcttcccctttagcctatcatttccctctctgcaccaggtcatagactattttagatgaaattccatcctttttgaatatccttgatgtccttacagttttgttacttgttagttgagctgtctctgatgaagtgagtgcttttgtagatttattatcagcattgactatgggatttttgcccctcctgtgtaccccaaaaaaaaatgataatcaaatagcttggtagaattcagttttttttttgggtgaaataaaggggaaaacccccagaagaattatactcttgtacatggttttgtacattctgtatgttgtattttgttagttctgctaatattaaatgaggcatatccttctttttttatcatcacttggttgcctggcctctctaatatcattcataatttcacaagactgttacacattctatatgcaatgtatttatagatttacggattgttattaaaatacagcctctaactatcctgttcatatatttagaattttctcaaaactttcttcgaattgatattcatcattaatttctatggagatttgagtgtgtgcaattagattgaattattttattattttatttcagacc

SEQ ID NO: 21857 - DNA, 466 bp, Glycine max
  Intron number 4 from transcript Glyma08g04990.2 (locus Gly ma08g04990) derived from phytozome v7.0 (chr-ID Gm08; pos 3571502 to 3571967 reverse strand)
ttgtcagggagcttgagaaaaagtttagtggcaaggtaggtaaagtttatcatatttttggcatctataatttatatgtcttgtatattttggtagtttgaatacatttgatattgtggatgtttaccagagaacaccaactgcaacttgagatatctttcattataatatctgtctcaacacttatcattagcaagtactttggcataacctcttgctaattaaataatgaataagttgcaggcacacaatacgagattaatttacctctgtaataatcccgagagagttatgtgcaatttatttactacgtgtttagtatataatagtctgaaagtattccttttgctcctattaagtattttcttctcatttagactgcttgaacttactaatttctttttgaattttctattcgtttatttaatcttttattgagcaattttaatctaattaaacatgtagg

SEQ ID NO: 21858 - DNA, 393 bp, Glycine max
  Intron number 1 from transcript Glyma08g04990.2 (locus Gly ma08g04990) derived from phytozome v7.0 (chr-ID Gm08; pos 3572393 to 3572785 reverse strand)
gcagatctctcagggcttgcatcttctcaggtaaggtatgtgctctactcccatttgtcccttctacgcgttgtacaaatcaattactggttttattgagaaacagaataaaagctctcatttttattttttgttttaattatttgatttttttacaagttttttattagccaatagaatgtgttaagcttgagtcggggttgttggtggtggtttgaagattggtttctttaatttttttagttgggattagggggatttaatcctttggaaaattggaagtatttagggaatgttctaatcgaggtttggacctttttctattttccttaattatttagggtttagggtataggccctctaaagttgtgttgtttttgtacagttgtgaag

SEQ ID NO: 21859 - DNA, 327 bp, Glycine max
  Intron number 1 from transcript Glyma06g23920.1 (locus Gly ma06g23920) derived from phytozome v7.0 (chr-ID Gm06; pos 21324287 to 21324613)
cagatatatcagtttctgacttgagccattacaatgtaagcttctaatctaatctattgcatggatggtccagtttaatttttcttaagaaaataattttatttatttttttgtcactttcatgagagtgcttaaaaaaatattgtttcttccaaaaaaatcaaattgattaggggggtgggaacaccccctaattgataaatcttcttttgaatgatgaaattcaaagggtttgcctagaaatgttgttttttacttactttgttcagttgttgtgtttgttcttgtgaaggttataataacacctgaagtcacttctcgtaaaac

SEQ ID NO: 21860 - DNA, 715 bp, Glycine max
  Intron number 1 from transcript Glyma08g10650.1 (locus Gly ma08g10650) derived from phytozome v7.0 (chr-ID Gm08; pos 7743166 to 7743880)
ccgaatacttgtgtgtgcaatacaatgatggaaataccaagcatctgtcctctgtagttgagttcgaaatttcctgtctttaggttggtagagaaaataagccttaggctgacttttattcattatgcatctttgtactttgggttcagttacttgcacggataagttgagccgagcttcaattcttagcctccttaattagagaatggaaatcaagaataaggttttttctcaattgctacctttatatgcattatgtacgatgttatattaatttgactagccacaagtaagcagtagaaactgatttacaagtacatactatatatgacacataaaaaccccatgccacttgagactggtatcactgtatcagtaagagatttatatctgtcaagcactcaagctgttcatgaagttggattggattggactatccaaaagcccgagctcaacaaactgaggctacatgtaattcaataataagatggaggtgtctcatgctttttattcattggacatctttagtaacttccaaattcaaatcctctttttgattgttgttacttgttactctcctttagttgttaattgttagtttttgtaagtggggggatttgaacccacgatttttcacccctcccttctcccttcaccactaagccaacattatatctctttctaactcatttctgttatatgcttcagtgactac

SEQ ID NO: 21861 - DNA, 945 bp, Glycine max
  Intron number 3 from transcript Glyma07g12850.1 (locus Gly ma07g12850) derived from phytozome v7.0 (chr-ID Gm07; pos 11297919 to 11298863 reverse strand)
ccagggcaaaagataaccgattgtaatttggttcagttaccaattttgtgcatatttagtttgaagttgaaaatgctgtggcgggcgttctaatgcaaattcaacaaataaaaaagtaaaatgaatgcaaaagcaagagtcctgatccgttcgcaaaattacttttgcctcaaacgtaattttgtgactgcaaaccaaacatgctcgttgctcggtgcattttctatttctataatctgaggtttacacgttgataattttgataaattgatatgttgagttgaggtttgcgttgtaatggcacaaatggtttttattttgtttttcaattgcaaattgacatgtatgatcaagtttgtcgattaataccataactactttaaaagtcgtatagctcttataatttattcttaattggttgactgtggaaactgacactagagaaattaaattcatattactgtatctgtatttgctaattataggaataggataggatggtcttttttgtttcccctgtctctggttgcttgtaccacaattttaatgctggttttgatgttgggttttgtaattaatggcattatctgattccgttaatccattatgtttcatttgttttgggtgcgtgtctgtgtcccctataattgtgctgtgggggttagatgtttagctttactgttaggcttgttttaccaatgttacttaaatgtgacattactctttcaagctattttcttcctttttgtgtcattatccttgaagtagtagtttgctagagaaatttatcatgtcatcattgtaatgctggctacttggcttcctggtgcaattatctgtgtgcaattgcttttttccttttctttttttcttataatttatcaaatatcttgtctaaaaaaattggttttccttttgcagcatttgtccgtcaggaaattcaga

SEQ ID NO: 21862 - DNA, 571 bp, Glycine max
  Intron number 2 from transcript Glyma08g17560.1 (locus Gly ma08g17560) derived from phytozome v7.0 (chr-ID Gm08; pos 13046874 to 13047444 reverse strand)
tgctaataactaataagatttcctgtgcaagcagggtatcattgtttttgcatcagtgatggctaccttggggctgcagattttgattgaatctggctgacaagttatttccaaggtaattgagataaacttttgttcttgtttgtttattagatccccaaatttgggttcaagactagtttttgtttaagatttttgaatttaggacatgctttgattaacttttcaagaagtatttataggagaagaaaataagataaaatgaatcaaacttcttccataagttaaaattaagttgtccaccccaaatttttttgaatctcttatttaacttcttaaaaagttgaggtacataagttatttttaatttttgaagaaatttgattcattttacctccttattttatattcctataagtgcttgttgaaaagtttatctaaactaactctagtcatttgtttgagctgtagcaaataactcatttttagattttcctgtaaatgtaattattaccttgacacatacttttaatttttcatgccattctttttcttacaggctaagccccac

SEQ ID NO: 21863 - DNA, 709 bp, Glycine max
  Intron number 1 from transcript Glyma06g23330.1 (locus Gly ma06g23330) derived from phytozome v7.0 (chr-ID Gm06; pos 20486562 to 20487270)
agttggctactgcacaagcaagaatcagaacagaggtgagtaacaatcaaacagaagaaatagggtacaaatatcattcattcattactctatgtacgctatataggtcaatgtcttgtacggttcaatgcttttaaaagtagataggacttctccgaaatgattgtgtctctaaaagtaaacaaggtgtatccaaccgttgtagctaatatgtgatgtacaatacagccagaattcatgttagttattagttatacatataaaatcaaaacccttgggtgaaacctttgttgctctcctccacttataaataattattgtcccttaaaaaatgattaattgaaatttgaaagtaaatttctttaaaatagtagctgaatggttctttgagggcaagtcctggcacaacagtaaagttgtgccttggtaaccgattagtcgtgggttcgaattcagaaacagcctctttgcatatgcaaggcaaggctgcttacaatgacctttccccatacctttgcatagtgagagcctctggacattgaggtacgttagtttattagttgagtggttctttattgctaaaatttctattctagttttgaacttaaacaagcatattgagctaggtttggttagcatttgtcatgtgttattaatgtgttttacatgtgcaggaggaaatagggccccggataaaacaagaaattac

SEQ ID NO: 21864 - DNA, 836 bp, Glycine max
  Intron number 1 from transcript Glyma05g30870.1 (locus Gly ma05g30870) derived from phytozome v7.0 (chr-ID Gm05; pos 36109563 to 36110398 reverse strand)
tttgtggtcaggtatatcatccataatttttttttttattaaatgttacttttccgtttatgtggtgtcgatgtaagttaatctttcagctgtggcttcggttcgcctatttaatttgtggatttcgttattttggagagaaaacaaaaaaaaagtcattttgaatggtttttccatagaaaactgtttatgtggtttgtcatgtaatctatcactggattgtgatgaaacttttgtcctagatttgctctttttaggtgttgtttgtttgctatttcttttaaaaaaaaaaaaaaattggtgtgtgaacgagattttcgtgatctgaatttagatatgggataaggttgtgttttttgttatttttttatttttatttttctaattttaggaaacctgccgaggtattttttgtggcttgtaagtgaacgcaaacgaagacacccttttttttccttcttgttcctattttttgggggattcgtttgggagggaaaggagtctcgtttatgttgtagccataattggatttgaatggatgcaaggtttctcgcatgaagagcttgcaatttggggttttttcggggcatggtttcttttttcttcatgatacagcttttggctttatgattaaattggggatttaagttatatgatgcttgaaaattttccccaatacagagagaggagcattgggtttttgataagattgtgtatgatttaaagaagctgcattggatatttatttcatgatttttcattcttgaagctggatttttacagtttagttatatgtctgttccttaattttgcaggaatcaagtcaagtatcaggt

SEQ ID NO: 21865 - DNA, 858 bp, Glycine max
  Intron number 1 from transcript Glyma06g12650.1 (locus Gly ma06g12650) derived from phytozome v7.0 (chr-ID Gm06; pos 9823648 to 9824505)
ggggtgcaaatacctctattgttgttagaggccctgtaagtctttttttcccctctctacatgccctttacgtggattcttcttattacaagacaagatttataaaaagttgtctaaattaatctttaaaattgtaaaggatgatgcttttttagtccaacaggagactaaaatttatttatttttacaaaaaattaagatgggtatttttgctttgaaattattttaatcataattttgtgaataaataaatgagaatcgcttcgaacaatattgtataccatgttagtcttaaataaataaattaggttttccttcaacaggattgtttctgaaagatcgaaaagatctatgagaaataaaaattaaataaataaaaaataaaattatataccatgcatttgtttatgtatgttcaagactaaaatatttaaaaaaaattcaaatggatagctttgaagatgttttaataattattttgagaaaaaaatgaaaatgatttcgaacatgattgttttcgaaagaaaagattggtgaaaaacaaaaaaataaataaatgaaaaaaaaattataccatgttatttgtttttgtatggttgagactaattttaaaaataaataaattaagatggatatttttgctttgaaattattttaatggtaattgtgtgaataaacaaattaatgaaaattatgtttgccatctatttcttttcctttgttataaaaagtttaggtgagttaaaaaaactcaccataatcagagtaagtctcatgcttcaaataagtcttacggaattttatagatctaaatttcatgtatctctctttgtataggttcattattttaccaaagaa

SEQ ID NO: 21866 - DNA, 758 bp, Glycine max
  Intron number 2 from transcript Glyma08g01990.2 (locus Gly ma08g01990) derived from phytozome v7.0 (chr-ID Gm08; pos 1319242 to 1319999)
tgattttgcgcagattgttgcctcgcgttgtggtggtatgtgatctggaactttctctcactgtagcgatgtttttttttgtcaattcttgttctgcagatctgatgattgttctttttagtctgaaattttgttcgtttggacgaggaatcgaatctttcattttcagtttcgatgtttatcgttttcgagttatagatctcggattaacgaagtaatttgagactctgcttaaagaaggggtttctgcgctctgttcaaattgattggtgttattattcgtttaattatgcattctatattatctgtagatctgaggaagaaaaggtgaaaaacatgcatattcatattgtagtgtatagacaagttatgcttattccgggtggtttaaggtttactgaattgtcaaggggttggtgaatgtaaattaacaatggcgggtctctggctctgtctgtggggacaataatatcttggatagtaggttatgagtgttgaaggaatctggtctctgactctgtcagtatcgtattctgagtgaacagagtgtgatggtgtttaacaaagtgatacggcaaatatctgatactatctcgaatgataaatattgaggtctttattttgattgtgaattgttggaaactagtttgtatacctaagaaaactacattgcagtgatattttgaggatctgctgtgtctgtcactgctttctgcaatatgtaatttaattttctattgttccatttatagtgcacc

SEQ ID NO: 21867 - DNA, 828 bp, Glycine max
  Intron number 2 from transcript Glyma06g07160.1 (locus Gly ma06g07160) derived from phytozome v7.0 (chr-ID Gm06; pos 5192567 to 5193394 reverse strand)
catagaagctacccttttggtacgttccaagttccttttctttgttaattttttttttactttaattaattatatgtgccttttggccttagttagtcaaacccatttcataagcacataatagcagaagtggaaagtaacaaacacttggctattttgttgaaattttctatgcatgtgtggatacaaactcatcaaacaaattgctaatgtcatattttgttgtttgaattcatgactctcgtctatcactcggtcatttctgtggcaattcactttcaaaataacgtaatttgaccgtgattaaggagaaactcgtctttttgtctttactttttaaattccttctggggagtagtaatatgtatgtgtaagaaatattactaatataagtacatttatatttttttaaataaataatttttattatgcatttaatttctataaactatgacagtcaagtaattacaaattttcttaagtataatttttaaaataattcatataaaaatgaataaacttatggtatattttgtgattcacagtcaaaatgcatttaaattgaattcttttgccacaatttagagaattctcaagtaaaacgcactgaataacttgtaccatgtatcaactctgtattaatgtgattagtatatgaattcaactaataagaattaaaatgttgaaaaatatgtgtgaaacctttgacagcctcatctagcaaagaaaattacacaaatgtgcaaacaaagaaaatacaatttctcagtgggtaacgaaagttttttaacaggtctctctgagattattgaagttgagggattctaa

SEQ ID NO: 21868 - DNA, 981 bp, Glycine max
  Intron number 3 from transcript Glyma06g11470.1 (locus Gly ma06g11470) derived from phytozome v7.0 (chr-ID Gm06; pos 8845151 to 8846131 reverse strand)
attcagccctcattgacaccttgcgtcaattagaggtacgtctactcaaaactcaaaactagaaaacttcgtttaagagcaagtgtaattgtaagttgaatcgcaatcacttcagaatgggaactatacttactaatataagatgcttcatggtagtatagtttggtactatattgtctccaaaatacaaatatttaacctgtgaagtaggttatggtttgctggtagtttatacgaaagtcgcttcctagctctctctctttttttttttctctttgttcttgtgacttttaccgaccttgtcaataccagaatactggcataaattatagcttaaacttatcacgtatctttcaattgaaagctccttgaataaatatgtagtatgtctcttctcttgtgttcatttatcttgccaaaagttttctaccagtgaaaaggggggcaggcaattgactgttgctaaatgctgttccaaattttgagtgttctgaactgactaggtacatgtgaatagattaaggtttatatgttgccctcctttgtgtcctgcaagttgccttcgtgaatgaaaaagcagtttctttaaccttggaagacaatattgtgcagacccggaatgatgttgcctcatgggtgaaggagctgggtaggttcttcataggatgactatttttattaacatattttcgaattaaatctattaaatcctgcattataagggtttgcggtcattaatttaaatccattgaattattcaatgtttctttgtcattgtttccacattgtttaacaaaatgatttcatttgctattttttacatggatagtttattgtttattttattttaatgttgttttcttttacttttttaacatattgaccaaggataaatcttttttattttcatgtgtattaaaaaacatttatctatgttatattgtagacagaaaaggttgatctggaggatacagtagttga

SEQ ID NO: 21869 - DNA, 887 bp, Glycine max
  Intron number 1 from transcript Glyma08g15250.1 (locus Gly ma08g15250) derived from phytozome v7.0 (chr-ID Gm08; pos 11055871 to 11056757 reverse strand)
gtttcagctttggtatagagtttcttgaccctttctcatccttgataatttactccactttcattttattttcaatgtgcaatgttcactgctttgagttgcaatgcattcgtttagttcgtcttttagtgctcgtgtgcagcataaacttgttcctaggatttgaaacaattatttaatatataagggaataagggtggtagttgacttggggtcgagcatggtatcagcgatgttgtttatagacaacaatactacctatgatagaaagagggatacaatgaaaaaaatgaggaagggtaatgatttatgttatgatttaagatgagatgcggaggctgtacagtcctcacaaacattttgtatttgcgactcatagataaagcataactagaactagtttggataaatttatcaacaagtacttataagctgaaaaagctaatccaaactggaccaattacaatattcacttaaattgatgcggtattaaaaaagctaccagttttctaaacttcagagggcacgggaagaagacacttgtagccaaaagtatttattgttgtgtttaagataggcattcaaagttttcacccggaaaactattttaaacatcttatttgcaagattttagtattcagattgatgagtattgttggttatatatatcccggagttacaatcggcaagtgctgagaataactctcgataattgatttgagtctcttgtataactagttaatcaaagaagaatgtaattttatggtttctctgattccaggtaatagattagttttgagcttctgcactactcccgagttctaacatcgtaaatcatataccattatgcagctacaacgttaactggtctgcattttgccacaaca

SEQ ID NO: 21870 - DNA, 1027 bp, Glycine max
  Intron number 2 from transcript Glyma08g24440.1 (locus Gly ma08g24440) derived from phytozome v7.0 (chr-ID Gm08; pos 18617484 to 18618510 reverse strand)
tttaactgaggcaagttctaatgcttcagtttctcatttcattagcagtttccttaatgattaacaggtttctcttgatattctttacttgcataatatttttctgaatctgaaataaacttctcaaataatatcttgttacttaatcttattccaatgtaatatttgaaacctgttatcttggtggcttaagacattaatactaatcttaaaaaaaaaagacattaatactgaaatatattaactaattaagggctacataccatgatgcttatagatatctgagaatgggatttaaaatatacgcattcacatataattatctatcaaaagaggaatgttataagattcaattttattgtttctttctcatgctgatattagaccttacaataaattcaaggctgcttaattgtgtgccggtaacatttctctctctctcacacacacaacacagtgagagagtgaagaggtgggaacaaaaaacctgacttctgtgatggttcagaataatattgctaaaggaagttgctatttttaatcatttggttatcactcttgacaatgagaaccggaaggcatggagaaaaagtgattgataagagtggaaaatgtcttttgacttgtatacaactcttgtcaaatggctagttaggggagatcttgtacataagttagtaagtggaggaatggtcttttaatatacggagtgatcattgcttcaactttcaatgaggacatagtcatgtgcaaatattgattccaattccttaattttccattccattgagtgtaaaggatttattcaagaaagcgttggaaaatgttaggtgatgtagacctgtttttgaatttgttgacattgttgcatattttgtttccatgtagccgatctcacctagtgagcctagattttgttgttgttgcatattctgtgttacacacccctaaaaggaattatgcacatgaattttcagaaaataaatctcgtacattttcacaggaattgggcacacgaggacaatcc

SEQ ID NO: 21871 - DNA, 633 bp, Glycine max
  Intron number 1 from transcript Glyma07g36050.1 (locus Gly ma07g36050) derived from phytozome v7.0 (chr-ID Gm07; pos 41428055 to 41428687 reverse strand)
aatcatcttcaccttctcttccgatctttggccaagtatgtttttcctcttaactaatctttactgtaacgtctcgctttgattccatgtgtttttgttctttttttccttttgggtttgctttcaattggggttattagtggtttgatttggttgaaggaattagtttttaatccttttaggttagtttattgtcaaatctgaatcgggtctgtaaatttggttttgtttcttcgattgataaatgtgaggaagatccaatactcctctagtgtttgctgagtttatgaatctgaatttcggaagtacaatttggaattgagtgtttatttatttattgcctttaacctaggttgctcatgtattgtatattatcacctctcctgtacaaagaggagggtggaattttgatgaaatttattcgctagatgaaattagttaaaatagcttgctatgatctttagtaatttcgtgctggtaggccttatgagtttgatgatgatcaggttcatgttttttctgtttgttttttctttaacacttttgagttgatcaatttatttttgatgtgctgacttttgtgtttcatgtgtgttaggcagtgagttgctccgagatcattaaagattccat

SEQ ID NO: 21872 - DNA, 983 bp, Glycine max
  Intron number 1 from transcript Glyma08g18110.1 (locus Gly ma08g18110) derived from phytozome v7.0 (chr-ID Gm08; pos 13598016 to 13598998)
cttcgccgctctctctctccttctcgctctttcaggttcggttcctctctgcctctaatttttcactcgcttttcctttgcttctttgtttccgaaacgatcggtacctttggtttttctctcttccgtttattatcttcagatctgtgctttactcaaatgttcagattccgttttgttgttttcctgcgtgctttttaataagcttctttcttgtttaatacttttcggtgaatcggtgtagttttgttgatttgcttgttgtctatgtatggggtttttgctttcgcttacttttatacggaataagaataatcgattgttctgcttttcttttttgttgttgtttagtaagctttgatatgaattgattgaacatgatattaggtgatccaaatctaaacagactttttttaaatttttttatttcgtctttgttcggttgttttactttctgtttgtgagtgatggatcttggttcaacacacaccgacgcacttgactgttgagatgttttagctctagacgtgcgctattgttttttgataatttgttgaatattatttgcgttccctaaaatgataatttagggttttaagcaaatcgcattatgtgatgagcccgtttgctgcttttgtttgaaatttaaagtttgttttttttaaacaatccaaacttatttcctgagggagaataaggaattataactgttccaagagagaaaattttaggtgtatattaagatgagattttttatctgttatggtcatatttgtggttttttttttacttatttgtttttttcaatttgtttatgaccgagttatgacaacaaatcttttgcatcctttttgctctctttaaatatctcttttttctttttctagtttttgttgcctgcattaagtatcttgctatttagctaacgttggtgttttaatttttcagctttgacttttgttggaaactaaggcctaatcaaa

SEQ ID NO: 21873 - DNA, 535 bp, Glycine max
  Intron number 3 from transcript Glyma06g19740.1 (locus Gly ma06g19740) derived from phytozome v7.0 (chr-ID Gm06; pos 16069584 to 16070118 reverse strand)
aagataacactatcgattttcttaaccgttgccaggtttctaattctaattctaattctaattccccttgcattgcttgcttttttttctcgcttccattgattgcaaactaataatttagctttaaaacaggcctgtttggataatttctgaaaagcacttatatgagaaggaaataaaataagcctctccataaactaaaattagctctaatagcttacgcgtaagttaaaaatctgaatttaacattttaaattctgatataagaatatttttaattattgacaatttctttaaaaaaaatatggcaattcaatctagagataaaaaaggatagattaaaaggcacaattatgtatgcactatgtattgagtttttctgattgtgtctgccaaacattgcctagctgatcctttagttttcatgttttataatcttttgatttaagactagatttcttggctagccacatttttctcgtcccatttctatcccttcttaaatttcttcttctttgtatacaacaggatccga

SEQ ID NO: 21874 - DNA, 317 bp, Glycine max
  Intron number 2 from transcript Glyma06g13290.1 (locus Gly ma06g13290) derived from phytozome v7.0 (chr-ID Gm06; pos 10443681 to 10443997)
atagacttaaagaggtcgctcatttctttttctttttgtatttctcaatttttagaagaaatggagttttcttttgcttaaaataaataaataaaaaacttaaagtggtgaagcatcaaaattgttgtgtttaaatctgtatttggaaaattaggggatttaatgtaattaagttttggaagaaaataaacaacttgatatggtgaagctgggttcttgcagttatttgatattttgttactgatgtatttgtaacggattggttgttttgtggtattacagatacgagagtatcataggaagcacccagttgctcg

SEQ ID NO: 21875 - DNA, 474 bp, Glycine max
  Intron number 2 from transcript Glyma07g24010.1 (locus Gly ma07g24010) derived from phytozome v7.0 (chr-ID Gm07; pos 26124698 to 26125171)
agctaggtgaaggaggatttggacccgtctataaggtactaaatcaattttcaatctttattcgttttttcatgtttgagtttattaagcttggaatttgagaaatgattcaattaaatcaaatattttttatagaacatgaattttaacctaatttaatttcaagaataactcgtagaacaataactgtcctcaacttatatatactttatctttaacgctatctttctaactagtgtggtgggacttatgttttttctaatagtttaagcaaataaattttactggggattaaggaagaactattattaattctctgtacccagaaaggcttacaaattttcgagaaagttctacatggataaattgttgttactaatttatggttttacttggtaagcaaaaaaatctgagacttgttctaatttttggatatttttttaattcaatttgggaccataaaggggaaattga

SEQ ID NO: 21876 - DNA, 795 bp, Glycine max
  Intron number 6 from transcript Glyma07g10940.1 (locus Gly ma07g10940) derived from phytozome v7.0 (chr-ID Gm07; pos 9149468 to 9150262 reverse strand)
caaagctttcaagttgttgtaagtcccacgatctgctattttatttcttctgcaacttcagtgatggggctttgttacttttcattcatgatttatttggcagatatatcaaaattcaaatttgcttggtttttggtgcaagtttgtttacacaaaatttatcatggttgctttgtgtatttcactttctattttaatttgataaatttcatacctttacctataaaagcatgctaaaatattacgtagctacaaccttcatttttctttgacttcattgcaattagtcacatgattctagaattttcaatggtccaatgcaacatttatctttaatgtattgaataaatcattttattttgaaattatagtggaaccaagtgcttttaatgttttgcaatagctgcatctagttcattgcccagcatttgaagggcattataaaccttatgagctttagattattatgcccattctttttttattgagagcgacatatttgtaggttaattatttcacacatcactattttttaagaacaaaacaataaatattcttagttattttctacaacctaagtggatgacatttaaaatataaatatctcttgccaagcatgtcacctccctctttgatcatgtgagaagttttccggactggttgagatcttgcgtggaatacaaaccgcattgttgtgaattgtgattagtgaaggaccctatttgcaaattattcttgggaatcaatgtgttgattggtatttcttctttgctacataaattatgtcaggttttg

SEQ ID NO: 21877 - DNA, 345 bp, Glycine max
  Intron number 1 from transcript Glyma07g28610.2 (locus Gly ma07g28610) derived from phytozome v7.0 (chr-ID Gm07; pos 32764569 to 32764913)
cataccagaattttgacaaaacaggtaatttaattcataattttttctgcattaataatatgttttatttgttgcacataattcgtgataatttggtggtagcacttaataaacctataacgatattttcaagttggaagaatgctacatatcaagtcattctatgattaataagtctatatggaataataactcactgtataatttccctgtgaactaattgtataagcattttgattaagcattaagaaggatgcctagcgcaaattatgttagtcgttacttaataattgttattgtttttttcttcttctttgtttttttatgtagggaagcgtagtgcaa

SEQ ID NO: 21878 - DNA, 870 bp, Glycine max
  Intron number 1 from transcript Glyma06g11910.1 (locus Gly ma06g11910) derived from phytozome v7.0 (chr-ID Gm06; pos 9202551 to 9203420 reverse strand)
ctctcttctccactctctcttcacctccgcttcaggtcaattctctcttcacatcttccttaaccccttgctttgctttgcctttccaaactcttccatttttttttggggcttttccctcatcttttaatatcatatcaactttttgtttatatagagaccatacaataccaattttccataatcagagagcctagtttagggatattacaagattttaaacaaaataataataataataattagagtgattgcaacttcaataacttgaccctttggttcaattgaaacgctgttatttgtttatccatcaccttcttgtgcttcatgtccaaattggacaggggacaagaaagaaagaaagaacaatcttttaaagctttcattctttgtaactgtgattagtgatgctatcaagggagagtgtttcaataatatcctttttaatcaaacattcattctctgtaactgtgaggagtggtgctatcaagggagatagtttcaataatatccattttaaccaagcattctacatataagtcttgttttgtcatgcaccaaaatcctctcattttccatttaggccttgctcggataagtttctccatataagcatttattggagataaattattttagcttctccaaaaggtttattttaacttatgcataagttaattttagctttagggaaaaactaatttcaattttttctctctataaatgctcatggagtagcttaaagaaacaagaccttaatctacagttttacacttctgttggtggttctttgctaaaattcttttctgatgtgtgtctcgctactattgcattttcttttgcagtgatcttcatcttgttcagagagtt

SEQ ID NO: 21879 - DNA, 583 bp, Glycine max
  Intron number 1 from transcript Glyma06g20900.1 (locus Gly ma06g20900) derived from phytozome v7.0 (chr-ID Gm06; pos 17282641 to 17283223)
gtcgcacggttgctgatataataggtaattgtaaatctttcacttttatggttaaaccccaaattagtcccagaaattttacttttttcactacttttacaaaatgtcattcatgtttgtcttttcattgtactaaagtgaatagtgttttatgaagttagagagtgaagaaaagtcaaggactaattgttgtgatgaatgtttacaactttggactaaaatgggatgttactacagtttttatataacatgcagataatttgctgcttgtgagtacacaagaatttaactcaatttatatcagcgtgtgggttgctgaattttctggaagcccatatatgactgcttgtttctactttcttttcattttagccaaatgaggaaaaatggctcctttttttcttcttttaattatagtgtctatttagttgtggtttgtcaaaggtttttgatactgggttgagcaatctgtgaatatatgtgaaataagagattattctgttacttagagaaaaaaaaaagaagcatttttctattgtttcactctgtaatcagagttatattcacatgttcaggtgataat

SEQ ID NO: 21880 - DNA, 595 bp, Glycine max
  Intron number 2 from transcript Glyma08g28500.2 (locus Gly ma08g28500) derived from phytozome v7.0 (chr-ID Gm08; pos 22829963 to 22830557 reverse strand)
tatgtatcattctatgattttttttattggctcatttaatttaacatgcaaattattggctgataatattagatctttttctgtttctctttttttttgtatgattaattttttttttcattgtcttactcatggtgtttgagttgtgtgtggaaaactgcttattacgaaaaagctgagaacctcttcaatcccgtgtttctaagctgtttgatatatcatttgatcagtgcttatttattgattatcagaaactattttaccatacaacttagcattttaatatttggtgttctcatttaatctttttcttaggaaatttgaaatgttctgtaattcacttttgaatctatttcacatatggcatatacgttcgcttcaataatgcttacatgtcaataaggtaaggttccactgattatggaggggaaaacccacacagctggaatatgattttaaattgccttcattatcttgtttaacttaattattgatattatctctaggtgtgaatttaacttttccttttttgttaaataactttatcttttcaactacagataagccggtatttctctgatccccaatactactt

SEQ ID NO: 21881 - DNA, 834 bp, Glycine max
  Intron number 1 from transcript Glyma08g28500.2 (locus Gly ma08g28500) derived from phytozome v7.0 (chr-ID Gm08; pos 22830742 to 22831575 reverse strand)
tttgactcttcccctctctctttctctctactcaggttttattttccttctcctcatttcaatcatagatcgctttatttctctggcgcgcctttgtttgctttaaagcttacaaattttgactctgttacacttctttgctattgggttgttccctgatttgcttaacgttctggttttagttttagttttagtttttttttttttttcaaacgggtattaacaatccccattttctctaccttctttatgtttgtatgtattagtgaagtaattagaactttcgtgttgttctttcttaaacccccgtggagcattgggtaaataatatgaaaatgaaattagtacattgtcatctttacttctgaactgaaatggatcatttcttggtattactttacctgattatgttttagttggatgatttcttcatgtgatgagagttttatttcatctgtgtttttgttgatttctgcctatttaagttgtttctaattacaccatagtgaatcaagtggttatatctcatactctttaggcggctctggttatatgtagtagtggggtttaacttcaatccccacattcccatttttccctttccccttaggtccaatcatgattttaaattgcggttgcaatcacggtttcatcgcattgtgggaaatttcggacaaatgtggccgaagccaccacaattgtggttgcaaagtctaaaaaccttgatgtcgtggccgaaattgtggttgtagtttttaatatctcactagaacctagaaaatgttatttctgaattctgattggttataaatgtcttctattgtggcagtaaga

SEQ ID NO: 21882 - DNA, 616 bp, Glycine max
  Intron number 4 from transcript Glyma08g16150.1 (locus Gly ma08g16150) derived from phytozome v7.0 (chr-ID Gm08; pos 11764777 to 11765392)
gggtaggttttgcttaactagtatcactattcatgcatttttctatcaacaaacaatttgtttttaaaatttgaggtaaacatctgacttatttcctggtaaacatttttgtgattttgtatatcttttctggttaaaagggatcacattttcacattcccacattgttttaaaaattcaagtctttcccatatgcttagcaaactttccattttccttcttgtatgaggatattgtagtcattcccaagtgggcgacattaaaaataattgtttgaattggatgaggaagagtttgttttatataatgttgctcttacatatgcaatcacttatttacattctataatatggaaatatatttttcacctaccttttttatgattttctttttcagaatatattctcttgtaatattttaatgtctgcacaagttgtgtttgtgaacatattccatgcaggtccctttatttttcctttattctctcttgacacaaaaacacacttaataagtgcgggttatttgtctgaaataattcattctcttttccttttgtactcttttttctccatgttctgcagcttgcaaagaagctccatccagacacaaacaaaga

SEQ ID NO: 21883 - DNA, 836 bp, Glycine max
  Intron number 1 from transcript Glyma05g30300.1 (locus Gly ma05g30300) derived from phytozome v7.0 (chr-ID Gm05; pos 35694182 to 35695017 reverse strand)
tcagtctccttccattcctttcttccagatcacaggtatgtatttatacacgtttccctgaatcttggtttttctttctttctttcttttattttccaatatgatcacgacatatttttagacactactctatcacttacatttaatggtgagttctaccctgatcacacgctgcaacttttctgatagtaggaattctgagctagatatgaaaatttctaattaatttgatacatggaaatccaaacaagctagctagctcgatcacaagatcaataccgaaaaaaaaatgaatgtcctgatagctagctagtcaaggatatattcttaccttaatgacttgcatgtgtaattaaaaatatcaagtatttcggaaatttttgtggtttgttgaagtaatttttttattaatgcgaaatattaataatttatcagttttattgataattaatatttatcaaaaaaatataattaatcattttcaaataataaaatattttcttaatttttaatttataaaattcaaattcgagaatttggttaaaaaatgttccactcagcaaacaaagtatggtgtgttgaactggtttatgtagtaaaatttaactctaagatgattaaataagaagatatacaaagtaaaaaatgaaagtaataatatatatatatatatattcttagtattaaatgagttatttgagaaaacttattaaaacaaattaaagctatatatagacacacttttactttatcctttcataattattttttttttactaagccacactatttatttatttgaaatgcttttcgtgtgaaaaggtaaaatcaaacca

SEQ ID NO: 21884 - DNA, 373 bp, Glycine max
  Intron number 1 from transcript Glyma08g07210.1 (locus Gly ma08g07210) derived from phytozome v7.0 (chr-ID Gm08; pos 5177266 to 5177638)
gcttttgcacagttggtgctggaaatctggtatctgctttagattccttttatatagtctcgcgtttttttcttatcagtaggtatcaaaaacagatatgaggaggttgattcttcaaccaactaagttagacccgcttgatatagcctcttgtgtccgtgtgtgtgttttttaatgcttttcaattttgataaaatagaatattcttttgtgatgactttgtagcagtgtgatagggatttattttttcttctctctagagtagagtctttgtagattttctgctttgacccttgtagtgaatcaaagcttaagagatagatggatgatattttcaggctccaagagaatccaatacgcagatttcgggaat

SEQ ID NO: 21885 - DNA, 987 bp, Glycine max
  Intron number 2 from transcript Glyma06g21060.1 (locus Gly ma06g21060) derived from phytozome v7.0 (chr-ID Gm06; pos 17507434 to 17508420)
gtgaaggaggcctacgacaaacttgaatctaagtaattcagtcatgcctctttcgattaggttatggagtgatttcatcgtagtttggcatttgacagtgttatctgtgaaatatactctaaatttatgcacatactcctttttcttttctttttttcaaaagataatctaagcacacacataatctttcattatgcaaatggtttgaagttgcattgccattaaagaattcgccattcccaaccacgatttgaaacactgatttatgagcataaatgagattcttattcactgcctgaatgatttggaacatctagtcttaaaaagtgtgtatggtgcaagacaatggacctgcttggataagcttctaggagaagaaaataagatggaaaaataaaataagtttctttataagctaaaattagcttattcataggctaatttgtagaaactctcacattagcttctccagaatttgatttttaaattatgttagcttaaggaaaagttcatttcattttttcttcttattttcttatcctaaggggttgatattaggtacatgtttggtttatgtttgtgctgttggagacgagtagtggctaggttagtgctcagtgctcactatacttagcttgggtactgtagttggctattttatattttacatttttcttttgttttttgtttattattttttaatcaggtcattttacatgggccatgggtgggattatatctttttatgtgttaggatttttttatttatctttttaattggagtctctataccgtgtaatggagtttaatgggctataatagggtagttaagattcttttatcaaaataattcaaagaaagaatttggatttttgtttatcatgtagtttgttgaacatgttggcctgtactaattggatctgaatgcgctaatttttttgtggagcattttctgtgacattttatcagcatgccatttatagtctt

SEQ ID NO: 21886 - DNA, 765 bp, Glycine max
  Intron number 1 from transcript Glyma08g10860.1 (locus Gly ma08g10860) derived from phytozome v7.0 (chr-ID Gm08; pos 7900388 to 7901152 reverse strand)
gtgatttttacttactattattatttttcagctcggtatgtcgttttgcttctaaaccctaatcctaatcttgcagattttactttaatttgttttggtgaaagttctggattgatgaaactgctgtatcttttgaaatcactgttatgcttccgatggattatgaatttgtgctgtttcgaaatgtgttttgaaaatttagcgacgtgtacaatctttcctttttctttttttcttttcttgtggcctattattcagttgggtagaaaagtgttgcgaaagaagaaagaaaaaaaaagattgtttgctattttgagaaagaaattgaggacatgacaaatctaatgaccgcttggctttttttcttgatttgctagcttggtagccgttgtttgtttgtttttttttctttttctctctgcctaaatggagtaatcatgcctgagagatatcatgatattttataattttatgatttatactctgcaagtaaaacaaggttgaatttgttgttttctgcttcctgattctttcgaatttcactgaaatttggtttgagtgtttggcctttagtattttactctctgcttattttacaggcttaataaacctggatgtaaggcaagaatagagagagtgatggtgttttgaatttcgattctgaacttcttttttttttttttttgatagcttactttctttcctttcttctccttttttggttctgcagataaaatacttgagattatttggtacctaagttaa

SEQ ID NO: 21887 - DNA, 881 bp, Glycine max
  Intron number 1 from transcript Glyma07g01090.1 (locus Gly ma07g01090) derived from phytozome v7.0 (chr-ID Gm07; pos 646756 to 647636 reverse strand)
ttatcacttccaacctcccaagaattggataagtatatatatatcatttttccttcaactcgtcttatattttctcatgtaccctttattcctttctttctttctattcttttcattttttttgtcaaatattttatgtctctaatgtatatagtttcttcttttgcttcttgtttttgtcacttgacatgttatatcctgaaatggaaacgtgggtgtatttggacttgaagatcccaatggttagttctcttctcttatgaatctccctgtgcatcttttttacattctttttgtagtttccttcaatccatgttatattgtcatcatcctataatcatttcagaaattctggaaattcaaaatggttgaaataatgttcaaatgtaatataagaaagagtgtagaaaattacaattttctcgaaagtttgttcaacggcatttacaatgccgtggaaataaaatataacgtaaatatattgctctagatctctataaagaaaataaatgaacacatcattgattaagaagtttgttccattaggtcggctttcttgtatgatataataaactgatgcatgtggataatagtgaagtcaaaactacttatctttctttatgtttatatccaattaaaatataacatgctaacaaaaataattaggagagaaagtgtcgttacgtgtttttttaattaaaaaatataaaatgatacgggtacaaaggactcatgatttgaatccaataatagttttaaagaattcacaaatcacaagttgatacgtgccattaattttctatctcttattattttgggctgaaaataaaaaaattgttcttacttgggactttataattggaatataggaccattgagat

SEQ ID NO: 21888 - DNA, 862 bp, Glycine max
  Intron number 1 from transcript Glyma08g14390.1 (locus Gly ma08g14390) derived from phytozome v7.0 (chr-ID Gm08; pos 10465328 to 10466189 reverse strand)
tacgacaaatttgacacaacctaccaggtctatctcattttcattttcatttgccgttgatctctgtcatttacgacatgcgttttatatgtgcatgtgatttccctcacgtgaatcaatctgtgaaatgagttccacagtaaattttgatgtaatttgaatttgttaagacgttttgatcaacgataattaggatttaggagaggatcaagaggagatagataaatgtgctctgaattttgtggctatcggattttcttgtgtttaaacttatctctcaattttaaaggggaagctgaagtggaggcttggaattaaaccatttgtttgaaaagtctgtcacattatcaattctgggatcgccattcatgttttcagttggtaaaatgctagaatgggaagaattttagtcattgagaagggcttcagtcttcactcaagatccacattgtgttggtttttaagaggcttattttattagatttctgattgcttgtaatgcttcttcttgtttaggaaaatgactggtatacagtccatgggtgtatacacctagtgaaagttaggaaaatgaagagagaaaagaaagacgatgtgatctgaaataaagagagaaaatgaaggggaagaagtactttgtaggtgtgtgtatgaaggtgtatgaatatcattattgtcttgtttattagccataatataaatttatttttaatggacatggaggcttgtttccttggtatatatttttttgttctgtcaaggatccacaatttttattcttcctgctgctagatggctgacaaaatattttgttatctaaatttcaggcaactattggtattgactttttgtcaaaaacaat

SEQ ID NO: 21889 - DNA, 1027 bp, Glycine max
  Intron number 2 from transcript Glyma06g13420.2 (locus Gly ma06g13420) derived from phytozome v7.0 (chr-ID Gm06; pos 10565058 to 10566084 reverse strand)
tgaggaacccactgttcttgcatctgtgacaccttgtgagtaccatgatccatcattgaatggtaaattcttgcagctatgctgttaaaattttgatttgtcttcggctgagaaccatcataatccttttacttacccacgtttcttgtaattctattccatctagttccattacgggcattattctcccttgtttcaatttgtagatttagtaaattaatgacttaatatgcttgtaaggtttgctaatctttaatatacaatacaaaataaaccaatgacctaaaacttcaatttcaaattcactggattagtccttttagttgcacttaattactgatagttgattatgacaaatgataatctaatgaagttgtatttaaaaatatggctttgttgctcaatatcagaacttgcaattggagcatcgaagtattcaaatctgattcttctccatgtacacagtcaatgttaaaaatgcagtacttgcattttgccagcgatagtttctaaactctcttttatatcttccgctaaagataggtacacgcacccccctcttggatcaagagaacatttttaaatcataatgttgaatttgatgctcaagctgtggaaaacactaaaaccacaaattcatttttttttctgtactctttttatctaatatattttcggcaatgttattttgaaaacatgaaatgtcattgcaatgcattgaactttctcttcaaacattttgtttttcattccaaatgcaaagcatttagtttcattcagcacaagccaaggcgttaatgaccgaaaaagattacacaaaatacaggccagtaatatttactgttgcagtacatcatagacaaggggctttgtagacttcagctttatattttacatttctgtttgtagaaacctcctaagtcgtgatttgtcattctcatgagcaggatattaagtttcaaaactgacaaaataagtttttttttttctttcttcacagttactgttagtgaagtagaggccttgc

SEQ ID NO: 21890 - DNA, 1006 bp, Glycine max
  Intron number 5 from transcript Glyma05g32890.2 (locus Gly ma05g32890) derived from phytozome v7.0 (chr-ID Gm05; pos 37675614 to 37676619 reverse strand)
gggtatgactcaggctgcgtctagaattgttaagcaaaatttatatttgaggcctagtttttattttttgatttgtaggaatcgaagataggtacttaggcctagtttaatataataaattattagtcaaaatgttaaaatgaagtaattttaaaatctcattatcaatagataatatggtttaatacatttaatctattttgcaacatagttaatctccaataggatttaatcaattttgctaaacttattttatatgcgatgcatctagagaaacactgtaaacgttgatcatgatagtccctgattttacaagaccctcccccccccaaaaaaaaaaattgaaatctctgagtcaaatagaaataaagtatatattctaaattttgttcaaattggctctcaatagaagaaataaattaacctaatatgtacataaaataaaaaaatatgaaaagaatcttcaattgaatttgtgatgtgttacacttatcactaataatttaaattaacaatatataattttttaaatgtataactttttttaaaaatgattggggaccttagacaactacctatttggcctaaacgccttatctggtctggatatgaccatacgaggcattttttcattttcatcaacatgttttatatctgttgtgtcattgatatatgtaagaaatcttgacctgcatgtgcacttgcacacacattaaatcttaggatctaagaaaccaaagtctggctaagtatataatgtagacaggaaatccttagaatagaggtgcatactatcccagctttctttcacaagcagaatgatggatatgttggtttgaagtttaccttcttgaactaccttgtctgctagcgttctctagtgttttgattccgcacacatgggttgcttaaacattgtttgctctcatttgattattggtttcttgaatataagagatactaacatgcaggttgttgtaaccatttggtatcgtgcacctgagtt

SEQ ID NO: 21891 - DNA, 796 bp, Glycine max
  Intron number 1 from transcript Glyma08g39970.1 (locus Gly ma08g39970) derived from phytozome v7.0 (chr-ID Gm08; pos 39661231 to 39662026)
atatcaatatcgtctccaaatacgacgtcgttcaggtacaccttctcaattctcattatggggttccgtttcgattatatatatatatagtttcataataatcagtttttttagacttaatttggactgagctgaatttcacaaacttcaaattatggaggatttatttttagctttgttattttcgcataaaaacagaattcaagggaataaaagaaataaaaaaaaaaaaaaaaaccaaagaggtgtgtttcatgtatgcatcattgtttttggtttggtttgttttttctattaaatattctattgagaacaagttattagggtatttcaaagaatatagtagaaccttgagagatgcataatgcgtgtgttttattttatatatatatatatatatatatatatatatatatatatatatatatatatatatatatttctgttgcttgttcttggctctatgaattttcatttttttttaatgatatgaaattgtgttctcattgggagcctttgttgaaaagcctaaatttgaaattcaggggaatggcaaattcattgcaaagggattgaaatgcaaatgaaagtgtttggtttggattaaatttcgaggaaatgattgttgtgtggctttaaagctttctcaagaagctcacaaaaaaatataaaataaaaaaatgttgggaatgagctgcactaatgtgcaagtgaattccatttctcaaactgagtaattggatatagtaggattattttgaatgtgtgtggtctcaggttggagttttagcacaag

SEQ ID NO: 21892 - DNA, 451 bp, Glycine max
  Intron number 1 from transcript Glyma05g36040.1 (locus Gly ma05g36040) derived from phytozome v7.0 (chr-ID Gm05; pos 39963035 to 39963485 reverse strand)
acagaaacgctgcttcacgtcttagggccatcaaggttactatcttccctaattctattcatatgtttctgtctttcaattattttgtgccctagttctcaccgttctctgcacttactttttattacaacaaaatcagcacttagtttttattcagttgattagtccctttacaactcttccccgtattctcggacttgtgtttaacaactactgcattacgattcgaaattcctgttaactactgcattagctagtgtagtagctcaggctgaaagtctaaaataatttacattctgtgattctgtgcttctgctgttttttttttcaaacgttatcacttgatttactgtgcctagaaaattattttagattttgagcttgattgtcagtctgatagtttggatttcggataggcccgttcgtgcagcagcagcagcagggtacctgc

SEQ ID NO: 21893 - DNA, 335 bp, Glycine max
  Intron number 1 from transcript Glyma06g40980.1 (locus Gly ma06g40980) derived from phytozome v7.0 (chr-ID Gm06; pos 44272308 to 44272642 reverse strand)
gtagccagtctctctggttgggatatcagaaataagtaagtaatcttctgttggtttgttacgtgcatatacaatatatttttatcatttcttactaatgctgttatcttgaatgtattacttattacaacctttaaactggagattgggtcaacatttattatacatgtttaatacaaataatattttaaaaatgaaaaaaagtactatatatgttattgtcttcttctatgcatgtacgctctgttttgattcccttaagtgatgatttgtcattctttgttttctttaaacttttaggcaacaacatcctgtgattgaagaaattgttcagc

SEQ ID NO: 21894 - DNA, 956 bp, Glycine max
  Intron number 1 from transcript Glyma06g12480.1 (locus Gly ma06g12480) derived from phytozome v7.0 (chr-ID Gm06; pos 9649100 to 9650055)
ggcctcctcaccgccgtcagcactgagcgcctaacgtccctctccaacttccgctccgtcaccacattaaaaatgataatatttacttttttatgtttatcaaacgtacaatataaccaaataacacattaaaaataattgtaaatatcttaaattttataaggtattatctcaatgttatatcacagttattttattattttattattatcacgatttttttatgatttaaattagtattgaaatatcaatcattaatcatcaacaacaagtttcaacctattttaccataacaatttggtaaattttattttaacattttctaccagcattttttttattttcattgtttccttctaaaataatcaattgttaccatagtattttatttttcttattcagatttatggaaggataaatataagccaaagacaagaatttatcgatcttttcattctttctctaagataaatttctaattttttcaaacttctttaaattttttataagatttactaacatatctattaatatatatttgttaaaattaaaactaaataattgataacatattagaaatataaaataataataaaaatactcttacaaattataaaatatgaatttctaactcacacacgaaacgagacacgtaacaaaataataaaattaatatacaatttaatacataataaatatattaattttagtatagtaattaaaacacgtgtgttttcgttagtgataataaaacaaataagattaaaaaaaaaaaaaaaaccaaactggaccttggcacttgtggtaatcacatgatatttgaattttgtcaaactaagagccttacattgtcacaagaccaatatgttccttagcctatactcaaaaaaaatattttgatttagaaataaaattttaaagcgcacagccactatttaagccccctataggcccgg

SEQ ID NO: 21895 - DNA, 578 bp, Glycine max
  Intron number 2 from transcript Glyma05g35610.1 (locus Gly ma05g35610) derived from phytozome v7.0 (chr-ID Gm05; pos 39605251 to 39605828 reverse strand)
cgaggcctcctccaccagatccatcctcagaggtataattatacatattaatttacagagattctacaatttaatttgttattattttttctttctttctgggttttgatacgagttatacacatttcgtgaaactttactaaaaccaactgacaattaataaaattacctttgaatttggtccccgaaatgctttcgtattgaagaatattttcaaatttcattttccaattaatatatatacgccaaaggcatgggtcctccaacttttcttttttaaacgaatatgtatgtaaaacggtttttctattctttctttattttataagataaaaaaatggattgctttgcttctctttatatgtcttctattctttccatataaaacgaatgctagtatatatatatatataggagtattgtttatcttctattctttctatataaaacatactctattttcttttgcgcttctactttaactttcttttttttttttgcattataattttaacgattttttttttgttttttaatttcaagtgtgatagcgctgcaactggtggggcattcaagaa

SEQ ID NO: 21896 - DNA, 538 bp, Glycine max
  Intron number 1 from transcript Glyma07g39000.1 (locus Gly ma07g39000) derived from phytozome v7.0 (chr-ID Gm07; pos 43598830 to 43599367)
ggtaaaatagaaaaccccataactaatttattgaaatcaagaaaatttattttatttcttggattttatataaaaacacataaaaaggaacaaagggagtattgaaatcaattactaattttatagtagctaatacatctttgagatcctcgaccacacgccctacttaattattgtaccataccaaactcctttgttattgaattcaccagataaaaaagagtaaaaattctatgtataaaatatgaaaatgtgatattagttagtagtaattttggataaagaagtcaaattgaattgttgaagaggagtagggcaatggggtgatgatgttgtttgagtatctattttgaataatggttacattagttattttgacggtgataacgtgacggcttcaattttaaccggacgatggagaagatggaggaaatgcagacaaaatgaaatgaatgcgaaactcaaattgaaatgaaattagagatagagagaaagaaaaaaagctataaatacacgtcgaccactatgctcgcagctt

SEQ ID NO: 21897 - DNA, 634 bp, Glycine max
  Intron number 3 from transcript Glyma08g09210.1 (locus Gly ma08g09210) derived from phytozome v7.0 (chr-ID Gm08; pos 6586310 to 6586943)
ggtcttctatttcactgcggcgtggtgtggaccttgtaagttcctgtgtctgttctttttgttgttctacgatattttactgtgttgttggtggggcatgtacatgaccattgcaaaaggacaatgagaattgagaaagtgatcacataattttaattaaaaggaatatttggtgatgataccaaacaataaattacgcttcacccatgaattatacacacgggatcttcacctgtgtgctaaattcaaaagaaacatgcttttgatgtgctaaaaactggaaattctgatgatattaggctttgtctagtaagattaggttccaatccccctcatcttcatggatgttaaaattgaaaaatacccctaagatctctttattataaacttcaaatttgcaaacaagattcctgcccttgttctggttgtagtcttttgtttaaactgtcatcatgcttgtgtataaattatgtggatgacacatgttatgcccattgacaatctgctgagaggtgatgttcctataatttttttctttctcgctgtgtatattctaaagagaaattctcacaattttcctggtgtatgtttctgtttaggcaggtttatttcacctatcgttggggagctcagt

SEQ ID NO: 21898 - DNA, 502 bp, Glycine max
  Intron number 1 from transcript Glyma07g38850.1 (locus Gly ma07g38850) derived from phytozome v7.0 (chr-ID Gm07; pos 43497411 to 43497912)
ttgaagtgagctcagttgaaacatgttgaagcgctttataccggttagaaataacataccccttgataaataaaaataaaacagatccatttttataattaatttgtaaaagggattcaatttgatgattttgccgtacttgtagtgaaggtgataacgctgcttcctctctaaaatgataaaattagtacaaacgcttttctgcacgctttacacgggtttaaaattatatattataatatatcaaaactcaaaagttgtttaacaagtaattgacagttgagttctttaattaagatttaggtttgtttttcgattgacataaaattagttgtaattggaatctaaagatattactttatcttatttatcctaagatgactcaagctgtggggaaaggaaaaaacttgatataactccttgttaaacgaagaaaaaaaaactatatattgatgtattagtccatagttttagtgtatcgagaactagaagcgtaacagca

SEQ ID NO: 21899 - DNA, 437 bp, Glycine max
  Intron number 2 from transcript Glyma05g24660.1 (locus Gly ma05g24660) derived from phytozome v7.0 (chr-ID Gm05; pos 30805931 to 30806367 reverse strand)
gctcgtgagtccacccgtatatcttctcaatttctcccctgtttctcttttctttcttatattctttgtttgaaattcaagtatgagttattagtctcacattaatcaggaaatgactcaatgatgtatatatgactatataagagattaagagatgtaactcatctaatgtcttaaggttttggataaccatatagagtttgattttcatgataatcttagtcattacattaggctcaaatatctgttaacaaaaaactaataataataacatttaacatttgctgataaaataaaaaacattagccggttaacccttctaagtgcttcccaaactcccaacagtctctatagtgttaagagtttgatggattcatttgttgttgaatgttgcaattgcaggctaccaggtgactacggtttcgacccattaggac

SEQ ID NO: 21900 - DNA, 553 bp, Glycine max
  Intron number 2 from transcript Glyma06g17980.1 (locus Gly ma06g17980) derived from phytozome v7.0 (chr-ID Gm06; pos 14309899 to 14310451 reverse strand)
tttccagagtaaacccctaatcttatataaactgacggaaaaatgctagcaacacagtctcttacaaactcttttaaaaaatgctactactgttgtttgaaatcacaaattttggtgaatttcgttccttttttaatggtcagatcttttttgaaaaaaattgtttttatttatcttttgtttgcaaagtttaagctcttttgtcaattatacccttattttcattttaaaacggaactttacttaattttcacaaatgcattaattttactctcaagtagaaatgaaaaaaaaggataaaataggatattccatatctatttttattagaaccaagaaaatttattgcatttcttagtttctacgtagacaaataaaaaggaatggaaggagtaataattttctatctccattttgtagttttcaataaattttaacaaattgtgtgttagtaagaatgtgttgctagcactcttcataacctgattgttcggattagcgtattctggcgtttttgatatgcggattttgatacaatttatttcattcagtt

SEQ ID NO: 21901 - DNA, 785 bp, Glycine max
  Intron number 3 from transcript Glyma07g03680.2 (locus Gly ma07g03680) derived from phytozome v7.0 (chr-ID Gm07; pos 2550092 to 2550876 reverse strand)
aaatagaccatcccgaaggtccattcggcacaaaggtcagtcttattaccttttcctatttaaattgtataattttgttgtgtaagagaataactataagagtcacataccgttgattgtgcgaatggattcttttttttttttttccaatgtattttaactgtataaatttcgtctctcattgcatctcgtgttctccatttgtgcatttccagatagtttttattttgaaatcgtggaaaactcataatgcatagtttgtgtgtatatatatgtgtttaaatgaatgttttgtaaaagtaccttccttcatttgcaacccaatcaccagacacaaacctctttatacctgattggattgattcagtttgggttgaatgcaaaaaattcatgaaaattgaccctacccaaccaaattatttggtttggacacaaaattctcccaaaaatcatgattgaaattcatttagcaaaacttggatagccgttttgtagttaaaacagtgactgatttgcttgcatgaattgatggaatctaagtatctgattcatttaccctatcatagtggcttactcgagcttcttattatttcccttttcatttttcatttaatcggatgcctatctgtctatctaagtattcagctttctttctttgttactaaatggtttgtctatctaagtattcttctttattaataatggttttatatatgtttcatctttatctgctttcattgtttgttttggttcataggaagcacctgctgttgtcaaatcttact

SEQ ID NO: 21902 - DNA, 572 bp, Glycine max
  Intron number 1 from transcript Glyma05g31990.1 (locus Gly ma05g31990) derived from phytozome v7.0 (chr-ID Gm05; pos 37002523 to 37003094 reverse strand)
tcccaccgctagggtttcccccaaaaaattctctggtcgaatccattttctgtcactgctatcacttcactttagctctatctctcatttcttattttccataatttgatttatatttttcggctggaactctagcattactctttttcagtgattgtataagcaaacataattattacattattttgctatctagaaaagaaaaaaaaattagaattgcattgttagggtatttgtttgtttccgtgctgatatgtagctttgggtttcctagtgaaatttaatctgtcatgctttatgattgtagtttgttctccccccctttttgaaatgttcaatattctatgagaagtgaacttcatctgaacagcatgtatattatttgttgttcagccccttcagggattagtcaaatgatatgtttggaatcggataatgagtcggaaaattgtggaatgggcacacgggacaaaaatgagccaagagattctagatggatttcaaattcaatggggtctggaagttctcctggtatatgcttggaatcagataacgagttagaaaattgtgga

SEQ ID NO: 21903 - DNA, 422 bp, Glycine max
  Intron number 1 from transcript Glyma08g04530.1 (locus Gly ma08g04530) derived from phytozome v7.0 (chr-ID Gm08; pos 3204452 to 3204873 reverse strand)
tctaactgttgtcgtagtctttgaattcaacataggtatataattataactatagtactaactaaaatacattacttttcttttcatttgtttgttattattttattttatttttccgtgttggagcactttatttcaataggtatgtgtttttcgttctttaagctttagggtcgtgctagaaatgtgatgttgaactgtttttgtaatcagacattttcatttatgccattgtaattacatttttattctgtcacgaatttttttttcatggtcgggaatttgatcctgttctaagcttcaaatccttttcaatgttttccattgtatctaatgtgtctatcatttgaattcatggtgaattaaattagaatgcactgattcaatcaggggcaactctgagcaaaggagtaaacggtgga

SEQ ID NO: 21904 - DNA, 765 bp, Glycine max
  Intron number 3 from transcript Glyma08g08900.1 (locus Gly ma08g08900) derived from phytozome v7.0 (chr-ID Gm08; pos 6345267 to 6346031 reverse strand)
cttgtttgccaggtaaatttttctttttccccacttctgggttgccatggaggaggatttgggttttgaacattagatggtattttgtatctttcctctgatgttaaccgcaagatattaaaatttgtacaattagcacatgacataagaatattgtgaaaaaaagcatgtatatcagtctttagtttctaaaaacatccaaggtttgaggtccattatcttgtcatggctaatagctttacaaagcaacaggggatgaaggttaatgatagcgataactttttcaaaacatacataccattttgaatggtgtgaagttttctctaattgtataaattgtcttctagatttgacagtattgaacaggaccaaattcactatttatcactacaatagcaaaatcatttttggttttttcccctttctattactactgctttaccacaccattttcttttgcaggccgagtattttcgtcagttgcttaaacctgttacgtagtctagcattgagggacaccggtttaggggggggattgccttatattgtacttcatcattataaagttgcagagagatgaagttttaatttggaaaagttgctattacttcttacatggaaattgaaatcaccttagcacctgctgtttagttttaacattcctttaggaacttccttccagccttagtacagaataattgccagttacataggctaaatcagcattgcttgctcgaacgtcagtcagattgaacagataatata

SEQ ID NO: 21905 - DNA, 598 bp, Glycine max
  Intron number 1 from transcript Glyma08g08900.1 (locus Gly ma08g08900) derived from phytozome v7.0 (chr-ID Gm08; pos 6346663 to 6347260 reverse strand)
tgattcgtcttcaatttttgtttccaaaaccttaggtcttgctctgtcgctcactgtgatctttttccccaatttgttccatttagcgttgttgtcaatttgcaaaatcaggttgttttttgtgctgatgaggttctagttttaagatctatatcttaaagtatgtttctttttaaaaaaaattaagaatatatatacatatgctgagttttgctttactggtagctagggttttctttttggaattgatttgctggtttggtggggggttaagttttgatgcaaagtttggaactttactattagctgcaaaagctcatttaagttaatggtatgaaacttgagtgatggattctgtgcctaagattagatttaggatttttgtgaggataatctgaattgtgataattaactttcctttttttaaggaaaaaaagaacttatttttattttagtattttagagctagattggagtgagttattctttgctcctctcgtgtctctattatgaacagttgctttttgattttcagctgaagccttactttgacactttttcaggtcagatttctgtgtttgtcgtttctgataatctg

SEQ ID NO: 21906 - DNA, 969 bp, Glycine max
  Intron number 1 from transcript Glyma05g31110.1 (locus Gly ma05g31110) derived from phytozome v7.0 (chr-ID Gm05; pos 36305811 to 36306779 reverse strand)
attacattaacgtgagtatgttaatttgatgcttcaagccctcgattttttttttgtttctcttatgtgttgatgttcttgattcatacaattcgtggatttggcttaaaaagcgcaagttctgttttccttcctgatattttttgggtctgcttcttcctgattctattgtatgatggttgattatatatgtttatgtttatgtgtcttcttggattttaccccatggttctgaatagggtaaaattattgttaacgaagaaagggaaaaaagttagaagaacaataatagaaatcggaacattgggaactggcagggctagtgcgtgtgatctaaacgtttccccgcggtatagtgcatgtttggtttgcagttaaatatgttgtggtgcattcctaatcggttggcaaaatttttttgcctaaaaggtaattttgcaacggatacgcataggtgctcaattgctgttttcagactaaattttgtcgtcaatgtcattattgatgcttggaaagttcaactggttttttgggcaattctctgtgcactagatggttcaagtgtattttccatttgatttttgacatttgtactggagattatctattcagccataatggttggacacctaacagtgcaaataccccattaatagacattttattctctttttgttacgtcgtatctatacactcagaatggcattcggaggtccatgcatcatttacctatctctcttctatagtccttttattgagaaaaagacacaaatctaataagcatgatatgaaactctttagtagtatttgttataaattgtctttctctctttaattccaactatacatgattactcaaaaataagagaggattcaaacttgcgattggctatcccttgacgtgaatacacaagcacggattgccaatttaccaaatttcattactgaaactggttttacttgcaggtg

SEQ ID NO: 21907 - DNA, 839 bp, Glycine max
  Intron number 5 from transcript Glyma06g08730.3 (locus Gly ma06g08730) derived from phytozome v7.0 (chr-ID Gm06; pos 6368542 to 6369380 reverse strand)
gagaacgtgcaaccagcgcaaccacctatcttgatgttcgtgtttgctttgctctgatttacttattggtttagtcttcctgataaattgcgcaattttatttggggaaagttttagtcggaactcgtacttcaaatgctttttttgaaacaacaaattttagcaattgattataatcattttgagtttaggttgtgttactcaaaatttgttggatttgattgcaattcagtttgaattatttaactatgttcccttattactttactcatttacgtattcagactgatgataattaagtaaattacttaaataaaatgaattgtaagttccaacataaatttcatttgcaaattagttcagatagtctttttttgaagaattccaaacacaatagtttgattactaaaaatcaaatctattttgtattttagcggttctgaggacagtgtatgtaatttgccctgaagaatatagcttaagcctcagaagaagtaatttgtctgaaaaatttattgttttttattcttatcgtccatgtatgaagaagaaatggactttctttacaaattttttgttttctctacaacctctcctacaaaaaaatacacaggcccttatatctgcatggaaaaccggtgagacgatgccattcatatatgacacggtaacttattatttatcatgtagttaagacggaaccaattaattctccatattatttgtttgaactgtaattctggcagtttaaacctatgataagtttggttcagaaaaatagtgcattattccttcatctggcaggtctgggacttgattaaattggcagattatctaac

SEQ ID NO: 21908 - DNA, 568 bp, Glycine max
  Intron number 2 from transcript Glyma06g04450.1 (locus Gly ma06g04450) derived from phytozome v7.0 (chr-ID Gm06; pos 3113298 to 3113865)
ctaagtcttccacagccctttctaagtgttagtattttgctctgttctgtttattctttcatgatacacaagaaaaaacatagccatgcctaaggggtcttaattcttaaaccatttattgttgatctacaaaaccaagggtgcacgtatatttgcacttcatcttttttgagttccaaaatgtttaattactggcttgcatgcagaattaacattcatagtgtcacatgttaaaatttaaatgttgttagcctagtacacctgaccatataaaaaaaaagaatttcttattacatctgaactcagttttctttaatatgtacggagataaattaggttaatttaatgcaaattcatttgaatttttgaattttccatttgagtagttaaaaacattaacaccaaaatgggagagagattaataaaataaaaggaaaagacataaaaatgacaatgcaataagtgatgtgacaagaaagaaaaaaaaataaggtgaaaaaaaagacaaagtgacaagtgatttttatattttcttttcacatttaactgttatttcataattgtaggt

SEQ ID NO: 21909 - DNA, 529 bp, Glycine max
  Intron number 2 from transcript Glyma05g28090.1 (locus Gly ma05g28090) derived from phytozome v7.0 (chr-ID Gm05; pos 33983903 to 33984431 reverse strand)
gaagaactgtgggagaagcacacgaaaggctgaaggtgtgttagtagtgtctatactattgtgtttattagttgtccatgaaaaaggaaaacctgttagctagtaagtgtctagaggggctatcagttgtagaaatgcagtccataaattaatatttaagagggggaaaattgttgactctcctgaattgttagaaaaaatatatttgtctttgatagatgtctcaaacttggtgaatggtgacagatggtattattaaaaatatttaaaaatccttattggaagtttcattgaaggctttcaagatgcttttgaaataatgaatgatttgcctatcaactgcccttatatacattagatataacttatttctgtttagtgattcttttttagcatgtttatcaaaacattattcacttattgctgctatatttatgagtttaggccaacatttgtttttgtgatggtattctgtatactgatttcttcaatttaaatgattgtactaatctgcatgactaggttggaa

SEQ ID NO: 21910 - DNA, 820 bp, Glycine max
  Intron number 1 from transcript Glyma08g18640.1 (locus Gly ma08g18640) derived from phytozome v7.0 (chr-ID Gm08; pos 14027753 to 14028572 reverse strand)
aagccagattctgggtagattacattgacaaaaaggtacatgctttaatatgtgtcatgtgatttctattctttatttttgtcttattaattcaaaatttgaagtttgaagtacagggattctttgtttgctattattcactctcaactagggattagacgtctcacatatcttgttaatatatcgcttatggataaaataattaaagttctggtctactaataaaaatttaattaatttttcaaaataaaaaggtcacatatgtaagaaaaagctcgacatataactcttctatttaaaatgaatttttctttttaaatttttattttggcctcacttaataagtgtgttgacccccatatgtctgaaagtagaggttttaagtaggaagttttttcaaaccttgaaacaaaccagaacatattgtatgcttctctcccaaaaatataaaactaatttttaaaataatggcctactaaaataaaaaaatagtttaaaatggaatatttctttgttttttggtaatttttcattttgacgcctgggaggagtactagatttttatctctgtgccaacatctcggtagtacaagtggaattgggttcgaatcctttaaacagagttttggatttgagctttgtaaatgaaacaaatgtggtaggaaaagaagactcattaaaggtaactagctaagttgtttggcaaagattaattataggcaaaatcgatatacaaagaataaataacctagtgataaaaaaaaagtttttatctctgttttcaatacaaataaaaatgtgtgattttcaacacaggtgt

SEQ ID NO: 21911 - DNA, 376 bp, Glycine max
  Intron number 1 from transcript Glyma07g00290.1 (locus Gly ma07g00290) derived from phytozome v7.0 (chr-ID Gm07; pos 103584 to 103959)
ctttccgattctatcaattcaaactcaagctccaggtctattcctttccccccctttttttcttaggaatttacatttattcttttcttcaactcgcacaaacccttttaatatattacattgcaaatacttcccttccctgtatttcacattcagttcagcactttaaagcgacgatttttgaagcctacagctttcacagcatatattttttttatcactaaatttcagtttaaacagacataccctgatactttgagccatattcatagttgtttgttttgttaatgttattaactgacattgagtccggtgcataataggatgatttgttaattccactcttgcagaagcagaacctcaaattttgtgacag

SEQ ID NO: 21912 - DNA, 574 bp, Glycine max
  Intron number 2 from transcript Glyma07g00290.1 (locus Gly ma07g00290) derived from phytozome v7.0 (chr-ID Gm07; pos 104069 to 104642)
ctgcaagcctaaggttactgattttattattttaactcgattgtagactttaattgatcatgtttttttctgggaatgtgaactcataatttccttgttttaataataataaaaataaaaggttgctttcataaatgatctgtgcctgttgtctgacgtttatgaagctttaattgatatataatgaataaaacatctccgtgttctgcccttctctctctcacacaatgtgtgcaggaatgcccaggtacagacacaaatgcagagtcaaaccatcctctggtgcactctgtcctctaatcagcatattattctatagttcagtagtaacttattgtgtcgaagttatggaaaaatagaaatttactcaatagttttcacacccaagttatttttttttctgttaaatgataataatgtcaggaggttacatccatttcttgttctgttcttccagtgtgtaatcttaattttgataggttctaattcagtaactgctatatgcatatgaaaacagaatggttttgaaaatgatctataaactacatagttgtttctccattgatgttgcaga

SEQ ID NO: 21913 - DNA, 792 bp, Glycine max
  Intron number 1 from transcript Glyma06g21130.1 (locus Gly ma06g21130) derived from phytozome v7.0 (chr-ID Gm06; pos 17566644 to 17567435 reverse strand)
gaggtaatgcaatcaaatcactttcttcacacacactcttcaattcaacacttgttctgttattgttgaggttgatgatttttaggcccttgtggaaatggaaaactatgggaacgggaagaatgttgtgaaatgtaatgatcaggttcggttgacaggaagacgatagagttttttgccttttgtgatcactactttaagattgttaaatgcttctcttttggtgttgatttcatggatgttggaactggtggatgtaatgttttatatgattttaaaattggacaatacttatatccagttcttttgatgcttaatgttgtttttcaattaaaattagataacttttcacaataaagcttaacattttggcgttgaatagcgagaggtgaactccaattttagttggagaatagcactgaaaatacctaaagaattgtgcccaagttttgacttataaaaattccattttgcaagtttaagccgaagcaattaaaagcatattgtatgaaacttaaacatgtgtcaaaggctggctactaggaaatgtgtgttgaagagcccttccttgtgataatttatttatattgaaccattgatgtaattttcatcaaagaggcttaagctcatttgttaaggatgcaattttttatcaactcccccctctcccaacgcacatacacacaaaatcaggaaaagaagggaaaaaactgtagcttttctgtctaatgtttgctggttaccatttgtgctgcagaacaaaagaagcaaaaactttctgatataaaagct

SEQ ID NO: 21914 - DNA, 489 bp, Glycine max
  Intron number 1 from transcript Glyma08g41740.1 (locus Gly ma08g41740) derived from phytozome v7.0 (chr-ID Gm08; pos 41678748 to 41679236)
tgttgaagttgtggaaggtcttggcggaaaaaacagtgagtttttccttcatgtgcatgatctagggttagctatttgatttcttcagttcatatccatgtcgtccaatcctagaatttcatttttattttatttccttgatgctttgttaattaagctagcttaatctctatttggaatttctttttctttaatttcagttgtttcttttttctaattactcctcttatatatacactttcacaaagaccaagagaagatgaggagaagagagggggagaaaataaaataaaataacagaaaaatactattaatagcctaaacaacttgcacaaatgatgattaagttatactgattcatctctttttcttttttctcctttgtaagtgtgatataaaatcatcaacaaggaaaaggatttttaaggtttctgctaacaatttagcaaactggattttgcagaggcaaccccaaagagcattctgcat

SEQ ID NO: 21915 - DNA, 569 bp, Glycine max
  Intron number 3 from transcript Glyma07g05160.1 (locus Gly ma07g05160) derived from phytozome v7.0 (chr-ID Gm07; pos 3844122 to 3844690 reverse strand)
ttcaagactctaagcatcggaagacacttgctgaggttagtctggaatctaccttgtttgtgttatacaaaaatttgcaattgttactgctgaatgtgtggatcaattgacattgagattgttttagcttattaattaactagtagtctcaagtacgagcctcctagatagatactcacagggagagttttgttgcctatagcagtcctatttggtttgagtaggattgattccatagagtttacacgtggtttcaaagaaaacaataagattgcaattattttctattccaaaccttatgaaatgggagggggggcgacaaatatattacccttaccctagtgatatttgggaaatttttgttttcttttgaaaattacattgattagcttcgtgctcctcctttttgtgctttattattttggtgtttctgttttggagaatgagtttcttctataacttgctatctagctaggcctgattgatcagttggaaagtttgagttcagatgatatgttgaatttttgtgcatttgtttttgtttccttttcagctagagaaaggtgtgg

SEQ ID NO: 21916 - DNA, 844 bp, Glycine max
  Intron number 1 from transcript Glyma08g41450.1 (locus Gly ma08g41450) derived from phytozome v7.0 (chr-ID Gm08; pos 41421638 to 41422481)
aacttgttagagttagacacggctctgatagtagggtcggtgtttctggctttgtttcaacactttttttttttttttttttttgcttcatgggacttttgatggagactatgttttgtgttttctctcgtttgggtctgagaattttgttctttcactgtgtgtgattttacttcaaagtttgagtttttatacttgcaatggaaatgggtcatgcaagttttattctttttgaatagtttgtaggagtgtcttttttttctttgccttgctttaaggtttgggttgggttgttttttgcatttttttgtgggttggaattgttggtagaaagtgtttgcagggtctttaacttagttaggatggttggatcttaatatgtttgattgctggtgtgctttcccattgatggtgtttgtctgaatggggtgttttggggtcgaatttgatgcattagcttgaatttgtaacttgcatttagtgtgtggattttaatctatatgtggtaggtgcgaattgagaagtgtgtcattgaaatagtgcggcttagtctttggaagaggccattagcacttggaagaattgtgattgtagtttgcagtctgttattgccgtattggtaattaaaaatggttgttaaccgcgattgattgtttgatcccgatgcatatcaaagatttcatcactatttttgtcaaaaatcatgttcatgatgaaatcttgtcatttttgcatataatcttgtaagagattgaactgcataggcttaaattttggttatgcaattctaattctgtcttgtataattactatactctgcagtctaaacccttgaagaatttga

SEQ ID NO: 21917 - DNA, 830 bp, Glycine max
  Intron number 1 from transcript Glyma08g24850.1 (locus Gly ma08g24850) derived from phytozome v7.0 (chr-ID Gm08; pos 19004485 to 19005314)
ggagtctcactcaatttataagaggtaaataaaatgttctttgaaatgaaattttgtgtgtcttgttttctttgtggatcttctttttggtgttgtgtgtcttgattttagcaatataataatgggtttgatctctaatttttctgttaggcttgtgacaaatcattcactgcttaaactggttttgctgttaggtttttcttagaagatggagagtgttgaattgtggggatttgggaattaaagaagaaacattgatgaagaagcaaattgtttttgtgttgactgtaaatgttaatagttactttaacagacaattgaatgctgttgaaaaaaaaaagacaattgaatgatatttgcacagcaaaaagttacatcatttttacacagtagagatgatgttgtgttggaatatgtattatttctttttttattgttttaaaaggaagcaatataggaattatgtaaatcttttaattttgatgtgtactttaacgaatagacttttcttttctagtgacagagcaggaatacaactttttctttctgttttttgttttagtaacattttccaggttgatattaacactactcaattttaattttcatatgtttaggtcatttgatggcattggtattcattcatcttttcgtttaattttattgacactaggaaatgtatacattaagaggggcaagtgatcaaataactagacagaagatttcaaacaagctatttgattcattagtcctactcttcacaccttatagagtggtttttattttgagttatatatttcatttattgatcaaagatgttcacttagcag

SEQ ID NO: 21918 - DNA, 651 bp, Glycine max
  Intron number 1 from transcript Glyma07g36030.1 (locus Gly ma07g36030) derived from phytozome v7.0 (chr-ID Gm07; pos 41416231 to 41416881)
agttccgccggtaaaatcttttgttttcttttagattcctttcattcttcattctctttttcacctttcaatctcaatgcccagctataattcgatttgcctcaaatctcatttacgcacttcattatgcatgtcttaaaaaattatattcttgtttccacacactctcactcttttactagatttttatgctcgtggttactgtgcaaaccctaattcactatattttcccctttcttgatttattttaacgtttgatatcctggtagttgctctttttttttttcttctttctgtgttttttcttcttctttttagttttttgcattgcctattgttggagactcccctttcattttgtataaggtaatctggatttaggtccaagctagtttgcatgctacacttacacatggaggaaaggtaatggtaaataaagcttcattttttcgtcatgggtcttcatggttgagtacactttattttattttttaatcctagatatggagtccagcaaatattgccagtggtcatatgtttttgaagtggttttttttatcattatatactgtccaattctttcttttgtggatataaaatggagttgctgctttgaatcacaattcaggttttatgtttcagataccgtca

SEQ ID NO: 21919 - DNA, 442 bp, Glycine max
  Intron number 2 from transcript Glyma07g17150.1 (locus Gly ma07g17150) derived from phytozome v7.0 (chr-ID Gm07; pos 16844115 to 16844556)
tggcttcagcagctatcgtggaacacattttcaaagtaaattactaccccatttgatttcttttctctcttcatggttgtttaattatgtaagcaacttagtgctgtctacatagttttttctttctttctcttttttcttttggtgtgttaatcaaccacttaagatcacaacattagtctaacacaactatctcaactcctcacctaacaacagtatgcagtaaacttggctctacgtacgttagtgtctaacctttctcatattagatattgagccataaaattttaatctaatatatatacattattaaaaacacatttacgtctgtagattctttgtcgaacgaaatttcgtatgaagggatgttcatactattgcaatttcatgtatttcaccaatttcaggttcaaaacacgactatcaaacgtttttgcaagga

SEQ ID NO: 21920 - DNA, 787 bp, Glycine max
  Intron number 3 from transcript Glyma07g17150.1 (locus Gly ma07g17150) derived from phytozome v7.0 (chr-ID Gm07; pos 16844658 to 16845444)
atatcactcttcattggtaaaccctcttccatatgtgtatccttagagaattcaacaaaatagcatgaaatataagaaattatcttcttaattaattaatggagcctaaaaaatgtttagcactagtacttactagccctaccaaggtctatagactcaaatacccacatgaatggcgaagattcctcgtaattaatatgtggagccattataaattagctagacccacacaccaccatgatattaattgtgccctcccttatttaaataagatgccatatctagtagtagtacttttttgtccatggaatatataattactatttatatccagtatatcataaaccaagtaacctagctatctgacctatttagtcgctttccctatgtcctcaattaaaacaattggtattttagcaaaactgggaaaaaaattaacaaagagtatattaattacattaccttttaaccacgcgttattttttaactgaggagataagaaagagacaagaaattcagaaaaacaagaagaaagagacaagaaatcagtatatactattttctatcgcatttaagaaaccaacttcttgttcttaatttggtttcaaataaaattaagatatgaccattcatttgataaatcatcaattgctagacttaaactactaccaaagtaaatcatgtgaatatttatactctcttttttatttgcaacgcccacaaaattatgtttcatttaagttaatgcatcattgtaaatgaaattttgaactatatatgtgtaggc

SEQ ID NO: 21921 - DNA, 604 bp, Glycine max
  Intron number 4 from transcript Glyma07g19620.1 (locus Gly ma07g19620) derived from phytozome v7.0 (chr-ID Gm07; pos 19793792 to 19794395 reverse strand)
gaagagtgcattaaagcaactgtagggtatgtcctcatgaattccttttggcttgccaagtttgttttcataaatatttttgtggcttttgtctcgtggctcatatgagtgataagaggatgatgggtggttaaaatcctaggtgcactaataatgcattctaaaaagaaccattgggtaattgcatgtcttttttattttatctaaaataagggtaataataagtctaaggaagacttgatctattctcaggttccaagtctcgatgagtaacctcgatggttgctcttgcatgaaacatcaataaatgataaaagatagactccactctggcagtctagctattatgtccattactacttcattgcctgcactgaagataaaagatagccacttttttttcattccctttgtagtagttatttttgtactaccagtcttttgttcttgacttttctgatttgtagtttgaattctgaaattgctttctatggaaaacctggaggatgagtctgccactttggttcaatctaatggctttatgtttcccataaaattctttatctcatcatgtgttcaataaacattttaattggaagtagat

SEQ ID NO: 21922 - DNA, 900 bp, Glycine max
  Intron number 1 from transcript Glyma06g01810.1 (locus Gly ma06g01810) derived from phytozome v7.0 (chr-ID Gm06; pos 1146875 to 1147774 reverse strand)
ggagctcccctttcacacttttcaggtacgtactctagtttttcaatgccacagcaatcatttgcaactttgttttgttttgtttttttctaattagtttcagatgagggctttctttcatctttccctcttcttcttctacccttttgactttctcctttacctcgttcccttttaatccgactgcattcttttttctctccgttgtttattatgctttttcgccgttaattgatcttctaattttatgcggaatctcatgcgttttgtcgtatatatcgtgtccacgccttttctctctcactttcttacggcgatgaatgtttttcaactccaatatccatctatcaaagattctttttttctttttccagtatagaaaccacgccaattacttagcattattgtgcttcttcatttcaggctatgaatttagtgttatcatcatattttctcatttgcagaaagataatttcagagttaacatactacagtatattgtttagtatgtgtgataaattcttgggtaaaatagcgttttggtctctaaatattttgaaatgttggttttagtccaaaaaaaaattaatatgttttttagtccctattatttaacaagaaacacatgtttttagtcactgaagactgaagagggactaaaactaaatcacttttggtaaatgcgtggactaaaaacacgcattaaatttttataagtactaaatcaacagtttcaattttttttcgtgaacctatataccttcacaatgctgcaaattgccaagtattattttagtttcatgttttagaattggagatttgtgtattctcataaagctttttcccccctgcttattatgaacaggtcgtggctataactgtatttttcttgctatctat

SEQ ID NO: 21923 - DNA, 604 bp, Glycine max
  Intron number 1 from transcript Glyma07g39780.1 (locus Gly ma07g39780) derived from phytozome v7.0 (chr-ID Gm07; pos 44164460 to 44165063)
ttctctgtgccctcttcatcgtcttaactacgcaggtttcctttcctctgcttcaaattttacatctttgttgccttttggttcttgcaatatttttttcactttttttttcttgtaattatgacttaaaaaaatatacgaggtgaggcttttagaaagtgtttggttggtaatattttttatttatttcttaacggaactttttaaaagatggttttttttttctcttgaggaaaagcgcctgccaaacagttaatttgtgctcggacaaagatttttgggagatggggttgctaggaaataaacaattctgcatgtatatatatatatatatatatataaaatcaaaatgaagcctagctttgagatctgtgaagattgaaggttctctcatgctatgctctctttttctaatattcaaatccgtttcgtctggatttttgttttattgtttgttattatctacacatatatttaatttgatggattcttttctttctaaaagacaaaaaagtgtggaagattagttgaatttgccatataatatctgcttactagttgcgcgtgaaattaaaacttatcattcaaaattattgagtcgcag

SEQ ID NO: 21924 - DNA, 989 bp, Glycine max
  Intron number 3 from transcript Glyma05g22500.1 (locus Gly ma05g22500) derived from phytozome v7.0 (chr-ID Gm05; pos 27753296 to 27754284 reverse strand)
ttgcaatcccccaatttgaaagaacaaatatcaaggttacagaagatcaagttaaacatatctgccatttattatctagagaaaagaaattagcttaatgactatgatgcttgatttgtttaattttgttcttgaatagtatctggagattgtaaacttgtagatgttacatcccttacaagtatttagttccaagattgcataaagctgtgtgctgtcatccaatttttatgattgaacaaatcactagactaatttgcattcacatgttatttctgaggtttgtttctgctcttagcatggcaaacacatatgaaaaagatggttttgttacctttctggattgaagaaagagaaaaaggaatagaaagatcaaagaccatattagctatgctatgggtctctgttttttattttttgggggaaatattatattgttagataattatttgtttatttgcaattctttttcacttctattatttgaatatcagaaaattgacactatatgtgacaccatatacaaatatctctatctctttttatctttttttgtatacacgatctaaaaaataaacctcagaatcaaagggtattactttttgttgtccattttgatgttcactaaacattttccaatttctatcctcatatgcttcctataggaaaatactataaattattagcaatgtttttgtactttgactctttgctaaaggaattcatacttaggtacatttatcttaatgttgtcatattccagtgtgtattaattccaaattaaaaattcatttgatttatacataggcactactttcaagttgcaatggcaaatagttgataaacagttttcatgtttgatgtcacttctgatagcattttgtcttgttctgaatgttgaaattatgcagcaatatatatacttttgacttatgaaagtagtaatgttggcaggttggtggataatcatatattagaggccattgtca

SEQ ID NO: 21925 - DNA, 693 bp, Glycine max
  Intron number 1 from transcript Glyma05g22500.1 (locus Gly ma05g22500) derived from phytozome v7.0 (chr-ID Gm05; pos 27754936 to 27755628 reverse strand)
ttgattcggtacacctctttccaccgattctgttttttcattctctccctttctctttatttttttatattattttttctctctcaaagaaagttgtaatttttgacattcatcaaacgtgtagtgagtcatttctcttcccagttgaatgcatgtggttctagtttgtgttactgtcgctgttgtgatttttatttttactcaaaatattgttactttgtccgtgtgagcggaaaagccattccttttcgttgtcatttagttcaacgtgaatttcatttgattgatttaatggaatttgaagctggaacattgaaatcctcggattttgctattttacgtaacgcataatgcttaattattctgtgttgtgtccaaaattgcaactttctttcatgaggcctaatagcacaggcatgccaatagtacattgcaaacatgtttctatttgcttcttgcaatgctataataccctttgccacctatgtatttgaacatgtggatattagggatgagattgaagtgaatatgggagttgaggtcaatatttgggatttgtgggaggagttttatttatttcattgatttgttgttttatttttcaaccttgaaaatcacatgttgacaagcgatttttttccttgttggtgtcgtttgttggtcaacagtagtcagattttttcttgttcaaag

SEQ ID NO: 21926 - DNA, 670 bp, Glycine max
  Intron number 2 from transcript Glyma06g16600.2 (locus Gly ma06g16600) derived from phytozome v7.0 (chr-ID Gm06; pos 12981998 to 12982667 reverse strand)
gcgttgtgttggatcttcaagaagtcgtcaattcagtaagtgtcttttaacacacacactgtgtgaaaatggttactgtagccagccactagtcgaacttgattgaaatttgaaactttagggtgtgtttgctttatcttttttcaaaatctgttttaagttttcattatgcaaggaaacaaggttgctgagacaactagtagaggatagtacaaggcacagagactcagaccagagtgtgaacttgagggagaagttgaacaagatgaaaacagaagacaaatatgaggaaacatctagctatttctgttcttaagtttttaaaatgcttgttttggaaaaaatttccaaaagttaatagattttgaatgagagaagttgattgatgaatagtgtggaattgttttagaaaactatttttttaaaccaaaaattgagaagagaatcaaacagacccttaacctttcgtattccaacccatgttttcttgtacaatttgcccgatgatccttatacaggatcatatatgaagaatagtttagtttctattaacagtgaatgtactagtttgagtagatagattagtcggtcaataaaaaaaatcccgaggagagaaatgaattatttattaaattaatactgctaggtttgttcttttatttcttcaggc

SEQ ID NO: 21927 - DNA, 809 bp, Glycine max
  Intron number 1 from transcript Glyma08g38240.1 (locus Gly ma08g38240) derived from phytozome v7.0 (chr-ID Gm08; pos 37179699 to 37180507 reverse strand)
gagtgatagttagtgagtaccgagttagggtttcaaattcaactcactgagtcaatcttacattttaatctcctttttatccttctccctttaaccggagaaaactctgcttcgatccctcctttcattatttttcgattttccagcaaattttttacgtattccggtggcactaggagaacacaaatcgattcattgatcacatgattcggttttaacttcaaaagtctttactgaaattttctacttgctatattggctttgaattgattcagtcctttacggttttatttctggcttttgcagaaaaataaagataaaatttattggtttggtgttctaataataaactttcttgtgcattttttagcgtcttatgaaaacgtcatatgcctgaaccctgaagagaatatttttttgctgtattgatgaaattgttttagtgaattctgcaaaaatataagttttttttcttcatatatttcaattttggaaaatagaccagtgattttaatctagacttaagcacaattgattaacttgtaccttttggaattgaatcgattttgatatttgaggaaagacatttcatttttttttactgcacttgttgaatcttgtttttcctttctcaaagacttgatttaattaattctttcttattttctgtagtaacagggtttgttttgttttgttgggttgaattgatctcttttcctttttgatttttgaattaatcattttcctaatgtagtggtgtcactgcactggcaggaaccactcgccatttcgactcttgttggtgttct

SEQ ID NO: 21928 - DNA, 614 bp, Glycine max
  Intron number 2 from transcript Glyma05g21280.1 (locus Gly ma05g21280) derived from phytozome v7.0 (chr-ID Gm05; pos 25868816 to 25869429 reverse strand)
tttaacctcgcgcatatcggtgagctactggtccaactcgcacacttgctgaattagtaaattttgtaggttcgagttgttagaaaataaaataaaatgaaagaaataaatgggaagaagatgcaaagccttggacaaaataaaagaacaatagtagcaatacaacttcagaaaatgacaaaatatggattaacaatgcaatataacatatgataagtccaaaggaaaataattttaaaggagaagttttaaattgctggattgaagtgtgcaaacactatccttagagaaaaaacactctcactgcactggtaggagaatctgattgcgctcgtctctcaagataagacaacccgttggttccgatcgtgtgcagcaaaaggattcccgaaccttctgaataccaatactctttctctcaaaaagtaattttttataagaacaggaagagaagaaatttagaggaaaatgcaaaaatatttttctggtgtctattggctaaaggagagagatatatataggtataaaacaaatatttactaacatgagttaatgagtttgatttgcttgtgtgaatggtttctgcagccgaagagtatttcaccagccggtcg

SEQ ID NO: 21929 - DNA, 723 bp, Glycine max
  Intron number 3 from transcript Glyma06g21290.1 (locus Gly ma06g21290) derived from phytozome v7.0 (chr-ID Gm06; pos 17839464 to 17840186 reverse strand)
gatttgtgagtttctattcctttgattcactgactttgaccgagtttggttttgtgtagtttctcatttcctgttttctcacacaaattttgaaaatatcactttttttttaaatttataatgtgtttcctgtatttatggaacaacaacaataaagccttattccactaggtggttaggtgaggttggctatgtttcttgtgtttaaaaacaagtctaattttgatacaccactagcataaagagttttacactgccaactgtttataaatcatcttagatatgatttttaaaataattattataaaagtgaataatcttcaattttatagctatctgtgattggatgatagacgctgactgtattctaattaaaatctttgaagatttgtattcattcctgttaatttctatgaagatttgtttaacaaatgataagactgaccaatatgtcgtttccctgaattttatacaatctttgaaaataaagtgacttggatgtaatcacatgtaaacattaaaaatgaaaataaaatatttttctctccaactaaaaagctctactgttactattgtctgaatttatacttgagtgatgtaacatgaaaagattgaagatgaaaataaaaaatgttctctccaaccaaagtgctctaatccttgtcactattatctgaatttattcttggatgatgatgttacagcttagcttgcttactgaaa

SEQ ID NO: 21930 - DNA, 560 bp, Glycine max
  Intron number 2 from transcript Glyma08g29040.1 (locus Gly ma08g29040) derived from phytozome v7.0 (chr-ID Gm08; pos 23436981 to 23437540)
agtgcaaagagtgccccaccagaagtagccttggtgtatgcttctcatccttttgagtttagactacctttactaccttcgtcacctgctcaatttgcttgcttaggtttattttgtgtttttttgtgtgagcattcgaaattaggatgggttagaagaacatgtttttaaaatctatgcattgtgtagagagtttttacattattaataaccgatcggaaatcattctagggatgactttcaagatagttttttgtaaaagtcaacaaaattaccttacatcggagtttctgatttgttgagagtatataagagtctgtttggatacagtgcttttgagagcttctctactggaggctctatatttccaatagagaagttctcaaaagtacttctagcttgtatccaaacaggcccgaaatcctttacactgtcagggtgtgtactatggtagaccatggtttgcaagacaattttcacatggctgaatcatgtacagcctcctcatgtcgatattgatgtatttattcatttgaatttctttttctcttgtatcaaag

SEQ ID NO: 21931 - DNA, 690 bp, Glycine max
  Intron number 3 from transcript Glyma06g30030.2 (locus Gly ma06g30030) derived from phytozome v7.0 (chr-ID Gm06; pos 28814762 to 28815451 reverse strand)
tcattgattttattgctacactccctctacctcaggtgtgttgttctagtgtggcattgtttgatcttttacattgttgattttgatttgtgcaataaaaatggagatgaagttaattgagaaaaatatttagctgaaaaattatctttagggaaaatggataagtttctctattcattgtaaatttctgattttgtgcatagtaatattatccactatattacattgatgtaataaataaagctaaccatattggttagtcccttatccattctggaccaacatccagaactgaagtcatgaatcaactaagcatgtttgcctataaaaagcttctcacttgatcttccatcacttgacctcttaggtggcctacaaaatgtaatagcattattgcactaatgctggctttggcttatgacctgatgaacttttgcaagctaagatctaggttcttattttattgtttaaagtgaggcgtacatacacacctctacaatgaaatttggtggaaagagtctaaaacatggtaaactaagatgatatgtccaatttgaggccggtatgtgatcattttctatttctacatgctttacttatataaacagaacagtttagttggtttaaattttagaagcctttttgcaggtgagccatattagtagctgactgaacttttttctgtttcag

SEQ ID NO: 21932 - DNA, 874 bp, Glycine max
  Intron number 1 from transcript Glyma08g40510.1 (locus Gly ma08g40510) derived from phytozome v7.0 (chr-ID Gm08; pos 40246905 to 40247778)
gcaataactgaagtttcaggtttgtggctgcatgctaacgttgatacaaattttgttaggtttttgtcatttaaatttattttatttgctttattctttaatgttttttttcaatccttacatagttacatttataaaaaaaaatacatactcgttaataaggactacaagctttcattaaaaaaataaggactacaagcaaaaaatataatgtttttaccaacaacaggtgattgatcttttggttttgtgttattgatctaagtagtgatagacttaggtcctttaagtaatcagtagtttgattaatcgatcttcttcaagagaccactcaacttctacttttaagtaccttcaaatcacctaaagaagattagtctcactaaaagaccaatttgcaatcacacgcgtatataaaaaaaaaaaagaaaaaatatattttatttttatttttaagcactgattaaaatttaaatatgggttaatttcaattaacataacacaaaaaacatatataatctattttattgtgtataaaacgggtatagttacacacatatatcattacttaaacatagatcggtttgggaaaatctaagcttgacattcatacaatcaagacattccctctggaatgtgagaaatgaaaaactattcatgaattgtatatatgtcggtgttgcctaagttttcagggactcttcatatactaaattctgttacttgctagtttattagtctttatgactaattattttcatcctttattttgtattatatatttttctcagactatgtctacattaaaaaccaaattttactatatcaccaaaatattatgtatgtttaacttctgttcttttacaattaggga

SEQ ID NO: 21933 - DNA, 372 bp, Glycine max
  Intron number 1 from transcript Glyma06g13100.1 (locus Gly ma06g13100) derived from phytozome v7.0 (chr-ID Gm06; pos 10236054 to 10236425)
tctctttcgattcatttgcttctcgctgatcaaaggtactcttccctgctaacttccctcttttttcttccaacatgtgttcatttgattccacaacttatgtttcatcatgtcatgtcgtggcaaaattaaagcaatatatttttacttgtccatataatatttttatttcggaattaatattgtagctatatttatgatcaatcatgatgcttagtgtttgataattctgtgaaactattagttgtgcagttgtatcagcatgtgcccagatgttataattaatgttttgttttgatgttgaaggacattggcattgaaaatttgtcattttttttttctttctaaaagctgtttattaggtaacttggt

SEQ ID NO: 21934 - DNA, 623 bp, Glycine max
  Intron number 2 from transcript Glyma05g08200.1 (locus Gly ma05g08200) derived from phytozome v7.0 (chr-ID Gm05; pos 8171659 to 8172281 reverse strand)
ttacgtgccgcaactgcttctgctgatttctcaacgtatgtcattgcttttttcttttcgatcctaagctcactcaccgtcctatgtgtaattggtgttgctacttggtgatttagctcacactgacctatcacctgcctttgcagaaagagactgtgaagttgattcaaacggcaatgggattcatcccatttatttgagttcatgctactgtgtttacttgtaaacttgtttccatgcttgtttgttctctcttgcacaccttttttgttggccctgttcgtgctattaactttatagcttattatttacatttggcacatgatcataggttatggcagttttgttgaagtattcttgtgttgatcagttttcagtagtattggcagctagattctccgagcaacatatctgacgcttgcattagcttttgcttttcagctttcagtagtgtacattagagtcactcttctcttggcctttgtttctgcattgcttgttacaacatacaagtagcatgatcaattcggcaattaatgcaatgcattatattatcaaggttatacttcattgattaaaagcttacaagtttatctttggtttaatgtgcaggaaagtttggg

SEQ ID NO: 21935 - DNA, 381 bp, Glycine max
  Intron number 1 from transcript Glyma05g08200.1 (locus Gly ma05g08200) derived from phytozome v7.0 (chr-ID Gm05; pos 8172372 to 8172752 reverse strand)
ggtttttcctcatcagtgccagcaagggtacttttactgtttcagctttaaattcggaacaatcattgtccttttgtctttttatggatctgaaattattctggatttgttttggtgcctgctcctcagattttgattcctgaatgcgtatcgatgtgtcagtggatgacataagattgcttactgtcatttttagctctcaaaaaatggaaaaaaagaataaacattttagggtattattactgctactgtgagacgcagttaaatcatgtgtttatgcactgagtgtcttagcttgttgcattgtttttttttatgtatgagtctagtggaagatttgatggatggtgggtttttgcttggttttcagattcgagtcct

SEQ ID NO: 21936 - DNA, 557 bp, Glycine max
  Intron number 2 from transcript Glyma05g30700.1 (locus Gly ma05g30700) derived from phytozome v7.0 (chr-ID Gm05; pos 36009223 to 36009779 reverse strand)
tgcttagaattgctacatttttactacaagtccgagtaaaacctttatatatacttctaacgtttcttttaaccagacctttatacttcagcagatctttgaacttggcatgagctttaaatccaagccatagaatatagttaaacaagttcagctgaaatgaagtggcctaagaaaagctgctacgaaaagagactactgtctctcatttttattgttcttcctgatcatgcatgcatgaatcagcagagcatcccttgattcatttaataatatgagtagcagtaaacacgttatcaacctctgatatgtccaaactagtccaagagtgcaatgcaataaggttggtatgagaaaatatttggatgaagcttacagtagattgctttattttactttttttcttttctcatagtgcaacaagaccagcatgagaaaattcttattggttgtttcactccccaaaatttccattcttacggttattactcacagaagaacaccttattttgtcaaataatgaaataattttgcacaggttaccactgctctttcac

SEQ ID NO: 21937 - DNA, 1007 bp, Glycine max
  Intron number 1 from transcript Glyma06g08590.1 (locus Gly ma06g08590) derived from phytozome v7.0 (chr-ID Gm06; pos 6268860 to 6269866)
tctcatcgatcgccctcaccgtcgcaaccgtcagggtcagttcccaaatcaacttttctttctttttctttatctgaatgattcacaatttcaatattgggctcatctacggaagcaagtacataacaattgccgcctttatctcgcaacatgcattagacaaataggaaatttcgcgtgttttggttttacctcacagcatgccttcaaatgtttgaacgcgcacttcgctttgctctcattaacaatagagatccaatgccgttgagttttgtcctatttggcgtacaattatgcaatctacagtgcttgtgtgttatgacttaagtagttgagttctgtataccgagccagagggtgacttggcatagtttctcgcggattcatcaactttgcgttatctcttccatttcagaaacttgtttctggaatgaggaaaggagctatgttaactacattgagttggtgcattagctttatatatatatatatatatatatatatatatattaacctcaaatgtgctcttgatattgttctccaatcagaattggagtttcatttcagttgatctatgttgacgtttaatgcaaacttttattacatagagcatgtttggtttgtagttgaaattgttgcgacgcgtgttccaattcagatccaacggattaaagcaaaatgaaaacaaaaacaagggtcctatcctttggcagaatgaattttgccccaaaagtcattttgcacttgatttccaaccatgcacgtagattaccgatgtgaaactctgattttgattgaaaagtatctagggaactgcatccaagttttaccgatgtgaaactctgattttgattgaaaagtatctagggaactgcatccaagttttgtctttattgatatcccaattctcttctgtctacatggttgattattttttacctcgagtactgacctaatgtttaatttaaccaggaagagtgaagtctccgatctgaaatcgcagctcc

SEQ ID NO: 21938 - DNA, 611 bp, Glycine max
  Intron number 2 from transcript Glyma08g23660.1 (locus Gly ma08g23660) derived from phytozome v7.0 (chr-ID Gm08; pos 18032304 to 18032914)
gcgggatctacctcctttgccggtacctaggtttgtttccttctttatgttgttgcttcagggactgctgaagctattttatgttgatctcccttagtttacatgatgattgttgtattttgtagctttgtgtttcattgctatgggggatcctattatgtaagccgatgggttattcatcatttatttgcattagtgcttttaaatgattcactaacctattgctgcaatatgtatggtttggctgatttatgttccttgtactttttatgggtatatctagtacccattcttaatgatatatatatatacttgatttgccgataaaaaataaatcatgttaaaagaaattgcaatgggtagaagaaaatgatgtgccctgtagttgttagcattaaacataaacaacagattcaaagggaaggggaaggatctggtcaaactcacttattcccaccttctttcttggatgctggcttcactctctgcctttgttgcttttggatgctcactgtttttggctctaagaaaatcatgtatgtaatttgtcttccctgtatcatggttttgggggaaggttatgacaagtgacaatattattatattcagat

SEQ ID NO: 21939 - DNA, 623 bp, Glycine max
  Intron number 1 from transcript Glyma06g18180.1 (locus Gly ma06g18180) derived from phytozome v7.0 (chr-ID Gm06; pos 14521050 to 14521672)
gattccactgctggggttcttaggtatgttattatatccatatatttatattcactttgattctaatttttatttctttattttcaatcacatttataagattttaaattgcgattacaatcatagttgcatctctattgcatttcttgatattacagaaaattgtaaacaaatgtgaccaatgataccacaatttgtcacaaacactcaaaaatcttgacattattgtcaaaattgtcattgcacatcatttgttaaaacctttcatatctattagtttctctttctttcattatattttttttatctctcctaatttttcatatttacaatgttttaaattatagtcagcacttacattttcattgtgtttcttaatgttgtgggaaattacaaataaatgtggctgatgcagtcacaaatataattgcaaatactccaaaaatctttacattgtatttcacaaactgttttttaaaaccttttatatctatcattttcttgctcttcctttatattatttttttgtgtatatctcctaattccaccttacaattggggtgtatgtttacctttttctcttttcagctttagaggtttcaacaaaagggaagtttgggtgg

SEQ ID NO: 21940 - DNA, 691 bp, Glycine max
  Intron number 2 from transcript Glyma08g08730.1 (locus Gly ma08g08730) derived from phytozome v7.0 (chr-ID Gm08; pos 6237602 to 6238292)
gtggtttcggggccgatcacgccggggcaggttcgtcattatcgccactgttgtgattcttcgattcggtggcgaaaattcgaaaatgcgtgttttagtgaatggaattggtttcagttcgtgtgtggtagttctgagtgttgattttcgtgatctgcttgcatgttgtggtgttgtttgcaatttgcatctgattcttcgcaagtagtgagattgttcaatctggatgtggatggtgtgtggaagtaaagggaattcgttttttgagttggaatatgagcaattgtgtgagttgagttgctgaatctgttgtttttgttatctgaagcagtttatatgtttgggagaaaaccgtttttcagtttaacttgaatgacagtaagatttgtgaatgttacgtgcaaggaaactgctatgctgtcactcaaattttagcatgttgacgtggggagtaagaaaataaatagtactatatagtttccgtttgtttcaatgttgtttgttgaagaatggttttgttgttaatgactcaattttgttacattatactgggatgggcttcttttttctgcttttgattattgttgtgaattaaaatatttatgctattttttgagaggtcagttttctgatggagctttgctttatgtctccaggtgtctttcttgctgggggttattccagtttttgt

SEQ ID NO: 21941 - DNA, 826 bp, Glycine max
  Intron number 3 from transcript Glyma08g08730.1 (locus Gly ma08g08730) derived from phytozome v7.0 (chr-ID Gm08; pos 6238315 to 6239140)
ttggagtacaagaaaccctcatctcctcccaaagtgtaagtgtctttcattgtcactataaagcaaattatattgacttcaactgcttgggtttttatcaagtgttaatggtggaatatgtatatctagaattagtttcctctcttctatttgaccatttcttcctgtaattgtttagacgtagttaaggagggtgatagtgatggagaaggtaagtagataactatgacattatagaaatcttgtgacgacacttgatgatattataataatgatgtaatcttcattggtaaagggaaaatctttaaaataagtattatgtatggtatttggggatcaatagtgcttcagaaatcaagtagcagcattaaatcatcaaacaacaccccactttacttgcagatctgaaactacaccgggacctttattgtgaacatttgacagtacataaatcagtgaatggatacttcatatttatatatttaataaaataattagatgctgcctctaaactctaaagctttgaactgtttggactttggatcccccagtgtttgtggtacatgcatgaacacttaatgtctcatgtggatttgattcaactacttgtgttgggcaaaaaaaactactattgagaatttggtactggaaaattgcattttgaacataaacacctactaatatggatggtatctttccatcttgaatttcctactccaaagtttagttttttttttttttttaacatatggaaagcataaatttatttatctgcaaatgttttcagacactttataaattttctttgttgactacagtcattcag

SEQ ID NO: 21942 - DNA, 733 bp, Glycine max
  Intron number 1 from transcript Glyma08g10700.1 (locus Gly ma08g10700) derived from phytozome v7.0 (chr-ID Gm08; pos 7781112 to 7781844 reverse strand)
cattcctaggatttctacacctcgacgaatcctaggtactcttgttcgtttcattaggtttacgttagcatccacgaaaatctgtttttttttttttttttttgtgtatgtttacaaatgagaaatgtattttcattattatcgttatcgttcgttccgtctctgattcttttttcttttttttaattatccgcttttgctttagttgtgaagttgaaattgttttctctatcatggttctgctttccatggttgaggattttaatctttaagcgaattagggtatttgggtgggtcagtttaggcaggtctgtggagaacctgaattgatgaattataaaatcagaacaatacctttgttttgtactgattataacaaaagtgctttttagctgagcagaagtaaatgtatattttatgtggaaaaatttggcatttctattttgtgttgtgtgattgtgagtgagtatgagaacagcagctagtgtaccaaatgttccatagtttacgcagtgttgtgttgttgttcctctttcaatttaggccttgtttgaatttgtaaaaacttacatacgagaagaaaataagaagataaaacgaattaaacttaaacttctcccataagtttgaaatcaaattgtgtacttcaatttttatagaacttatctcatccaacttacttggtggctattgtcatacaatttctgtcaggtacttcagaaattttgaatga

SEQ ID NO: 21943 - DNA, 1025 bp, Glycine max
  Intron number 5 from transcript Glyma05g08740.2 (locus Gly ma05g08740) derived from phytozome v7.0 (chr-ID Gm05; pos 8624182 to 8625206)
aagataaactacttgaagaacttctcacatacaaggtgagttaatgttttcataagtcttgagcattgttgtgacctttgtctctttgagctattattgaattataatgaatttctcttccgtagttgtcttgcctcatgttttcgaaattaataaagagtttcatttccatattgtgaagttgttagcatcttacaatctacacaatgaattgtgaatcttgttggttttcattggtagttaatttttttgggccatcctgtctaatctggagagggtgagccttgtagcaagggtaaggttgctatcttgtgacttggaagccacaagttcaaattttgaaaacagtctctccacgtgcaagggtaaggttgcatacatctacacatagcagtcaataatgcactatagcggattggtggaactgagtggccatggactgctatgggattcaaatagcataatggtttttatcagtggccaaaatagtggcttttcatgtgctatggcactatagcggcgctaccatgatatatccttcaaaaacccatttttacccctggaactctgttgtttggggtatttttaggtaaaatattccacaaaaagttacctctgttttgacctttgatccttcacactttatacgactgttttttcacgtgttcttttcttcttttagactgcccatatcacatttttctaatttttatctaatttgctatacacttttctatttttgtcatcatcttttttttatatatatatatttcccgacaatgttcttaattctcttagattgtgtgtgtaatttgtgacttgttattcatcttgaattcctttaattttggtacctttcattttgattcttttgttctactgacatatttttagatttctttctgatatctttaatataccatttgcatattataagtttttgactattatgttacaattgtcttgatatttttgttttcatatttgcaggctctagaaagttcttcccgtccacagcagcgaat

SEQ ID NO: 21944 - DNA, 867 bp, Glycine max
  Intron number 2 from transcript Glyma06g43930.1 (locus Gly ma06g43930) derived from phytozome v7.0 (chr-ID Gm06; pos 46908591 to 46909457)
acagtacttttgcttacacgcactcttttttttgggggggcttttttgggggtagaaattaatgcgtagcgatgaaatgcttgtggggtgtgaatgaagctgcaccctttggttgagttgaggttaaagtttggttctttggagaatccacaagatggctttgtgaggccctatttaaattgtctttgatgtctcacttttgttcttcatgtgcccatatggaaataatctggtttggttttattgtgtgcaacatatcaatgattaagggcgtgtttggataaacagcttaaatgagcatttatttaggaccagtttgtttaaacataaaaaagcagtttgtttaagcttattttttaaaacaagtgtttttttaaacaaaatatgcagttttatgagtttccgatgtgtttgtctaaactacttttattttttttacctaaaataagcacttttctgctttttttaagaagcaaatcctaccagcttcttaaataagcacttatataagaaacagttttttttaagtttaaacaaactggcttataggattcgcatcttaaaaaaaagcagaaaattgcttattttattaatttcttttttaagtttaagcaaatggacccttaatcatagcttaatttgtgaaaatttttgttgcttaattcaataagcttcactgtttaacgaatcagctttaattttctgcggaaatatcaagataaattcaaaaaagctcatggaaactcttcgaaatgcccctaatggttatcctgatgaatggccaatgctataagtggggaattcatggcagagtatgcaaataatcatgatattgcattggatgttgcaggagtgttttacctttac

SEQ ID NO: 21945 - DNA, 816 bp, Glycine max
  Intron number 1 from transcript Glyma05g17460.1 (locus Gly ma05g17460) derived from phytozome v7.0 (chr-ID Gm05; pos 20186184 to 20186999)
aacaagtcaagggtaagttttaactcctttttatttctttgatgtatgatggtttgacttgttcttcttttagatgatgtcattatggctcatcaatctttcataacttcatccgttatctctttcctgtgcaatattttgtcgtgaactactagctaatgtcaaccacgtgttaatgttgaaagaaaagtagtaacagaaacagatgccaaaaacattattcaaagttgcaaacatggcatgcaagtattatgtcttgaaaatttgttggtaatggcttgtgaaatgttttaaatccacatttctgaaggtagagggagcagcttagggcaaagttcaagcttaaggctgtgtgcatgtttagttttgctcattttttagaagttatcacttctgtcaactttatgatgccttttttgaaaaaggaaaagagctattatttcccttagattgttccaaacattgtctagttatccttttagaagttaatatgtgaactaaagcttttattgtagtccaaatttcataataagggcatagccttggcatctattctccgtaaatgatgctttaacaaattaaagaagcattttcttttgacctgtattatttgtttttctgttcagtgttcatttagcagaatgttatctgtaataataattaataaattattctgttgcaatatatgctcacaatcaaatgaaaatctgatacataatgcattctaaatagtataagacatcaaatagtctgtgcttacagatccctttggtttacctaggtaaatttagtgaaaatattatatttgtcactttc

SEQ ID NO: 21946 - DNA, 923 bp, Glycine max
  Intron number 1 from transcript Glyma07g18210.1 (locus Gly ma07g18210) derived from phytozome v7.0 (chr-ID Gm07; pos 17978763 to 17979685 reverse strand)
ctcgcaaggtatgctacctttcatttctccttaaaactttgaacttttaaacctctcttactgtctcatactcattatggtttcaatctgtgaatcaaactgtgaacgactatgtctattgactatagagttgtgatgtatgtgtgtgagtaaatttttaaattgtataagtttttttctttgtaactagagagattggtattgtatattcaaatcataactcatcaacactaaaaactagtattttagttgagattagtacttgccgaaaagaaggtagattcatgaatttgaatgaaatatgtagtatttacagagtatttggttggggaaaatcaaattatacttttaatgtcgaattgggatcaactagaacagaaataaaagctttgggtggaagtcttcttagatatcaaaataatagctatgaattgttgtacactctcttggtaaagggtagatgagtagaattgaggctaagggtggcttacaaacactcttctggcaataattggataatacgaaaatatgctagataatgcaacttgttttcaagtggaagaaatattaaaatgaaagataaacctaaattgtcgaggaatatttttctgccaacaaatcaccttattgaggaaagtttgtggtaatgatggtcctacttggtttctactctctaccaatctttctttttccagtacaaggcaatggtattagaacaatatcttactgtttcaaatagactaatatgaaagcattgcacataaaatgccttaacttttttaaattttcggccagtaattgaatgagataattacctttatatatgcctttatgggatgcattatgatagtcaatgagtttaacttattacactttgacatgacataggcggatataattctgcgaggatactctggttggaa

SEQ ID NO: 21947 - DNA, 917 bp, Glycine max
  Intron number 2 from transcript Glyma06g23060.1 (locus Gly ma06g23060) derived from phytozome v7.0 (chr-ID Gm06; pos 20087170 to 20088086)
tactttacagaagctagctctggcttcaagctcaggtaataccatactcacggtttcactttttcatgtgcttgcatagcttgcttgtgatgcaaatgtggacaaagtcagtttgtttgtactttgtacgtagctcaactaagcaaggctcaatcttcaggatgggttctaatgatgtcagatgtttgatcctttatcaaagaaaaacatgaaaaatgcaacacctattctatttctgtctagtctaggctgagtgagtttgggtaaaaatttgcaaaaactattttttgaatgaaattttaagtgattttatgttaaaaaaaaataatggattaactaaatttttaattaaatttgatttttagaccataaatatttgtttgacaggttaaaatctcaactttttttcattacggtttttaatttctaaatttttgtttgactatgtaatgtccctaaagttttaaaaatgtaagtttctagtctataaattttttaaaaatttgatttttagttcttaaaatctcattaaatgaataaaaataatggattcaaatttttatttaggaactaaatttttttaaaaatttaatgactttgaccagtcaaacaaaagtttagagactaaaaattttaataaaaaaattgaagaacattgatcaattaaataaaaatttaggaattaaaattgaattttgaaaaagtttaaaaactaaaaagtgaattaatccaaaattaatttattaagggaaacttgaggtataaaattttggatcattaaagctgcatcaagtcaaagtcatttttttaaggtgagcaaaacatgtaattttgtatctaagaaaccaactatgcactaattataattgtggcacttgaattttgcagggatatccgtgaactactaaaaaacacag

SEQ ID NO: 21948 - DNA, 643 bp, Glycine max
  Intron number 1 from transcript Glyma05g35340.2 (locus Gly ma05g35340) derived from phytozome v7.0 (chr-ID Gm05; pos 39413932 to 39414574 reverse strand)
gagattttgttgattccatatcaggttcttgaattttaatattacaactattgttaatgctatttttaatattttataaaaaaatgttacttttaattaaaactagctttataaataattaccgtcaattttcaattatcaaaataatagttattaaaataaaatgccaattttgataaataaataaataaacaagaataacagtaattatgaaatgttgatgggggttgacattgatgaaagatctaaaacgaatttttatctcttctccataagtatgagtttgaatcctcttatcgtcatttattttgcttggtagacaatttttcttaaagagatcttgtgatgcctaagagataagttgagtagttaaattgaatgaaactactcatttgcaatggagttaaattgtgatttaggtttatgtagtaatcatctaggagtttaaaaatggtgtattttttttaataaatatatagtgtacggttaatcatttagatttcaaatatttttaaaaagtataatttatttggatttcttctaaatacaaaatagtcggatatatttctaacaaacttctttatgattatttgacttgaattaaaaaggaaggacatttgagactatagaccccagaaaagaa

SEQ ID NO: 21949 - DNA, 593 bp, Glycine max
  Intron number 2 from transcript Glyma08g11730.1 (locus Gly ma08g11730) derived from phytozome v7.0 (chr-ID Gm08; pos 8555936 to 8556528 reverse strand)
gcttgggattcggattcagaacttggggtatgttatttcttgtttctcttatatttttggtgaagggcgtgtttataagtggtattagaaagaggaagtgaatgtaatagattgaagatttttatgtgataatgatttgattaactctcttcacagaaattgatgacacaagagatttgccttattgctaaatatacgagagcagttagtaagccagtaaaatttctcaatggattatatattagatgatattttatgtggtggataaaaacttaatatatgtagtatcagtgttggaacctgttgttgctggatttatttgcttgataaatatagttgttccaatgttccatattgatatttgagtgcaattttcacatgtaaattttgtttgtgaagacaaaagatgtgcatggacagttcactatggcaatgtatattaatattaggtcacaacatccacctcccacaccttaaaacactcatagaggatagaaataattgcttttatcttgtcagggtgtttgttctttgttatctgtttggatttagataggctttattatccaaattactgattttatattcgcaga

SEQ ID NO: 21950 - DNA, 801 bp, Glycine max
  Intron number 1 from transcript Glyma08g21410.2 (locus Gly ma08g21410) derived from phytozome v7.0 (chr-ID Gm08; pos 16250002 to 16250802)
ggtacgtatgctcttaaatctttattttcctcagttttccatttttgcatgctaattactagtttgtttccttatttgtcacttattttcaactattttttgtattgatcgagtttcggtttggccctgtcaacaacatgtgtggcaattaaggttaattaatctgtcatgcatatattattatttgaaatctaacaattcgttgtggatctatatatgcgtgtgttcctttgttaacatttcagattatccaacccttctgacaacatgaagcaatgttaacaccatgaagaataatgcgcaattatatttgaaatctaacaagatatatagatgttaaccatccatctcaatttccaggagcatatagatgtacgtagggaagagaaattaaagacagagaaaatatataaaagaatagaaataagatgaaagaaaaagtaaagatataattatgattaacaattggataaaatggtattatgttccagtcttccagaccagccatattgtcatgattttgttagggaaagccttattgtcatgataagtatgaaaaaaatatatattattatttattaattaaatgttagaaaatataatagtgattttaatataattattagagaaatagaaaattcatcatatgtgacaggttttgattggataaaagtattgtaaactttcttattacaatgtacgggcatggactatttattcatatataagtgtaaagtgctttgaggatggtgttcattgactcaatatacgaataatttattgatagggtggaggaattta

SEQ ID NO: 21951 - DNA, 1019 bp, Glycine max
  Intron number 1 from transcript Glyma07g08590.1 (locus Gly ma07g08590) derived from phytozome v7.0 (chr-ID Gm07; pos 7157426 to 7158444 reverse strand)
aaggtaagtagcagtgaacatatatttctggaagctaaaagttatttttcttttatatatctgtggcttatatgctgtttaactgcattccgatatatttgcaaccacaatttcaaatgttccacaatgatagctgtcatatatattaacacttaaaagtcaatctgattatccattgtgaattaagtgatgataaattgatcacattcatagtctatgttcaatcatccaacaatgtttattgtttagtacagggtggagctagattagtagattgttttaattgggctggccaaggtttaaatttgtggtctgcaacggcacatgtaaaagcaatgttatgattttggaggttttcaaatcttatcacaatattaaggttttggaagtctccacaactacaactgtaataacaatttaaaaccttcggggtggccaaatagaaataccattaattgaaaaggtttagctaaaaaataatacttaaaaaaaatacatgtaaaatggagtgaataaaaaactttggaaacatattagagacatagattaatagtgttactagcattagttagttactcttataaccaattgtataacagtttactagcattagttatataaggctcaatgtattcatataaagatttgatttgctcatttgagcattatcctaaataatattcagtttttcttctctcttttcatctctataccttgaactttatcagaacacaactctgcctgggactatgcatatataaattgtgcatctttctttctcttctgagattatcatatgatttgataacatattttaatgtagccataaaagttgtttttaattttgttacttgaggctaaactattgggatattatttcttcttctcactacttgttaatgaacttgatgacacccacagtatataattattattttggattgatttattattgagtttttccttactttcttgtactactagttgtgactgcttcattagcttctgaagcattagcg

SEQ ID NO: 21952 - DNA, 898 bp, Glycine max
  Intron number 6 from transcript Glyma06g02740.1 (locus Gly ma06g02740) derived from phytozome v7.0 (chr-ID Gm06; pos 1846621 to 1847518)
ctcaagaactggaagaccaagttaatagtctaaaggttttgatcttgtttacttgtcagttggtgcagatgtattacataattcatgcttttagactgctttacatggttgctttgaattgtaagcatcacttagttttttacatatgacatatatgtgaaaaatgaaaacatactttgcttcttttgaaaccatgggttataggaatcttggacttcttcttgggcacattcctactcatccgattagacattgctccaaggaatctttggtttcaatatttatgtatggtcatacccatgtataaattatttgtaggtaattgtacacttaaggctgcttaggatgaagaaattgatcgaaataaaattcaagttgctggcagtaaagtgcaacttgaactactcaaggcattgttctagaagccaaaagaaaaattctgggcacataggcatctaaaaggatcacttgtttgcgtggatatctgtgttttgtagaaacttaagcttgacatgttttcgaatagctcaagtgtatcttacataatatatgttatgatgccttttaatttagcttcttggacgaggcaaaatctaaatgtgacatgattccatgacttatggtactatttaaatatagaccaggtataaactgtatattatggaaggaatcaaggaatataggtctcgccacttctgccttgtattttatatacttatgcagatattatagcaagcttctttcgtgagcttttgactgatgtaactgattatcatttttagtttaaaatgcttgttggtcgtaggattttagctccatctttgtatactgcagtatgctagtgatttggtccaaatctgacagtttggttctatacaggcagaagttgatagtctat

SEQ ID NO: 21953 - DNA, 718 bp, Glycine max
  Intron number 3 from transcript Glyma08g39470.1 (locus Gly ma08g39470) derived from phytozome v7.0 (chr-ID Gm08; pos 39004548 to 39005265)
gcttacccaggtggtaatttcaatggattaaagtatcagatattttactggttgttcttttttcttttttctctcacgttggcttcctgatattgcttgaaacaaaccaacattttagtatttactgaagtttgaatcttgtcccatgtagataacctgtttgatccaaatactaaatgactatgttacattactcttttgagtgattcttttgttttcagctgataaaaatttaatgcaatgaaagggatttttttttcctcttgttctttttataaaggtgtcacatacttactctccattctagcatgaaactccccatttgttgctagaaacttccttacatctattaagtgcttgtaacggcatcaactagtacctcctttggttcgttgatggctattgcaaatgattttcttcccttattctgattaactagctatgacttttgagttaattttaatacatggacatccagaatcagtggcaaccctgataaaatttcaggctgaaacaatcaccttcccaaagtaactaatcggttacataaaaaatgtatattgcacaatagttgtcaattcgtcatggacacagcacgatatttgacattttaactgggactattaatggtagctcaccatgtttaataagatcataaactaaatttctcacttttttgacaggattcaattggaacccaagttttgatccctattgt

SEQ ID NO: 21954 - DNA, 935 bp, Glycine max
  Intron number 1 from transcript Glyma05g30150.1 (locus Gly ma05g30150) derived from phytozome v7.0 (chr-ID Gm05; pos 35580447 to 35581381)
ggtcaaagagtattcccaatttcttcacgctctcatttttttttatcagtttgcatcttatgttttagggattcaatatcgcgtaaaattgtcttgtttataacgaggctcaatttatagtcatagttccattattttgttgtgtttcaattactcatacaagagtaataatacgaaaatattgtttaacaaataattagaattcatgaacaagtttttattaaaaattaaagcagtgcacatatatattagagtaagaaatttttcctcgtgaatttgtaccaattcaaacagagatttgttgttaattaataaattaaataactaaaaaagttaaggaataaaacacaaatcaatcagtaattcgcgtgcattagttttctttgttaagtgttagtttgttggtttttcgtcgggaggagcgatcaaacgtgaccttttactccttcccttctttcttaaccacccaaccagccttatatctactctgttattgttaattactgtgcttatcgaattagctttgagaatttggttggttttgatgtttagatggaggagtatggaggggaaggagggggagtgccactttttcatttatattaagctttctcagtaatttagtttttttttttttttttttgaatgagtggaatgaaatagtaatcagggattatcatgggaccttgctaccattcttattatttttataaacgttttacaattttctcggtttaggaatgtgaatgaatggatataatgtgtttaaggttagtctttccatgttgctgttagatggagagatcaggttataatgttttagctggcggccatgtgcagtttctgttattttcatatttcatttggttaagtgttatgctaataatcagatgctgccagggttccccaagatcttgtgacaacaggagggaagt

SEQ ID NO: 21955 - DNA, 607 bp, Glycine max
  Intron number 3 from transcript Glyma08g19070.1 (locus Gly ma08g19070) derived from phytozome v7.0 (chr-ID Gm08; pos 14385970 to 14386576 reverse strand)
tgctgttgctgctcgactggtcgactttgctattggtgagtttagtttacttgcttaccaagttatcattcattcaaaaatgctaattttctcgatatatattctcacatattagcctgcctattcaatgtaatcaacaatcaactcctctattttgtttggggcattgagattgcttgtgtttaaacctggaaagtggaaagtgtctttttgtttttgtttgtttgtgtgtgtgtattatttggtcttcttcaggggtaaaatcagttttaatttgctgaaacttcagctccatggttgtgacttgtggtgatctacccattttattttgatggttgcatgcataaatttcaggattgcagctttttgtttattattgtgatcttgtttgtgtattattgcagctttttgtttattattgtgatcttgtttgtgtattattgcagcatggcttgccatgcatagtctgtctctttctgatccatattagggttaatggacacttacaaattgcaattgtattgtgcttataaaaatcatttgctagaattttctctctcaagtatgtaaatgtggagagattttctgtaggtactgatactacggg

SEQ ID NO: 21956 - DNA, 427 bp, Glycine max
  Intron number 2 from transcript Glyma08g19070.1 (locus Gly ma08g19070) derived from phytozome v7.0 (chr-ID Gm08; pos 14386644 to 14387070 reverse strand)
aattctcttttgggtatgcaatacgtgtaacgtgtttgatttataggagaaaaatagaagattttttttttttgaattagtgtatagtataggaggtgtgggttccacagcataaattacaaaattttatttggtatattatttctctccttcttaccaaacacatcctaaaagtgcatgtttgatttgcagttggaaatattgtgacacatcttccaatgctaatccaatagataaaaacaaaataaaaacaaaagtaaggatcatgatccattggcaaaattgcttttgcaaggaaaatccaaacatgctctaagtgtttaatcatcttcattttcattaagattttagccttttgattctgaactcatttactttactcattgtgggtggttgtattgcaggatttctggtgagaacaagtttt

SEQ ID NO: 21957 - DNA, 772 bp, Glycine max
  Intron number 1 from transcript Glyma08g19480.1 (locus Gly ma08g19480) derived from phytozome v7.0 (chr-ID Gm08; pos 14722587 to 14723358)
gctttcattgctccacttgctttcattgttgaaaggttcttctttgcattatcattattattattattattattattattagccttctggtcttggcttggttttactttatggttattccaatgttaaatatttattaaattagattaatcagttgtcaaattaaaatttcaatgtaacggctgataaaattttaagttttctttagattgatagaatccttgtagattcaacatgtttaattccttaatttaacttgttcatcttttgtatataatactaccatttttttaatatcaataaagcaacttttacttcattattacttttttttgtgaaaaatgagaatcatacatatggagaatgatagaaacagaaagcatatatgattacttttttcagtcaaatagagattttcgagaatgattgttttgcttttacttgtagtttaaaagatttagaagtcttggtggatactgctatttgagcagacaaatttagtcatcccactaaagacgcatatatacatcggagttgagaagtttatttgtatgacatgtcctttcattttcatgactgtttgagataaattaagaagcaatagcaatagtagttaaattgtacctactcgaagtctagctcaaagaaattaagaagatgcttaaatgtcaaacatcataggaaaaaaaagaagagatttgggatgaagataaatatcaataaatagatgtggtgtttgttgacaatgatttgcaggaaaacgaggacaaag

SEQ ID NO: 21958 - DNA, 668 bp, Glycine max
  Intron number 2 from transcript Glyma08g41050.1 (locus Gly ma08g41050) derived from phytozome v7.0 (chr-ID Gm08; pos 41089338 to 41090005 reverse strand)
ggaagccgaagttctgcccatttaggctttccaatgtaagttgctatttgtatttcttctcctaaaattttgtattagcccatcaaaggacattaaactacatccttttttatttaaaaatttgtaccttttatacaaaacaatgttcataagaaatttctgacattaacagtttgctgatggaaagtgataaacacagcaacaattaggccgtttttataggcattaccacaaaaaacatgttaatagactaaaaccagtagttaaatatatagtccagtagtggactgtagtttaggaacatttgaatcatgtttgaacaatctgagatgccaaacagcctatatataacatgcaaattgtgcttgagaggaagaaaaggtcgaaagcatttcctttagatgcattgtgtcttcaatgttataatacagaacttctgtatattatattttgagtattaaacttaacttttgccaggaatacttaaaatgtgcttatttgcttgtttctgatttcagcccaatcaattcacatatcatttctatatatctgaagtattacatttttcaaataaatttgaaattaagaacaagaaaaatcagcatgtatgttttgttctacactattcaatgcttttggttttggtttcaggacgagtctctactctt

SEQ ID NO: 21959 - DNA, 967 bp, Glycine max
  Intron number 3 from transcript Glyma08g08750.1 (locus Gly ma08g08750) derived from phytozome v7.0 (chr-ID Gm08; pos 6259115 to 6260081 reverse strand)
ttactgaatagtaagttatactacctgcactgccacttgttactcttcttcttgttctgttattggattttttgtacatctgcctgtttctctgtaattctgtaaatgatgtgtctattgggtaaaaggacaattataaaatggaacagaatagggccagtcagttgcaagatttacaatcatgtattagggttttactcaagaggaaactcctttagattgctgtttggttttgcttgttaaactttctgggatggaattgttttatgaatgaatatggttctccctgctttttaaaatatccttctaactggagtttttatattgtcatatttcgatagtttatggttctgttttattttttccctcaactattttgaagaaagtgtttatatctctaatctctactttaaattggtgttgtgtaggagcaattactggttcaaagattgttgtatcttcattttccatttgtgttttcggaattccatttaaaaaaaaaaatagttttagcagttttgtcattatgaagttactgagaaatataaaggctgcaaatataatggtttaacctagactatgattgagctgcttttctttatcaatttcttatattatatttctgctcttgtggagcatacataaaccttatttagctgtcccagtgagctctttcttcttggtttaagaagcctgaaatatctggtgtaaatttgttggaggaactttgcagcctttctgattatcaacttaattatttgaagttgtactttcggaggacattttatagttgccatagcttttgtgtctggctctgcatgatttgtgttagcctttttgattgtctgatttgtatatttttgtatgcacatacatgcggatgcgttgggcatgtaataaattgatttttgtttgctatattcatacaacagtgagatcactgctgaagggagacggataaccaagc

SEQ ID NO: 21960 - DNA, 836 bp, Glycine max
  Intron number 4 from transcript Glyma06g10050.1 (locus Gly ma06g10050) derived from phytozome v7.0 (chr-ID Gm06; pos 7581391 to 7582226 reverse strand)
ccacttgtgaaagtggctgctgtttctttgtcaaggtccttccctctatttctctccttgtagttgagagaagtttcaccaaattcattgatatgcatatcaaggtttatatgttgttccagttttcctgattggggccttcgtaacattgcaaaaaacaattagtttgatgggtgtgtaccttttacttttgactggacttcctctgcactgataactctaggtcatgcaactaatgttacaagaataaacaatcatttctattccatatgtattttctgcagttattttactgtgtatgttactggttgtaaagttagaaagtaattatgattaagaggtatgactatattcttccaaaatggactttctgtgatatgttggacaccaattttttctttgatatgttgacaattttactcctcttcaagccattgcatgtgatttgcttgctagtacacactgcagctgtatggttgcatcctctcatttttccttctttatatctctttcatattttgttgatatttttgtgatgggcatctaaagtactgacttctgattcccctttttgggagtggtggtggagcagtgggtaggaatagggaatcaaccaaaccccatcgagactctaaattaattagaaatgaacttagaaaacaaacccattgcatggtattatgatatttgtaggcatgaagttttatcatcataaatcatgtcttctggtgctaaattttgttattgttgttcatatccttcctttttcatctatctattgctgaatacaatctctattgatttatttatttttgaaaatcaatgtaggtcatata

SEQ ID NO: 21961 - DNA, 433 bp, Glycine max
  Intron number 2 from transcript Glyma06g04250.1 (locus Gly ma06g04250) derived from phytozome v7.0 (chr-ID Gm06; pos 2959711 to 2960143)
gcaaggctagggttgttccaattactctcgaccaggtccttttcattttcttcactctctcgctgtaatgctgcttttcttaaaggaaaataaattcgaatgtggatttcttcaacgataccttggctttagttagtgctctttgagttgatgcatatgttgttgtcaaattatatatattgataacattatctgctatactctcaacatattttgccaatggaacctgtattccatacctgtatctatcaaatgcctttggttgtgcttggtttctatcatattgagagtcatgtaggaattgggtaatctataatgaggggaggatgtgctactgactgcaactatatagtagatagtgtcttcagcttgttaattatggtgtttatcctgtaccttttacgtatgacgaattcttgtgctacaggtatac

SEQ ID NO: 21962 - DNA, 355 bp, Glycine max
  Intron number 2 from transcript Glyma06g14400.1 (locus Gly ma06g14400) derived from phytozome v7.0 (chr-ID Gm06; pos 11318260 to 11318614 reverse strand)
ctttctgagaaagttcaacgtacaaaggttaggtgacaactgtatgttatggaattctctttgctgtatgttctgtctagcaaacttgtaagggccatgttttattgctgttattgggatgaccaaatgagtatctgaggtttcacttttgaaaaataagttactagttttgttttgagttgacaatggtgtgatacattgtagatttcttataagaatcatgtgttttctctttagcattgattctaattttcctcttctttaatccttattcatgagaagggaaatgggtttgacagagagcttttctgtttttgcaggcactcattgagtgtcaaggtgactccatagatct

SEQ ID NO: 21963 - DNA, 463 bp, Glycine max
  Intron number 1 from transcript Glyma08g21560.1 (locus Gly ma08g21560) derived from phytozome v7.0 (chr-ID Gm08; pos 16394104 to 16394566)
gctagttaccagcaccggtcgccgaatccgaaaaggttaataatttctttgcttgcaaccccttctggcttcttagcttcttctaatgccgctgctaagtattcgttttagtttagtgttctaggttttttttttttttatattacctttgtttcggtttagccttttatttaggtaacaaattttgaatgtgtgaccattctatcttcatacctaccttagcttgagtttttcttctgtttttttttcttttatgctgtctatgcatttgactgacccttttttctttatacactaacccttttgcttcttaatgtatgacagtgacttcaatcctttccactaagggtgtgttttgacttcagagcaaacctaaagtggaaaaggggatttttattttttttttctttttcattttggccattcagttctctctggggacatttttgttctctctgcaact

SEQ ID NO: 21964 - DNA, 874 bp, Glycine max
  Intron number 1 from transcript Glyma06g09200.1 (locus Gly ma06g09200) derived from phytozome v7.0 (chr-ID Gm06; pos 6770970 to 6771843)
ccgaggtattttaattacattttttatgccaccggtttgggtttccaattttcattcttcaactttttttatgccgttcctctagcatcatcgttatcggctatacgagcgggatatgttcttttttgtgtttggaattagaagcctttggctacaattataagtttgtgaggttaataacgtttgtcttgttcaacaatgtttcttgtaatgtctttagtatttgatgttacttcgatgattccaactttgattgttcattgttggtcatggtgtttgtatgaaggtagtgagtagtcactggtattttgcgaaggttatggataaggttttaaattgcgggtatggtcgctgattcatcgcattccttgatattgctggaaattgcggacaaatgccactgaggtggccataattgcagttgcgttacagtcatagacatccccataacgggtaaatcacttttttggtccctgaaagtgttatgagctatcatatgcattcctaaaccaaggaaatgccaaataaatccctgaaattctcattatctaagtccctaaacttaaccacttattgtcatgtagttcctatgttaatattatcactaaagtcacatactcacatgtttcatgtagcagttgaactaatgtgattgatagattgtagttctagggacttcttttttttataaaaagaaattccttaatttcagggactaagttgatagcatctaacactttttagggatgaaataggtgatttattaagctgtggactggtttttaaaaccttggttataaaatatagagggtgtgccttagcgtgtcctgttaatgatttgaacttgccttgctcttgaaaacagattgagaaa

SEQ ID NO: 21965 - DNA, 230 bp, Glycine max
  Intron number 2 from transcript Glyma07g12160.2 (locus Gly ma07g12160) derived from phytozome v7.0 (chr-ID Gm07; pos 10435018 to 10435247 reverse strand)
ttttctggtttgactttatttgagctgaagcaaaggtgagtttttggatcagataattgcattttgctgtttcgtttcttctttctattttgcatattaattattgtgttttgaattgtgttggtttgttaggagaatgcaatggacttggataatttgtgaggatatttaaaatattgtacattcactacattgtgttcctgtaattattttcatcagttggtgttgtg

SEQ ID NO: 21966 - DNA, 571 bp, Glycine max
  Intron number 4 from transcript Glyma08g06690.1 (locus Gly ma08g06690) derived from phytozome v7.0 (chr-ID Gm08; pos 4804445 to 4805015)
gctagagactgctgagaagaagtgcactgatactggtgcgttttctctctcttttgagattttttagaataacttgggtggatatgttaatatgctattgaaaatataaatatcttaaaaaaactgtgtttagaagcttgcttgctatgatttgtgttgtatttattgtgttgagatttgagaaggagatgctatttgtgtattgttgtattatatgctgcgtggctagcaggtaggtgtttaggtgaagtagtttactcataagtagggatgttctttgacttcattcctcggtgtaataatagtctagtgattgtaattatttggtgattggtgatgtagaaagcttgttgaggttaatgtttttgtgttaagagctttgtagaagaaattgctctatttgaatgacccaatagtttttattttaaactatcttgttcgactctgttgtctctagatatccacatcgtatctattgtttttggtggacagttcaaaaaattcatgtcgaattcgatagaacaattattttattttatcaacatatttttgtgtttactcagggactgag

SEQ ID NO: 21967 - DNA, 392 bp, Glycine max
  Intron number 1 from transcript Glyma07g03980.1 (locus Gly ma07g03980) derived from phytozome v7.0 (chr-ID Gm07; pos 2816675 to 2817066)
agtgttttccgccgcttgagtcgctcgaacgagtactgtttcttcaattttcaatactttgcctgcttttcatttcattcaaattattgatgattatccatacaaaaaaaaattgcatgtgaagagttcaattcttttcaactgcatttcaagcactcttcagttttgaaatgccttcgtccaaacacatgctcttattattggaatctttttgaatgagaaatgctaacaacacaaaatggtgtgggtcccacaccttcacggttttgtagtcttaaaaataaattttaaccaataaagaaaaacagtctcctttttgaattttattgttatttttatttgtgttttttcttgtgtacagggagacttggtgacagaagaggaagtagtta

SEQ ID NO: 21968 - DNA, 963 bp, Glycine max
  Intron number 2 from transcript Glyma07g03980.1 (locus Gly ma07g03980) derived from phytozome v7.0 (chr-ID Gm07; pos 2817339 to 2818301)
ggtccttttctgctgaggttgatatcttccatgagcctttttctatctattttttccgtgctttatatgtctttcactgctgtgtgctttcataggtgatattcttatgctttcagtaggaagatggttattagcgttgattattattttaaaaaactaggagggcaaatgtgtcttttacacttgctttctttgtttcctgagtggtatagtgctactgctagatcttatttaatgacaggtctgcagatatttccttaaatgatataatagaactgtcataatagctattatgtgacaaatttatatttcaaaaacaaaataaaggtatatttgtgtgtggaactggatattaccgtattaatggcttaatttccatttctatatctcttgcttgtaccttttcataggaggatgtaacctattttttgcaatttaatcattctctttaacgatgaagaggatgtgcatgtgtagagatagtgtttatgttaatttgtattaattcttccattttgtcctatataaaaaagaatgttgtactcaccccccagcaaccccatttaatcattgtgaagaattagaaaattgtaaaaaagaaatatgaaaaggatataaatgttttccaattctgaatttccagcacaaggaaatgatacttctatatttttttaaaatttacattataattcactgtctgctctgaatctttgcttaattataaagaatatagtggtttgtgttatgttttgtggtattttgttatcatttatcttcttatctacacaaatggcatgtccttttcataatggatggtgttggtttcctgtcaaacttttcagtgttctgagcttttgtcaagttgtgctctagtttcctgtcaaaatttttaatagcactatgtgatcatctttgctgtttgatgcagttctatattaagctatttcaattttgctcctgctc

SEQ ID NO: 21969 - DNA, 837 bp, Glycine max
  Intron number 1 from transcript Glyma07g29660.1 (locus Gly ma07g29660) derived from phytozome v7.0 (chr-ID Gm07; pos 34658704 to 34659540 reverse strand)
ccgccgctgttgccgccgaagagatctctcgcaatgtgggtttccaaactacacaaaaatgcgccgtttaacatgaaattgggcttatctgaattattttttgatttgtgtgttaaatgtgttttcccctttttattattgctttcattgttttgcaataattttatcatgaaattgggcttatcggatttccgaaatatgttgcattaggtgttttcggtcaatgttttttttttaaaatgttactaatttagcggattgtccagttcgtcagtgtgagattatctagttctacaaagcatgtagattttattgttttataattttattttaatttgtttttgttggagattatataagggttatgcttggttggagtgaaaatggatttgtgggaaaaagattaatgctttatttttccaataaattctatcttgattgcttaaaatagataatattgaatgaaaaagtagaggcattagttatttagttgtggaggattattaggaagaatgattgaaagactagaatctagataagggttatgtttggttggggtcaaaatgggtatgtgggaaagagattgatgtttttttttttcttgatacatgggaaaatattggtgctttatttcttctaatagatcatatattaattgcttaaaatggataatattgaatgaaaaagtggaggcattaatatcttgaaaattattttgatttggagggctgtgaggaagaatcattaggtgggcatcaaattatttgttgtgattgtgaattaatggtgttttgaaatgcaggctgctgtagttgcagagactgcatcaaagagcat

SEQ ID NO: 21970 - DNA, 705 bp, Glycine max
  Intron number 1 from transcript Glyma08g40370.1 (locus Gly ma08g40370) derived from phytozome v7.0 (chr-ID Gm08; pos 40063539 to 40064243 reverse strand)
tgagacacaacacaagtcatagtccattggtagtatggttagttagttagtgagtggaaaatgaagtttggtttggagtttggacacactttgttttttgtttggtggaagcttcataacttgtgccagctaaccccattaaattattcttttgctgagaagtcttttcttttttctttttgtgcttttccttccttctcaattattttatgaactctaactcttaactctgtctgcttcattccactttggccctcactggaaaaggagtagtagtggtacttaaatgccattaaaagttaagtgatcttttgaagtatgatacaggtggtgtgggtgtgatctatctatctacaacccctggactttttatcactcttgttttcttgctttgtcttttgatgattgggggttatcatttaggacttaggagtttgcacaaagtacaaaaagcagataaatgatgccccttactgcggaaaggtgagtggggtgggaactgaagttaaggagagaatctgagaatgagtgctctctcactctcacaccacatgcacatgtccctcttatacctttactcatcatttgctgcaattttttacaagtcttctttttgtcccattgtggcctttttttactcctctttccatttccattgagatccacagaatgattgtttttcccactgctgcttctttccagggc

SEQ ID NO: 21971 - DNA, 691 bp, Glycine max
  Intron number 2 from transcript Glyma07g10870.1 (locus Gly ma07g10870) derived from phytozome v7.0 (chr-ID Gm07; pos 9082668 to 9083358)
gtccacggttgcagatatatttaagtacctagctaatttgcttaacttcgaacttagttgtgggtatgaatggatacaagacattttatcctctcaattttgaataccacatattttttgcacctgaatttcatagtgtgaatcaacctataagtaaactttgatccaaattcaagtgctactacgtacgtgtgctgatttttaatcattggatttgtaatgtgcatgtcaaattgaagggtgactgtcttctaaattttatgagcatgcatggatgtacatgggctaaccaattaattatgacaaattcatattctctttggttaattggtatattgaatctaactgacgaatcaatccaccaaaaattgtcatggcacctaattaaaagcttgaaaggaattcagaatattagctttatgggaacagcggtacaatatccctcccctataccttcgcatagcgaagagcctctggacaatggggtacgctagtttgtagctttatgggaaattcatatggaattattttctataattaattatgtcagaagtttatattgtttctattatatatatttaaaactcaaataacatatgtagatctatgtatgttcttttgttacattaattccatttgataaaaaaatatttcaggaaaggtccccagatcccaaacattgttttacagg

SEQ ID NO: 21972 - DNA, 614 bp, Glycine max
  Intron number 4 from transcript Glyma06g48020.1 (locus Gly ma06g48020) derived from phytozome v7.0 (chr-ID Gm06; pos 50363207 to 50363820)
gtcccactaaaagtgtatgtgttgatctacacatctcattattagtccattaaaattagtgttccttagtctgtccaaaatatttaattgataatttgtatttatttatttttgttttttctgtttaatatgatcttatagttgatgtcaaggtttataattccagtcctaaaggctgttaattatgggtggttatctaatgggaaccgtttcctatggttcttggacagcctacaagtgagaaacctcttaaggtctacactaggaggcccaagtgccaaaagtagcacaaccttatgggaatcactattggggggaagggaggagttagttttagaaagagaaagggagatagaatctgatatatagggggagagagaattagttccttttttttttggaggggggagggggtatgttttgagattattgttgattggaacctagaggcgtgtgtctttggcttgggggcttggcccttattttcatcatttattccttcgtcttctatccacagttacgcagtaatacaattcctttttagataggaataattcctatcatttggtgtttttgttgagagttgaactcaagggtccctgacatgcaggtag

SEQ ID NO: 21973 - DNA, 751 bp, Glycine max
  Intron number 2 from transcript Glyma08g22750.1 (locus Gly ma08g22750) derived from phytozome v7.0 (chr-ID Gm08; pos 17254200 to 17254950 reverse strand)
ttttaggctactccacccagctcccattgcctcaggtgagattcatcaaccaaactttgaatctttgaatttttcattattttaacttctttctttttttgggaaaatagtctacctacccaggatttttttataccttcattcaatgacttttcaaagttttcaatttttttgatagaataacgttgtaattttttttagattaaactattcacttgctctccatgtttattctcttttaagttttggtcctataccaacagaaaaaaaaactctaaattttagtctgtacgcaaatttttatagcaattttatacgaagagaaccatatctagtgatagcaacataaaccaaaacttcactaatatacatgtgttggggactaaaatctctaattttctgatatatgaactaaaacttaaaataaaaacaaatttaaaggtaagtgaatagattaatcttttgaataagtaatcattttgtccttatctctaggttttagtttttatagaagtaatttttttatgttttagtctttgttatgagttttctgacagtgtaaaattgtcaaaaagtaaaagatataagaggattaagacataacataattgttggagattaacatctaggagcaaatgattaattaaaccttaaaccttaacctttttacacagtgtatagaaattaaacttttttgtttgtttgatgttgaacaggggtttttgggctcgggtgtggacttccctgttgg

SEQ ID NO: 21974 - DNA, 942 bp, Glycine max
  Intron number 2 from transcript Glyma08g21470.1 (locus Gly ma08g21470) derived from phytozome v7.0 (chr-ID Gm08; pos 16316299 to 16317240)
ttgataagaagcaaacaggtgaatccagcaatcacacaattaccattcccaaagcttcaagtaactaacctacctactcgattctcaagttgtatattgtacctatgatttcagtatgatgtaatcatgttttccatgctttattctatcttctccagcacactactaaaaatatttttgtgtacttatctgtttaaagattcgagggcgagccctggtgcagcggtaaagttgtgccttggtgacttgttggtcatgggttcgaatccggaaacagcctctttgcatatgcaagggtaaggctgcgtacaacatccctcccccataccttcgcatagcgaagagcctctgggcaatggggtacgaagtttttttttatctgtttaaagattccttttcaaatttgattaatggaggaataggggaaagggtttgcctgcttgtaatgccaggtttttatcagattttgtcgagtattgatggatattgcactggatgattggtggtcatatggtccagtctccaatatagttgtgcatgcataaaacatgaggtcctagattatatggtcctgcaatttttaaaatatgatatcagaaaactttactcctatatgagggtattgtataacttgcattcattttctttctgtctgtcaagatgattgtacttgaattccatagtaatttttcaacattatgatgcaaagtcaaaagttagatgtattattaacaacttataactaactctcccttggttttatatttttattcattaatatgttattagtatgacctcctgtatacatgcaatactttgaacttggatggttttattatacatctctgtgtactaccaatattaatgatttgacctttaaaattggaatttatgcataatgtgcttattatcattgcagctcttgggcctgacgtatttgac

SEQ ID NO: 21975 - DNA, 585 bp, Glycine max
  Intron number 2 from transcript Glyma08g14370.1 (locus Gly ma08g14370) derived from phytozome v7.0 (chr-ID Gm08; pos 10451971 to 10452555 reverse strand)
ccaccaagtatgatttctcttccgccaaaagataacactagttatcttaagttctcaatagcttcatttggagaaaatgatttaaaaaattgtttttttattcttttatttgaatggagatggggaggattaggattttaatctattcgaaaaatctgtatcttgtgaggactgggacctgcatgaaaacttgacacaattatgccctatatctaattgcaaaatggtcattctcgggggtcttagtgagtgttttggtgagcgtttgtaaaattgattttggttaaaattaattttttaagtgaaaaatgatttatatttggataatttattctaaaagcaagttaacaagaaaaatcagtttatgatcttttatcccaagcaaaagttacctaaggttgattttactcttaatcaaatctgcgcatcaatttctcagtgtgagaccaaacatgtgagcatttacctaaaattactttagctgatatttcaacgtgactttagttgatccttccaaacacgcactaactatatttttccttgacattaggtggttcacttttcttatttgatcggaaggtgctg

SEQ ID NO: 21976 - DNA, 1018 bp, Glycine max
  Intron number 1 from transcript Glyma08g18910.1 (locus Gly ma08g18910) derived from phytozome v7.0 (chr-ID Gm08; pos 14283573 to 14284590)
aactcggggcttacctcattcagaaccaatttcaggtttttcttttttttttaatcaccaccatccatctttttttcttttgaaaggttaactacgatccttagaatattgaataaagaactatatttttttatttattgagatgtgttacaggtgaattttttttacacttttctatgatttctacatttagtttcttaattaatatcacatgctagcaagactttttttatgcacttgtaataattacaaatgctaaccggtgctcttattccattaattaaaaaaactaaaaaggaaaaaaatttattgggatacataaattacgttgtctttttttttttttttttttttacattctcctataattttcacaataaatatttttttagttacataactaatgccttaaggccaccggttagagacccctccttgtaactattacaagtccgaagaaaggcatgatggtgtgataagtatggtcttgtatttattgctttccctgtttaaaggaattttggcctcaaagctagtgttatgtaaattagaaggaaaaaaaaatgcatagagaggtgcttaaagaggtagcagcatttgattttcctagatgagtgtatcaattgtattctgggaggttctatgataggaaaaaaaagggataataattgattacttatggcctgcagagacaattttagatttaatcaattaatcatagattttataagatttacagggtattttcaaatttatgttttgtgaagcaatagcaacttgaaatctatcttggatattgccagcttggtctatctttcttggttttgttttgtttttatgagacatggtggcactattatgattgtgtgcgtatattctgatgttgctgaattttcttctatgtgttctgttctcttgtttgcaaattactatatcatataataatgaagtgacttgtgcattgcctctgtgacctatgacagtctgctggtaactctagtgctcttttcctaactgc

SEQ ID NO: 21977 - DNA, 349 bp, Glycine max
  Intron number 3 from transcript Glyma08g11020.1 (locus Gly ma08g11020) derived from phytozome v7.0 (chr-ID Gm08; pos 8054541 to 8054889 reverse strand)
tttgaggtatttgcattcatgcctctttttttctttttgacatttgttttttgcttttctatttggctccccaggaagagaacaaaactttgagctttttgataaacaaacctgattgtttttgctggttttgttagtgttaataatgatagaatcataggttgttattgttatgcacttgcgtgaagttcctttggcattggcattgcaattctgtggagaatcttagccacctttattgggaacttgctttatttctgcttaatatcagtaatcttcaagttattataaatacgttttgtggcttttgacagctttgatattttacgcgactctttgggcttggttc

SEQ ID NO: 21978 - DNA, 863 bp, Glycine max
  Intron number 1 from transcript Glyma07g21440.1 (locus Gly ma07g21440) derived from phytozome v7.0 (chr-ID Gm07; pos 22675229 to 22676091)
atcaggtttctctccctttttttttcttttcccttttttctctcactttttttgctaccaaatattaatgcaccccctatgtgtgagtttggttgtttttaaatcttttgtttcttaattatggaagacagttattatgtgttactatgttactgatcttaatttgtgttatgttcagctgggtttcttttatgtttctggatttaataaattaacggtttaaatgctggaaaatttagtttttgtttgtttgtttttgtttttaaattctgatgttaatttgtctcatttaatttggtggttaagattgattattcttctctagcggttatacaaggttgttatatttaaattcacccaccataaagtaggacttaactgaaaaaaaatgttacagaaagaaacactccccggttgatatttgtctttttaagcaaagcgttttccttttcttgatttggaaaattggaaaattggaggtattactaggctggatttagatccatgttttttttttctgctcaacatcttctcgtgattaacgagtgtttctaatgagcttatccaaaatgttgtaaaatgcacaccagcgaactggtattttggatttgatattctatggttttttatttatttttgtgtgtgtatgtattaaagattttaccttgctgttcaatgatttgttcagcgtttatattctatggcactatgattttagcctgttcttggaattagagaggaaaatgttttgaaattataatactttgtttcctttccaccatagtacagtcctttcgatcgttacatgatgattaaccatgattttgattttgtttttcagatttttgtggcttctaggttga

SEQ ID NO: 21979 - DNA, 1006 bp, Glycine max
  Intron number 2 from transcript Glyma07g21440.1 (locus Gly ma07g21440) derived from phytozome v7.0 (chr-ID Gm07; pos 22676115 to 22677120)
cctcaggtgagctcacgttatatacctttacctagcattttttttcttaacatgaattcaagtgattttaataacttataagtagaaatgactttgacgagaaggcattatatagtgcagaaccttattttcagagagcatcatgtagtatttctttgacacattcactagtcagggcatgttggtttttttagtagatgaatactgttgcaagcaatcattactgttaccatagtagtgagagcttgctattgctaatgcttttcattaacatccttgtctctctcctgttgatgttgacaacataccaatttttacaatgccaaagacactgttgtgtcacattcacataacataaggaatctttctattagtgctgccatattgcttacttaaaaaaaatacttaaatgcatcgtcattaccacttaccatccattgtccagaacattaaattccttatgtatctggattcattttggctacacattacactaagcaatcatgcttccaagaagaacctataacctatactattattgaaattaaatattaatctaatttaggtggataaaggggaggaaaagagaaaagggaggctctaaataatatttttaatttttttatattagattgatattgtacccttcaaatcattaatcaaatgctctgatttttatactaataatttgtgacatgtaccactggtataaaccctgcctaataaggttaataagttaattactctaatattcttacagttatagtgtatggatggcctttctaccaaaataaagtttatggatggtcttgtcaccttgcaccgaagttctaactcattgtgaaagtggattctttgttgattttggttatctgtacaggattattaaaaaaatatccccttgttatcgcctgtaataagtaaattatttttctatctctatatggtattaaaatattctgataaaattgaatgctcttttcgggttctcaggggggaattgaag

SEQ ID NO: 21980 - DNA, 779 bp, Glycine max
  Intron number 1 from transcript Glyma05g29630.1 (locus Gly ma05g29630) derived from phytozome v7.0 (chr-ID Gm05; pos 35185583 to 35186361 reverse strand)
caattggtgagcttgcactttcttcattggcttataaactttgcatggcagcattttagttgaaatatatactcgtttgcatcattggttggtcttaaaactagattcacatgcatacacttataataatcatcaattcatcattgtaaaagacatagttatagtgagtcaatgacatcaaaatggttctaagatctgttgttcttcttccctatttttgaacttgtcaattaattgcaactaaaagcatcttaatatatgcattcataattttctattggatgacaagctgtattatgctaaaatctgacaataaatatccatcacctagaaggaaagggtataattaagatgcattaatatttttaccggtgaaataaaaaaattaaaaaaggagtaacatgaagatgtcagtgaaaaaaagtaaaacttttgacactagagttggcactactctgagttagttacccctcataaaggtttgtgactgacccttaaattccattcacatggatctgtttgcccgcattcaatatgcaatttaagactagagtgttgcgtagttcatttcattgacaaagaggtagaattgtagaattactgataaagaaagaaacaggaaaaatttactgccagatggttacttaccagaagaactgatttggtaaaaacaaaaacaagagaaaagtagatctggcacataaaattgaaaccatagaaaggtttcactcttgttttaactttcttttgaaatttaacagctgaacttttgggattcg

SEQ ID NO: 21981 - DNA, 805 bp, Glycine max
  Intron number 1 from transcript Glyma08g21540.1 (locus Gly ma08g21540) derived from phytozome v7.0 (chr-ID Gm08; pos 16367799 to 16368603 reverse strand)
aagttcctcaagaagttcagaaacagaattgacaagtaagtctagtcttttgtttgatttttcacacgtagtgttcccccttcctcaccaacctaccccacacgttcacacaaaaaatcttcaaatagaataggtaaggtttctgataacttagacaaaacaaagattacataagttttttgtctcaatctttgaaatcaaggaaccccatctatttagaaaaccttactttctcttatgattatactgtgtgccttctttcattttatccccccatattatcatgttgaacatgtctttgtcatttgattaagacaaaatcaagtttaagaccagtttcgtgttgcttctacgaagtagagggaaccagatctacatatgaatattattgaagatgtagttaatttaaacttcaatccttcattaatcaggatctttgtcaaagctaattttttctttaaactttgaaaaccaatcgtcatatttcaaacttgacattgtcaaaacaaaatagacatcgaattaaaagcacacctaatacatcttttttgtcaatacctaatacttgagtggatgaaatttctcctgatgaaggtgaaatcaaatttttgaactgacttattctgtagacaaattaatgttgttacatgattcaattgtttggactttggagtaatgttactttgaaattgtaagtgcacggttttgatcaagttgttaaccaattggaacagtggaattgatttctttttttgttttaccaattccagggttggaattcgacttccaacagtagaagtgaggt

SEQ ID NO: 21982 - DNA, 921 bp, Glycine max
  Intron number 2 from transcript Glyma07g35110.2 (locus Gly ma07g35110) derived from phytozome v7.0 (chr-ID Gm07; pos 40242002 to 40242922)
ctcgacaccaaggcacgccccaccagatctgtttttcatattctctcccctttttgtttgatttgtgtttatatttatattctcatcgccgattttgttttctttgtttataaatcttatgttctaattgctaatgtttatgattatttattggattaggttataagcggttgttattattattatctaattaattctaacctaactatgtttgtgtgtgtgtgggagtgaaatgttgaaatttgagtacttttttgtgtgaagaatctaatcttgaatttggatgttggagaatcgaggttacctggtatgatatgcttgatttatgtatgtatacatacggatttcaattatggtatgcggtttagtcgagatctttgatattgtagaaaattgtgaacaaatgttactgagacttcatattgtaaagataataagaaatgagaattttttgaggtcactctatacccatcatcatgcctagaaatgaagagaaatgggtattcacctaatcaatatctcgaatcaatgatggattccattttatggctaaacccttggccttgttttgttccttaagatggattagacatcgatttcttactaagataaactctcttgattacaagatggactcctgaaaatgaaaaaaaatatgcatcatgtaaacatggtgctctacctaactgagctattgtcctcgggcttttgatacgtattttatcacagtatgtatataatttcatttcaagatgaatatgcatgatcaattatttggattgatattgtgttggtattgcttcttggaccatgtggaccagtttttaaaaacttccatacaattaagattatctttcattttatgtgactatttccattgctgtaggggcctgagattcgaactgggtttctcaaggacag

SEQ ID NO: 21983 - DNA, 651 bp, Glycine max
  Intron number 5 from transcript Glyma08g27080.1 (locus Gly ma08g27080) derived from phytozome v7.0 (chr-ID Gm08; pos 21413580 to 21414230 reverse strand)
gtggtgtcaaagcagttgtctgacaccatttctaggcatgttttaatctttgttgtcacactattaagttcaattatttcggatgacccaagaaactaattttatcaaattcactccacctatttaccactaaataaaaaaaaggaagcacaagaaaaagaagaaaataaaagggaatgtttaacatctggctcaaacatatgaagaaaaaatgtgttcatgtctgtttgtaatttatttctttgagttataccaaagccacttcagcctcctttcccttgagtatgctttatactcaaggcagatgttccctttttgaacgaggatgtgcagaagtaatcgtgccataccccggcacatatgtagatatattcttactgcaaagtacatagaatcatgaatgtgtaggaacatttagctgaaggtatgctgtttaaagtggttagcagactagataaaaaaatttcctcaatttaatcctttcaatggtttgcccctcctgctgtctttatggacttgtatttgtatcatttatgtcaacattcatggtgatcaataatctggattgctcgtttgatctgtcaaattggactccagttgaaattaattatcctttgtttttcaacctatacttttttctgcagttccaaa

SEQ ID NO: 21984 - DNA, 490 bp, Glycine max
  Intron number 1 from transcript Glyma08g27080.1 (locus Gly ma08g27080) derived from phytozome v7.0 (chr-ID Gm08; pos 21414889 to 21415378 reverse strand)
gcctcaccccacctcggttcttgggagggcctccggtaagaacctgctgttattattattattagtgttggtttgttgggttattgtgattgggtttctctcttcctttaaggtatttgatacaatgtctattctaattagcagtagcttctccttcatcggtttcgtaaatgctgattgggttttgaggatctattggtccgtctcttatctttgatatttgggtgttagtgttatggtagtgtctagtactcttcttttttcaaggtatttatttgagtagtttacacaaggtcttaggttgtaaccttgttgccgcaattgtacacacacacacacacacaaaaacaaggttggtcatgttgtatgattccgcaatactttgatgtacttaactgaatgccgtttttcaattttctggctgctattgttactttttcattttgtattacactgttggctttctttatgttgacagaactgaaaagag

SEQ ID NO: 21985 - DNA, 647 bp, Glycine max
  Intron number 2 from transcript Glyma05g34810.1 (locus Gly ma05g34810) derived from phytozome v7.0 (chr-ID Gm05; pos 39028971 to 39029617 reverse strand)
gttccactacttttcgttctgctacttttggtaagttcgttgttaactaactctcatgcatgtctagctagccacaatttctacatataaacaaatcctaaatcaaaatgttccatccttattctaaaattaaatgtcaatgacttttaatattagaaatatctactaaccatcgtttagttttttctattttgatcaaaagatattaaaaaaatcactcttcttaaaattaaaccctatgtatatcacttggccccattgagacagggacatgcactagtactgatttctgtacaagttagtgttacgtacggacgatcataatgagaacttcttgtcattttcctatgatgaataaaataacctatccttttcatattttcaaacagtaaaaagtaactaacacgttggaatcaacaatataataaacccaaagcatatattatttctttatttcaaaagtacgtcaacaaaagtggtggccgagatattttcacttttcactttacactcggtgaaaatatctcttccatgatagatatagacaaataaaagagttttacctttgcatctatatataatatttttctaccaactcaacaattgtcttgaaagttaaaaaccgtcgattactgttgcagcggttg

SEQ ID NO: 21986 - DNA, 1046 bp, Glycine max
  Intron number 3 from transcript Glyma05g34030.1 (locus Gly ma05g34030) derived from phytozome v7.0 (chr-ID Gm05; pos 38496032 to 38497077)
agttgacatacctggaggaacaaacccatttcgcggtagtaaaagaaatcttttggtctacttcatatatgacatttttattttcttctatttataaaagtttcatgatgttgcatgcatgagtactactgggttcagttctacttaattaatttttcttttcttcgggctaaaacatcatgttttttaattttttgggcgtccatcgcactgactctcgatttcagaaacatttttcttcactggtcataaaaatcttaggccatttctggcaaaatcaacatgcatgttcctacctaggctcctcgcatgcatgtttcagatttcttctggaaaaaaaaatcacagaatttcagggctatgtcacatcttgtgtgcacactctctttctatacatcaaatggtactctcacacctgtgatctaccaaaatttggatccaatgtccaccatcccccacgtgtcctgcttgtgcctgctatgaacacgtgtcacaacaaatattccatctctaaattctctgaaataatcgttaaataattgttaagtatagtaaataaataaattctcaattattctgtcatattttctctaaaaccattcttcaataaattaattttagattttctccgtgcatgcaccaatttagataacatgtgttagctagggaatctccttttatgagatcatcacacgtgccccatagcttgcatgttatcaaatttcagaattccatcacaagcaaatgtgtcaaacatgaagcaatatttctccaactccaaagtaaaaatattttgaattatcacctttctttggtcctgtcatttctaaaatataatcttcgcatctagcatacaggatattagattaatttttcctactttcaacagttaacattgatttcttgtaaacaataataatttgattcatgcggaacaaagaaatctaataattaatcaagtaaatggtcttctttgcagggaaacaaagaaatctagtaattaatcaagtaaattgtcttctttgcaggaaaagagattgtttcat

SEQ ID NO: 21987 - DNA, 757 bp, Glycine max
  Intron number 1 from transcript Glyma06g45150.1 (locus Gly ma06g45150) derived from phytozome v7.0 (chr-ID Gm06; pos 47972660 to 47973416)
tcagacttcaagtgcagccactgatcccactggtaaggattctcactctttttggcctttggcattttgtgtggtttccctagtgaatgattgaggattctgtggtcacacaagtgtagtggttagctgatagtgcagtcttctgggtctttttttttattttttttatttttaatatcatagtttgtttgtgtgtgtgcgtttcactgtttctcaatggtggttaaagtctatcttcttttctcatatctactggctatcaaataggatttcatgcgttgtattgtatgatgaattggtgatgctttggggttgataacctacttccccctttaaactgaactgtcacaatttgtgttcctgctgtgcctattcagtctactctacagttaatttttatgttgaaatgtccttgatttaatattataattttactatttgccttttgttttaatgtctaattggtctgttgtaatcaacctcatctggtgggaaaagacttctgttgtttgttttgtttgtttaattttctgatattgaatgctgattgtgctatgttagaatgttctgccttgtcttgattgatgtgtggagggtcactgaactgtgtggctgtgaactagaacagaaaatttatgaattattgcttttaacatttttttgatttgttatgtcatatatctgaagtctataggagttctaaaattttttgattgtatcagttgctgcaattaatagcttatacattgcactggga

SEQ ID NO: 21988 - DNA, 914 bp, Glycine max
  Intron number 1 from transcript Glyma06g45610.1 (locus Gly ma06g45610) derived from phytozome v7.0 (chr-ID Gm06; pos 48354357 to 48355270 reverse strand)
tacaacagtgctccttctttcattccttcgaataggttacctttctcttctctctctccttctatctttctctttaaccaatatatatcatatgctgttatttgcttcttgatggagccgctagtattgcaaaatcccatgatttttttttaaaaaaaaatcaattttttttattgcatttgattcaaagatgcgattatgtttgaccccattggtgcgtttttcggattaaattaatgggggtggtcaaagttcatgcttgatttgttcctgttcaagtgttttttatttggggggtttaatttttcatatatttaatttgttaggaatattttggaaaaagtccaagatggtgaaagcaatcttagaaatttaaggttatttagagctttgaaaagatggcagaaacggttttgaagcattaatgtgtcggtagggtctattgtattgtattttttcttttttttttagagaccacatgtttcctgacaattctgctcaaacggggtggatcactctcaccctccgaggacttaatacggttgtgtgtccaggcttgaacttgagactactgattaagtaggaacaacctttacctgttgatttacgcgcttgttgttccatgcgctcggtggttgggtttattatatttgttcctgtggtcaggtaaagaataaaaatggcaaactatattgcagagtatatgtgaatggtttctataggttttatcttcaagttggaacaagattatgtatgtataattttccatataactattgagcgaaattgctttttatttattggttttattgaattgttgatcttgttcttgtagttttacgatattctggatgtaacatattagatcaacctttacccttgattctcttttacttatcaggactgcatctctt

SEQ ID NO: 21989 - DNA, 940 bp, Glycine max
  Intron number 1 from transcript Glyma05g36910.1 (locus Gly ma05g36910) derived from phytozome v7.0 (chr-ID Gm05; pos 40644526 to 40645465)
attgaaggtcttaatacctgctgggatattttcaggtatatcactgttactttcatgcacaattcatcaatcttatcttattttcttaatttgattaacacaacacaatggacacattatcaaaagttctaattacataatatctgaattattataaacttttgatacttatcttgaatttctataaataaaaaaacaatgcacacatttagtgctaaacagactgatgggaacagtgtctcaagcaagatgatttgtctctagagatatatcataacgcaacaaaacaacaatcaacgcacctcatgttacacgcccacacaatgtctcctacgttagagttgatacatttttaattttaaaaagaagacagaatggaaaaattggaaaatgatgaagattcattccatttttgggctgtacaagtggaaggaagagggacatagaaaaataaagaaagaaaaaaaaaagttagatgtgactgtaacaaataatatgatgactgatgagaaataaagagaacgataaaaaaaaaggatgtaatgagatggaagaaaaaaaatagataaaaaataaattgataattataactcaaaaaatatgagtttaattttgacaatataaaagtttttatattatcagttaattagaaattatcttagacatgatttttagaataattattattaagttaacaatcttatttatatatgatagtttatgactaaattaagtgtaaagactttacgtaccttcaactgcaaaaaaaaccttgttagtgtattctaatgatgagtgtgcatatatgtttctacatgcaatgggtgaatggtgggctttttctctattacattcaactgtactcggagtaggagggggatatatgggacttatattttgtagtgattaccatttctgacactgcttgtgtttgttcagg

SEQ ID NO: 21990 - DNA, 722 bp, Glycine max
  Intron number 2 from transcript Glyma08g21110.1 (locus Gly ma08g21110) derived from phytozome v7.0 (chr-ID Gm08; pos 16012584 to 16013305 reverse strand)
tcagaaactacacaggtcctacatcatctagccacgtgagtcaagtgaagttctttaaatttttgcaattaatcattcttgtacccttttatctttgtcttattttcatagatggttgcatcgaaactcaccttgtttttcctatttctgtcactttcataagctatatagagtatagacttttgatagaagtattaagcttgaatgagttctgatagtactagacattacaaccaaactgggaagtttaacacacaatttaagtaatagtgataaaaaaaatagtactgaagtattcttaaaatggtattcaaaggaagcacataactgtatcaacaatgacatatcacttttcttttaacaacttttcttattgtcttattctcaaatccctatctgtttctgcccccttatttatgtttctgatcttatagtcataaatatcactcttttttcttatggaagcaaggaaagggaagtggctatgccatcttttaaccctcaagtagttatgctttctatctctcttatttttgtttttcacttttcttcagtggaaagcacggagtacttagtagcatacataaacacacatgtgatcatagttacatacatatctttaaaaataagtttttcagttgatcctttgcagctatttttaattttgatgtttacattgtgctgcagattagtagcaatcaaagcatccaattttgcacctc

SEQ ID NO: 21991 - DNA, 674 bp, Glycine max
  Intron number 1 from transcript Glyma08g06780.2 (locus Gly ma08g06780) derived from phytozome v7.0 (chr-ID Gm08; pos 4861638 to 4862311)
taagtctggtactcctcaggatcgtaaacacgctggtacgttttcttctctctctctctctgtccttatttcactaaatgtctcgagcagaagaaccagtgcgcactgagtgagtgagtaagtgtaatgattccagcgttcgtggagatatttgggagcaaagattttagaaaactgtcgcgttcgtggtttcgtcgcgttcctcgatattgcgagaaattgcagacaaatgcgaccgatgcagtcacaattgaggtcgcagacactcgaaaaaccttgtcgttgaagctgaaatcacagttcgcagactcttttcttttcttttctttttctttaacctttgggagtttttgaataactaaaatcatgaggtagacccggattttatggatataggtaatctttagctgaatgttatccgttattgaaagggcttttggcatggtagagacggaaagaacaagattgcttcttacaagattgcttctttatatatatatatatatatatatatatatatatatatatatatatatatatatatataatgattgcttcttttttttgttttggagaaagtgtgcagttattgatcctctaactgtttgaattggcgttttgtttttggtgtatttgcagagaagatattaccagttgtcaaaaaccaacattta

SEQ ID NO: 21992 - DNA, 614 bp, Glycine max
  Intron number 2 from transcript Glyma08g40030.1 (locus Gly ma08g40030) derived from phytozome v7.0 (chr-ID Gm08; pos 39713365 to 39713978)
gcagggtctacagggccactttgaagtcaggagaggtaatgtgttttggatataacttatttacttattttctctctaattatagaactctttcaactaattcacatcccttaaaaataatagttaatttaattaattttaataatagttaatttaattaattaaattaaatctgtcaattatttgtattattataaaaaaataatcaattttttattttcttatccacttaattgtttctcattaatgtttgaacataaaataattaagtaagaatatttaggaaaagaaataattaatacatctaaaaatttgaaaaaaattttataaaaagagacaataaatttctaaaaaaaagtcttataattaaggacaaaacgaatataattcaaaagaattcttcatatataattctcaaaattttgcttaacataagttgtagcttccttaaggtaaccatgtttctggtaataattggcaataccatcactaaattcaaatagcacacagattgagtcatatgaaagtactatatgactccatatatgtgatctttagccacaaataaatacatactaatgcatttccctctgaaggttgtagcaataaagaaa

SEQ ID NO: 21993 - DNA, 869 bp, Glycine max
  Intron number 1 from transcript Glyma08g22010.1 (locus Gly ma08g22010) derived from phytozome v7.0 (chr-ID Gm08; pos 16729948 to 16730816)
actcgtcgctcccctctcgatttccccatcgtatgttgttttccctaatcaactttattctaagcttaatttttgtaattttactttctatatgtcaagggctgggaattttgattggggtacttttttttatcgttaacttcaattgttaattacgtttttaacctcggtgtttgctcgcgagatttgcctcaattgattcaccctgctatagtgctatgtgtattgcctcaattcctgcttgaaggataattgatttactgttattgcatttccttgcttctaattaagtccaatcatttttggctccggttagatgcaatgctagtttctcgaatgttgtcaaagtgccaaattatactattaattgagaaattaatggcttaaattgttataaaacattactatggtaaagcttgtattttgtgtagttaagagatggcgagattatgttctatgtgtattggtaaattttggctactttgataagtgctgccattttctgatgcacacctgaagtgaatgatgtatcatacgacctccgttcctatttataagaaacaagttatagtgtatacaacttgtttcttataaataggaagggaggtaatatttcacagcaagcactacccttccaccccttttgagtatccactctagttgatggtgtatagatttgtataggtagaatcagttcataatctggtggatctgacagtgagttcagactttggtgatgttaggtcttatgagattgtgaaaccctctctttcttctcattttgttgtcatttaatgcactagctgatagcttgttgaatgcatatactgacaggagtgggaaaggcctaaacctggacgaaggccgga

SEQ ID NO: 21994 - DNA, 930 bp, Glycine max
  Intron number 1 from transcript Glyma07g02190.1 (locus Gly ma07g02190) derived from phytozome v7.0 (chr-ID Gm07; pos 1519182 to 1520111 reverse strand)
attctcaagcagatattgccattttgctcaggaaggtacctacctgcattgcactgcacttttactttctgatatgggtgttattacttatttgattccttactgctaactaacatgattttattatttatttttgagttttgttgaactacttgtttggaacttcaaatggcttctaaacttgaactaattaggaaacgggactgagatgaatttgtgcatgagggtgcagtctaaatattcagattgtcattttctctgtgtggcttaaaatataacatccatgatccaacagccaaactcctttttgatgtaatttttagcatgagttatcaaatatctatacattatacatcatgttaatcctctttcccttgtaataacaattcaacttttacggagttataaagtattcttagttaatcttataatttatcttctttcatgcttacgttggctttctgtcaattaaatggctgtcagttttctttcctgcaaccccacagaaaagaaaagaaccccccccccccccatctctgaatgctgatcagtggtttaattggatacatggtttgtaaagctttgttggcttaaattaaaaccttttgttttctgtacccttcattatcattgatatgaatttctgtctttgtgaagctaagaaagattaaacagaatatgccaggcttgtaggggaattatgggtgtgtgaagtaaccgctttccataaatttctaatacatacattttaagattttgaagtttcttgcctagttttatgcctgtttttcatccatttctgctcagaatttctttaaagtaaaacaaacaaccatgtctaccagtagtttctggaagtcagtcagcctttatgctatcgtataaagttgtaaaccctaaatacttgcaatatttttcagttaatccgtg

SEQ ID NO: 21995 - DNA, 495 bp, Glycine max
  Intron number 1 from transcript Glyma07g02780.1 (locus Gly ma07g02780) derived from phytozome v7.0 (chr-ID Gm07; pos 1885461 to 1885955)
ttgacttctctacgtgaagctccttgttttgcatagtatgtgcataaattaatatacaagttaatttgaggaatacaatatatttatatgttatgtaaatgtgactttcttattattagattttgatctttaaaaaaattaattttgtttatttcgatcttcaacaaaatcattatatttcaaatagtgtctatagttacttgatgatgatgttaaatgcatttagttataccgtgttacatgtcacatcaaaatggttggtggtgcgacatgagtagctgcatgacattttataaccaagcgcattatatgaagtttttttcaacaattgtagagataaaaacaaaagaaaaaagaatcaaaatcaaacaagccatgtttagagtttaaaaacatgcccattcttaaatagtgtataggaatattatggtcatattacttgtcacattaactaattttacagtaatactcattaatgacagggagctagttgaa

SEQ ID NO: 21996 - DNA, 437 bp, Glycine max
  Intron number 2 from transcript Glyma07g05530.1 (locus Gly ma07g05530) derived from phytozome v7.0 (chr-ID Gm07; pos 4169256 to 4169692 reverse strand)
cagttacacaggtttttcttctttttaattctcgagtttttatttttttttaatgatttctctgtttatgtcgtttttcctgtggcattgtattacttaattagttgcgaaaatttaatttgtgttctgccgttttgattctggtctctgaattactttacgtgtataattgcggtagcatcatcatcattctaaggaggcttctgtttaattttccacttgttggatttggtcatccccaaaatgatcctcttcagttttgcatcttatgtagtaatttggtatcatagaatggaataccatacaaagattttttattttttggatctgataatgcaaaatattatggatgatccaatttcagattgacattattgttttcatggtttattacttaatggtattctttttactcgatgtagttattgcggttccgg

SEQ ID NO: 21997 - DNA, 534 bp, Glycine max
  Intron number 1 from transcript Glyma06g34250.1 (locus Gly ma06g34250) derived from phytozome v7.0 (chr-ID Gm06; pos 35537840 to 35538373 reverse strand)
gacaaattgaggtaatggatagaactatatcttctcttcttagagtagtgattaaaaaatatatatataaagacttgagaagaatatttatctcatgttgagtttgcatataatagagatgtatttttcatttttcaattgcatgtcctagttataactataacaaatgtaaaccatacaaactaaattatcgttaaataatactatacaaaatttattaattaaaaaaatcaaaattatacactatcaattattatttttacgagcttaatgattattcatttacaatagtataaaatacttattataattttagagtaattattataaaaggtcaactaatttattataaataataaataatgtattgtgatcgaagtgaataacctttttcttttgtttgtattgcgagaaaaaaaatcgtccattttcccttgaccagtgctttcagaccaaaaaaaaaaaaaaaaaacaaagcaaaagcgaaacacgtaaccaggttcccttcatattccggttccaatcgaatattcg

SEQ ID NO: 21998 - DNA, 428 bp, Glycine max
  Intron number 1 from transcript Glyma06g07790.1 (locus Gly ma06g07790) derived from phytozome v7.0 (chr-ID Gm06; pos 5709919 to 5710346)
gctatcttgaatatacattgtaagattagttttctttcaattcaaacttacaaattatgaaaatatacttaatattttttttagtttaatttctatgcactgacagtatctacgtcaaccaattataaatcattaatatataatttttaaggtagttattgcaaaaaaaaaataactagtatgatttttaaggtagttattgtaaaaaaaataaacttaccctacattgcagtttgagattgaatgacaatatagaaactatttacactgttagtgtatagactatttattcatttttccccttgaattgactggctctttttgtttttataatttgtgatttaaacttatgttgacttgaaatctgagaagatttcgctaattggccatatggaattatccgttgatatttagatactggtgttctt

SEQ ID NO: 21999 - DNA, 878 bp, Glycine max
  Intron number 1 from transcript Glyma07g33140.1 (locus Gly ma07g33140) derived from phytozome v7.0 (chr-ID Gm07; pos 38078498 to 38079375)
ttacccctgatcttcaacaaaaaatcgtcaaacaggtgtgccccgtcttttgctttcattttaattctaatcaaaatgcttttttttttctttaacaattttgaatggtcattaatcacttatgattttacattaattcaacatggtaattatcattcttttaataatgaatgtcaaactcaaaccaaactaaggtaggtctaagactgtgaggtttgactaatttttgtgtaattaagtatcagggaacgtctggtatgtatgagagaagtttttgatttttcatgtttgatatttttttttaaaattctttgataaatgaatattttttaatcagtttgtgatgaaacttttttttataaagataaggtgacaatcttcctttcttgaatttattttttcttttattattataaaaatatcatattattttttattaaattatataatagggtaaataattaaaataattaataaaatatacatttttcctaggtaacttaaattaatattttcaatggtcgatcaaataaattctattcattaaaaaaaccataatttttaagatttatgattcctagaaatgaaaaatttctttccaattagatgccccttagatttaaaaggatcccattgtcatcatcatatacaaaataaataaggaatgtcattaaaaaatgtggataatttacattgtgaaattgtgagtaaaataagattttgattataagtgtcattgcttgaaacaaattaatatttaaatattcaataaagggatttatttagtttaattctttgatgaattggttatggaggtttccgtacgaattttgttaaagatggtgtgaatgtaataggtggagtatcagttcagtgac

SEQ ID NO: 22000 - DNA, 821 bp, Glycine max
  Intron number 1 from transcript Glyma05g29180.1 (locus Gly ma05g29180) derived from phytozome v7.0 (chr-ID Gm05; pos 34851880 to 34852700)
ccgtaagattttattctaatatggcatcgttcaaaaattgttttcattattattatattacctcccttcttgagaatcttcatttcactccatatagcatatatattatagtttaagactaaagtagagcacacaccactcacaaggtataaaatttagtctaaggctaaatcagatcaaaacatttttagaatataaattaagtcaagtttttttattaaaatttatttaattaaaaagatctagcttaatttagattatttaaaaagctttttaaatttaacagactggcctatttaaatgaattattattattattcctaaatttgttataatttattaatattatgtatttatttatcttttaaacattaaacataacattgtacgtagtaagttttgcgaaaacttgaaaaaatttaatatcatggttaaaaaaaattgtgattgtgaaccccactttaaaattaaactgtatgagatattgtatatgatgacttttatatatatatatatatacggtgcatcttaacagtacgctataaaattaaagaaacaactttttgatgtctcaaatttgtgttaaaagtaataatctctttattttcaagtaagtgacaaaatgagttgtgttgttcactgtagccggctacatatgatatgattttctaacttagaattaaaaatcatttttcaaaaaacataattttttattctcaaaatgaattaattcaaacacaataaatattttgtgaaacaactaaaagcaaagtcgttgatttacagatttttgtttctttatacttcttcaaaaagatacg

SEQ ID NO: 22001 - DNA, 1052 bp, Glycine max
  Intron number 1 from transcript Glyma08g29210.1 (locus Gly ma08g29210) derived from phytozome v7.0 (chr-ID Gm08; pos 23633818 to 23634869 reverse strand)
tctcaccgtcgttgtcgttttcgaattcagcgtaggtaggtatattattattctcaaactgtacttagagaatagagatttctctccaactcgccttcttcctcttttctttacttctacttttcttcaacaacaagtttttttttgtccacgactgtccctctcaattcactaggtcactgggtgagagactaatcttgggtcaagggaattttgctgggattgaaaacggattctctcgtccttacactcatctttttttttttattgttaataattttatttctataaattgtcattatatagtatattatagtttacactttaaaaatcaaggtaattattagtaaaatttcacaaatttactatagttgactctgatatctgatattaattgaaaaaaaaaagatatgcactaaaattttacaatcttattcaattaatattactgtgaatgataaatttgttgataaatatctttaaagtcaaattaaatattatttttaattgcttttacacttacagtatatgctaattaatattattaaattattaattatcaatttttacttttaatttaattgaaatgcactatattgacatatataatatatttttttataataattattttaaaattcattaaaattgaaaaaaaatagtgtaaaattttacaccacaaaaaactttcttttttctattttcacttcaataatcttattttgatgtatatccagtttaaatgcaacaaacttatgataggtaggtcaagaaatctagctcaatttattgtgtatgataggtgacttattataaatctgacattgttttgaattcttatctttgaaaataaacttatcataggtgtaattaaattacgtatttagagtataaaaataatatacactttagtttaagaattttttattaatattttgatgtttttagtaaaaacatacattttaatgaaattttattttaattttttaaaatgtttttggcaattttattttgtaggggcgactttgaacaaagggttcaatcgttctttg

SEQ ID NO: 22002 - DNA, 912 bp, Glycine max
  Intron number 2 from transcript Glyma05g29550.1 (locus Gly ma05g29550) derived from phytozome v7.0 (chr-ID Gm05; pos 35134952 to 35135863)
aatccgttgttatttctggaatcgtagagtctttggtaagatataaaattaccttaattcctcattgcataataacataatttactaatcgttattggtaaaccccagatatatagatgtttatgtgagtttgaccaaatatagcaacgcaatctattttttaaacccacctttatacctattctttttttttttttccgattacctcatttactatttttattactttctttcttttatctctcacagtatatatataaggaataataaacctagactcaaaaaaaaaaacctagactcaaaaaaaaaaaacccgttgactctcaagtatatagtgggaagagatatacatataaagaaaagaggggggaaaaataaatgtgaaagattatatgattggaaaacataaataaaaaaagtaaaataaatataaaaagtgaaaagtatatggtgctgatttttctctatcatgctcttgaccaatatatttacttgaatcataaagtgttattaattcattatttcttacaaaatgttatatttaaatatgtgttacataaatagttggttgtctagaatcatttaataaattttttttagtaaatatttttacaagatctctcgttgacaatgctctgatagtcatacactaacttatatattgtcctgattataatttacttgttggtatcacttataagttaagttattggaaaacttatcatacatagtatacaaatgttttacatattatcttttttctctttaataaaaccaattgaaagtaagcccaatttatagaagcaactaatttacgtactttaaatttctaaagcttattcaatcacaagtgcatatgtgcatgaatgtgttgtagggactggcattgcttacgatacaggcacgcgtggg

SEQ ID NO: 22003 - DNA, 578 bp, Glycine max
  Intron number 2 from transcript Glyma05g24130.1 (locus Gly ma05g24130) derived from phytozome v7.0 (chr-ID Gm05; pos 30159024 to 30159601 reverse strand)
cggcgatattcaaagaatttttctcgctcctcaaggtctctctctcaaattttcggattactcttttgtttagatgcaaatttgattgtggtgtgttaaaaatcagatacctttgattatatgtctcgctgatttattccatagacaaacgtttttgtttttaattaaattttaaagtttactactatgaaattggtatttgacatttttaaattggtagaatagcatagcaaccccacatgtctaacgctgtagtgtcaaaatcactctagatatatgacttttaaaataattttaggcagtgtaaaaaaagcctttaaatgatcatggtgattgtatgaatgtaaaattgaaaagaaaaaaaaaaaaaagttcaacgacctacttaaaaatttgttaaatgttcaaggacccagtgacccacaaagtaattaaacctaattattataaaagttaacaattttatcatacatgaccaagtgcctttacattgttatagcattctatggttgagattttttttattatttgaattttttgcagattcttctgtccaagtgcctgctaagaggtcacgt

SEQ ID NO: 22004 - DNA, 644 bp, Glycine max
  Intron number 1 from transcript Glyma06g44890.1 (locus Gly ma06g44890) derived from phytozome v7.0 (chr-ID Gm06; pos 47705442 to 47706085)
aaagaccaagaccaaagtatctttatgcggaataatcttatctcatctaaactattcaacatcaatgagacaaaaaatatttaagattttttatttattttgagagacctttttataacatataacatttttactttaaagaactaatagccaataatggttttattgatgagcctataatttaattaattgcctttctctttagctggccagcccggcttgtatccccaacaaagattctcccaatatttaaagtagacaattatatattctaattcaaactcaacttttaattaaattaaagatctacatgcttgatagacaacactatccccttttgaaaatggtaaatgtaaattaattatttaattcgtgaataaaataattataaacaaatgtgtcgctatatacattgcgggttaatttacacttgttgtgattacattacaaccttcatcttcctgcctttagtgtaaatcatgggtcctaatcatttgcagactcctatcagtttgggagatgcaacgagagaatgaagattctgaagaacacacaatgctcaagtcaacaaggtgcagcttcacaacggagattacagcacaaggaacttgttggggagaacaaagctattacttcagagttga

SEQ ID NO: 22005 - DNA, 214 bp, Glycine max
  Intron number 1 from transcript Glyma08g36580.1 (locus Gly ma08g36580) derived from phytozome v7.0 (chr-ID Gm08; pos 34671605 to 34671818)
ctcttatttttcaccgtaagtggtcaatagcatcaaatgttttgccaacaaatagaaaatttgggacttgaaagtagattaaaatagcttgtttaactgaagatatgtttgtaacagggcttttgacttatgctcccctcatttttattttgtaatttttacaatgaccttggtgacaggtacttgcaaactggacctatttcttggcaagttt

SEQ ID NO: 22006 - DNA, 970 bp, Glycine max
  Intron number 1 from transcript Glyma06g45950.1 (locus Gly ma06g45950) derived from phytozome v7.0 (chr-ID Gm06; pos 48674904 to 48675873)
ccttcatccgtaagctcaataatataccctttatttttgctttttgctttcttctcagtttattggctttcctcatttcttgaatttcacatgtgtgcaatagctagtttgatgcaaattaattgaattattctttgattgttaatgccaagttcagcatgattgttgttcatatgaaaaacttattttgaatttgaatttttggtgaaaatttatacgatgcaatatgttttgttctgaggcaggaaacaaaaaaggatcccctgtgggtcttttacatttatttttctctttttcttatatatgtatgaaccttgggcaaaccagcatcctaaattgccatcaatcttattaggctgaaaaaggacttgtgtcatgttttgtaatggtttttcactaattagtggaatcagctagctagaatctgaagcacactttgattcatcattgttttcttttagtttctccctagccagagatggaaaaaattattaaagttcaacccctttttttcaacgagaatgcggtagctctgtctaattgataatattggtagttattggattattattacacaaatatcagtgcttgaagaatacaaaactattgtaccatactatgcaaacctcttctgtttgggttttctatatcataatttttgttttcctcttttgtcaagcaattgcagaatataaattgtacatatagcttgtttgatttttgaagaaaaatattactgattttgcaattacggacaagaagaagaaaagtgttaggattgattgatttcccattctgtgacttgtgacttcaagagactaaaatagtcctaagaaccatacacataaaaacatatcatgcatgctatgttatgtatatggaaaggttaagatcatggtttggtgaatgctaatgcaaattatgtatatgaacagatagtggaggaagaagcgaggttcgaagccgaagt

SEQ ID NO: 22007 - DNA, 769 bp, Glycine max
  Intron number 2 from transcript Glyma08g05590.4 (locus Gly ma08g05590) derived from phytozome v7.0 (chr-ID Gm08; pos 3997972 to 3998740 reverse strand)
cagcacaaccagagattggaagtatacttgtcaaggtttcttcattcaattaatttagattttgttttccccctaagttcctttaggcaattaatttatgctttcatcatctttgttcaacttgatctgcaagagtcatcatcatcatcatctttgttcattaactttaatttggaccggtgagttctttagattgttatgtgtcaatttatacgctgacacgggcacacatatggggatgcaagcgagggttggggagttaatcttgactaatcaatatttaatacatgattaagcaaaaaaatctatcttaatctttcttgtaaaatttaggttaaattagttttttactcttttaatttattatttatgttcaattggtctctaatttttaagaccgattcaatttggtcctctagttttttaaaatgcttagtgatggttttgaaccgtcacaaagtttgattcttaccatttgaactgaatgattaaattgaatcaatttaaaaaattttacgatcaaattgaattttaaaaataaattagagggctaatttgatctaaaatttagtagtctgactctacagttgtccctaaacacacacaattcacattaattttaccattgtaaataataaatcaaaaagatgtgcctgagcagctgagcttaataacacatgttgtttgcctgcataattcatgttctatatggcatttgttataattgtgttatctatttttagaatgcagaaattagctcaggaacaaa

SEQ ID NO: 22008 - DNA, 423 bp, Glycine max
  Intron number 1 from transcript Glyma06g40760.1 (locus Gly ma06g40760) derived from phytozome v7.0 (chr-ID Gm06; pos 43931213 to 43931635 reverse strand)
gactggaatcaagcatctttgcagctgtaagtgtagtctgtgtcaaagacaaagacttctacaacaatattactctaaagtaatacccccccccccaaaaaaaaaatttaaaagagaaaaaagataaagttttttttggatctttcgttttctgtttttctttctaccttaccataatggaataatattgaagaaaatataaagcaggttatagatgcggccgatgcaaccataactatagtcttgttatggtcgtgtcaacttcaaaaatcttgatgttgtggctgaaattatggccataaaccttttcattttttttatttttatttttataaaaaaatcttgcaagttgtaactaacttttgtgtgtgtgttttgattgatatagccgaggtgagaagggttcagaaagcagtttcaggt

SEQ ID NO: 22009 - DNA, 874 bp, Glycine max
  Intron number 3 from transcript Glyma08g10130.1 (locus Gly ma08g10130) derived from phytozome v7.0 (chr-ID Gm08; pos 7277667 to 7278540 reverse strand)
ttcgttctacgatacgttactcagttcttcaagaggtagtgtatctcctctgtctttttaattagtgacataaattgaatttggccaattcttaacatgctggtagttcactagattataatgatgtataattttatatatggttattcagctagtttttatttcacttatttaggaatgcatgtcactagtctgcagagaatatttaacatgcatgtagtaaacagcacactctgacatttctccaatctccacctattcaaactcttaacaaaatacttttttacgtcactaaactcctacatttgtctctatggagcatactatgggctattagactatattcaaattttagaaaactcagatctatatatgtacaacatctttacgtgcagtcattgtaaattagagatccaagccgaaataagcacagcaacatacaattcttagagggattatatatttatattcttggcatctaaataatccaattgatgtaaatcctttgtagtgcaacggtataccattcagagagccctttatagcttagcatccgattcagctcccattcccaattctgaatattcaagtaaatgtagaattgtagattcttcgcacgcaatacttccacagcctttgaataaaaaataaaagtgttcaaaatctttaattattgttgaagacacttatattgcaattttagcagtgtttttttaaactgcactagaccagcttggaaatgcgaccttatttcttgtatgatttcttatcatgcaattgcaagagaatgtctgtgcatgttgtaattgaaattactgtatcaatttgaccttttcttcccgtctaaactttttgtattttaaaaatttcaggt

SEQ ID NO: 22010 - DNA, 504 bp, Glycine max
  Intron number 3 from transcript Glyma07g29950.1 (locus Gly ma07g29950) derived from phytozome v7.0 (chr-ID Gm07; pos 35029478 to 35029981)
tagctcactccaataatctcaccttttgtgagcaggtaaatggttattaaactcattgatctatttattaacaatatatacatgtagggactcgaatccacggtctctttttcatgttcccaattctgttccctaatatagtactttaatcaagaaaaataaaatattttcaaagagagatgaggttgattttagttgtctcttggcagattttttttttagagtagttagaattgggaacaaagaaataagtttgaatttgaacacatacttgaattttagccacagatgaaaaagagatccagaaattttccactataaaatttaccatattagtctctatttttatgccctcaaatgttcatctatcaagtatatgaagtaccagaaaatagtcataatcaaattcacagatagaaggtcaaacactacaggaagaaaaaacatgtacataatttgcccaaatgagttatataattatgtgtgtcaatgcaggtgaagttg

SEQ ID NO: 22011 - DNA, 842 bp, Glycine max
  Intron number 2 from transcript Glyma08g20430.1 (locus Gly ma08g20430) derived from phytozome v7.0 (chr-ID Gm08; pos 15454248 to 15455089)
ccattcgtatccaggcagtgtttcgaggtttcttggtaagtggaaaactcttttctagttagctaatttcattcaatcttttgcattatcatgaagcagtttgttctctcttcaaggatttatgtttttcctttttagctttttagttattatgagtcttggtattgaattgtttaagaaacaaaagcagttgatactacattagtccattctatgcttgaattatttaagacattggaattttagattgaagaattagtgctaggcaagagtccaagttcaatttaggatcaggacctcctaatcatactatcatagtatggacttttatagaagaattacaaataggttgcatggtgcttttgttttgttaatttcactattttgaaacgagccaaatcgtgatgaaacttcaactcttcaagcagttagtattactaaagataagcttttgttatgagttactaagttcaccaattcactttgacttgctatggtttgtattttatttagtgtttaatcaataatagttcactatggtaatgcaacttagtgtttaattcataataggagtgatggacatcaacctgcaatgtttatagttttctaaaatcctctagccctgtgtagatgggggttgattacagaaggatctgccactctttcggtggttcattctgttgtgttgggggtttcattattagtatccttaaaagtatgttccgtgtgttattgtgcttacacattttttgtcaagttttttctccatttctttgtttgttttaaacttttgttattgatttacaggcaagacgagctttgagggccctgaaggcagtggt

SEQ ID NO: 22012 - DNA, 917 bp, Glycine max
  Intron number 1 from transcript Glyma06g03120.1 (locus Gly ma06g03120) derived from phytozome v7.0 (chr-ID Gm06; pos 2193387 to 2194303 reverse strand)
aaaaccttgtatgtttcaatttctcttcttatcttatcaataacgacaatactctttcgttttttcttctccgtgccctactgttaccactcaagtttctgctttatgatttttcttcttctttaacgatagcgctgttgcgttgtgaatttgtcatatcctgattccatcttaggccactaaactatccaataattttgttgctcctttcactttagtttggtttcttaaccaagttattgattaaggactcgactataatgcagaccctcgtgcgtaattggccggtggatattaataatatcatgttgttgttgcgataaaagatattcctcactctcagcgaaacccttgaagcgtgttgcaaatatttcaattaaattatctcctcaaagatatttcctaaccctaatttctgatggccaaaattgaacaaacgagggattgggacacatgaaaaatataatatttctcatccgctgctgcgtaccctatgttgctctctcatgaattaccactaatctgcgttttggttccggtgattaaatttttttgccctcatttttatttttgaaagagaacataattcaaccccaaggggttggttgagcggactaagacagggtatttaggtttcaaccctcgctcttctcctcgaggttaaataaacggaagtttctttgtaagtgttctttaaacccggagacttttcttgtcttggattgaagcgccatgccgcatctcctttccgtaaattttatctaccaaaagcaaatttcagttgagattgaacccttttagtgtgctttgttggatttctaactgaattgtttgatttcctggttccattgattctcttgccatagttaatgaggttccacacttttttcttggctacttgaatttacaggctgtaa

SEQ ID NO: 22013 - DNA, 580 bp, Glycine max
  Intron number 1 from transcript Glyma06g23580.1 (locus Gly ma06g23580) derived from phytozome v7.0 (chr-ID Gm06; pos 20913092 to 20913671 reverse strand)
cttccactttccttcacggccccaaagtccttcaggcaatttttttttcttttaatttctttttgttattttgttgttgggggaatgctaacgacatcatctctctctctgacactttctttctaatcattcttgcgtgattgactgaaatttgttggaaatcatcaattttggtggctcttacttcttaaatgggacccaccaagagtgatttcccgaaaatttcagtcaatcacatagccagtgtgggagtgtcgctagcattcttctttgatgcaattcagtttctgagtagttttataaaatcgtcaattttgatgggtctcacttctaaaatgggactgccaaaattagtgactttagaaaatttcagtcaatcacataaggagtgtcagacagagtgtcgctagcattcctctttgattcaattcagtttctgagtagtttgataaacggggttaaacttaagggttggtgttgtggcttgtatttatttatttgaaaaattgaatggaaggatgattgggttttgttggttttagcagataagttcagtgagggacatatctaagagcagtgt

SEQ ID NO: 22014 - DNA, 948 bp, Glycine max
  Intron number 1 from transcript Glyma05g15730.1 (locus Gly ma05g15730) derived from phytozome v7.0 (chr-ID Gm05; pos 17419350 to 17420297)
gaggccattgagagattggagccggaagagaaaaggtttggaccattgcatttgcattaattattccaacgaaagcaattggagccacctttctccatcaattatggccctactgtccccgcaactggcagttgcggcatcccatccctctctcctctctccccctatcccgccagctccaaaggcgggactgcccacgtaggcatgtcccgccaggagaaatggcggtacccatttttcactcctactcagccgtgtttgtcccgctgttgttattagcggtacccattataccgccattggcactggcggctcacccttcccgccagtgtcaatggcggcacccacgtaaaaaacaaaccccctctgcaatttattataaataagacccactttcgtaaatagtttctaaaagaaaccctttaaagtaaatttgtcgcatctgattcacttgcgagatgcatgtctaatctactatattataaaagagaactccagaaaaaccagaaaaattactggtgtgatccttcttaaaaaattgacacatgtctcttttatgtccaattcccactcctctgcttgtgccacgtgctcggtgtttaaaccagttttcattttttgggtgtaccacgttctttgatggttaaagctttccggtggggttagtgccagcgacacatgttttgctttttttcactgcagcaacacgtgtttttctttttttctccaaaattgttttatctctccatttctctctttgcagtacacacgggaaccttggagaattctaaaatacaaaaaaaaatctgaagttgagatttttttattgttctttgcatttcttttgcacgttttctagaagtttttgactcactttggtggtgttgatttcatggccaccttttagtcctagcatcgctgcgtttttggtattcctctctctctctc

SEQ ID NO: 22015 - DNA, 480 bp, Glycine max
  Intron number 1 from transcript Glyma06g08440.1 (locus Gly ma06g08440) derived from phytozome v7.0 (chr-ID Gm06; pos 6153558 to 6154037 reverse strand)
ggagctgccaggtacatgtgtttttgttgtttatcttctgtttatttgtaattcgtttttatgcacggatactatataattgcagacattatttatttgattttgggtttttcttgtagatgcatgtaattatatgtttttttatcatattgttttcaatctaccattcaatcttttcatctccatagttttcaaaaattacatatctctagcctctagggtttcttcctaatacacgcatccaattctggtatctttttttacgggaaagtgattgacacacttattccaaatccattatattttttgttatataacacgctaagctaactaatctaaatatttccatatattagggtagacgtttgtctttcttgtgatatatggataatatatacgtgctatatataataatttgaatgtatatattctcatcaataaattattctataattttttcatgaaatagggaaggcaaag

SEQ ID NO: 22016 - DNA, 736 bp, Glycine max
  Intron number 1 from transcript Glyma05g36850.1 (locus Gly ma05g36850) derived from phytozome v7.0 (chr-ID Gm05; pos 40602692 to 40603427 reverse strand)
ccggagaattcgcaaataacctttccttttccaaggtatgccggagaaaaactctgttttgattggttgcacggccctcaaaattggtttattttgtgttttttttttgtttgtttgatttgtgtttaagatttgttttttcgatttttggattcaatatttgggtttgtgtagtaatactatgctttttctaaattttttacggggcctattccgctttgtaaattgtggtgggccccaccgacaggtaaaagcagcaaaagtgttgcgcttcgctttattccatagtttatagttttataaacagacggtgacatgttaaaatcacgagtgtttcataatcatacgaagctctgtctgtttcacaattaacccgacaagtacataatgtactttttgatgtgatgtgagtttaagatccaaatccaatattacctcggatcttttttttataaggaataagtttgcacaccgaagaaagtaggaagtattgctcagttactttccatgatgtctaatttcgtttccaattagactcgtatttgtatgtttctttttctccctctcaagtccaattgatgtttctgtgattttttaagccaattttttgtctgtttagttgcgaactctggttttgattatctatacaattactttattgaggtgatgattaactcttcattatatttttcctgctgcagctagacttgcgggacagagctgccctcgagaaaat

SEQ ID NO: 22017 - DNA, 1002 bp, Glycine max
  Intron number 2 from transcript Glyma08g20960.1 (locus Gly ma08g20960) derived from phytozome v7.0 (chr-ID Gm08; pos 15933033 to 15934034)
gcaaaagctgttgaaaaccaggtaattttaaataaaaatcattattccttggaggttagatttgtgatgtatgttaatggtgtatcatgtatgatattcttgttctaacttcttagagtttgacattggtatttcaaatatctatttctgtttggtttatttttctttaaggacgactaatctggtttaaatcttgtttgctgtaagagtgttagttgctatagataaaagtcaaactgaacttgttcatattatcctgcaaagtgatattgatagcagtcctttgacttgtatttgacgtttacccttatgtcagtgactgaactgtccccagctggcaaatttgtatcattttcataatgaaaagaaattttatgttattattgttcttgggtctgttgaagttaccttgcctacttgttttcgattttgtgattgttgtgtctttgttgggggatattgtgcttgaaaaaatctgtttgggcttttgccagcaaggctcagctgcggtgatgaggctctaacatataagaagaatcctttttttgggtttcttcaatgaaatatacatgttacgcttggcttctgagcttctatcacgggttccttcctgatgctattaatataggaaagttttatgtttctttcctatgcttgttaatcattctctgatgtcagcatccaaaatttcttatgatattagtattgtttggtcttggtctgaatttctccaaatatttttgcttgaacctatgaattcccaagagtaagcctactgagttttgcatggacagtacatggttctttagttttaatctgtaataattttcttcatatgttccaatagcccaacatttccaacttaatgcttgttcatttgttttgaattgtggtgctgttacctcattataccccaaatttccaactttacctgagtcccttttcctaatgatgcaatgtgcttcaggtggccaaaaattactacaggcctgatctcaagaa

SEQ ID NO: 22018 - DNA, 655 bp, Glycine max
  Intron number 3 from transcript Glyma08g36370.2 (locus Gly ma08g36370) derived from phytozome v7.0 (chr-ID Gm08; pos 34175864 to 34176518 reverse strand)
actgtaattctcattgttctgtcttacattttcaggtatgttttttcattcacttgagtgtttctcttgtcattcaagcttttttgtcctcaagtttgatcagttttgtagattttatttatttcattttgtctgaatttacttcacaaaacatgtattttatttttttgttgatcatggtattggtacaaagtagtcccgccggatgcggtgactaatcttcgtcatggaccatgagcacacacaaggtgggtattcccctcccaacatgatttattccatatccaatggacaaccaagattcgaacactagaccacttggttaagggagacaaatagctaccacttgtggcaaccattattggttgaaaacatgtagttttgtcatttgtttcatgcatttcattttactaatgaattttataatgtactgggtcttaatggaaaacaaagggtaaaatactatttcaaaattttaagcagccttttgatcgaatcacacacatgagaggcagagggagaaaattttggaactaattcccacactagttctatttttaattttaatttaattctctggaaatttgatttggtttctcttctatgtttaacaaattcaggtttgcacgtgttggatcagtggttttagcacttc

SEQ ID NO: 22019 - DNA, 876 bp, Glycine max
  Intron number 1 from transcript Glyma05g35480.1 (locus Gly ma05g35480) derived from phytozome v7.0 (chr-ID Gm05; pos 39504198 to 39505073)
ttggagatcgaattattgctgagaaggtaccttttttcttcatttaccttcttctaattttacttttatttattaaataaattctaagtttcttatacactttatcctctgaaactgaaagtactacactcttctcactttagttttgaaatataatgagatttgctcaatgttgaaagtaactactccaccaaagaaaataaaataacgtgtcgagacaacatcttgtgtgtggatatggctatgatatatgatgcgtcaccatgtgaagaattgaagatacatcctcatgtgaaaacttcagctatttcttggaatatgataacagtttggtgcttttctgtaatgtttgggaaagctgtctgtcaggcactggaaacatacgagttgaggtttttgttcactacttttcaaatgattaactgattttttttcatgaaatctttaagtttcttatctttgtgagtgctagtgattggaatgttgattgtctgaaaaattttgtgaactgtgaatctaaaaattgcggattgtgagacatatacaaggttatggggattatgatctatttttttattttttgttttgctgaaacagattatttactggcttagtttttttacagatcatagttttgtatttgtagctatttgttgtgacgagaaatttttaatgttgaatttgattacttcccaaaaagtagatgaatccgtaggccttgatagttgtgacacaaatcatgtaacatatagctatgctcttttaatagattttgacatcagcattcagctagactttctttctatctgttatgatgcatctccattgtaaagatacatcttcatgttttcaggtttcatactattttagaaaacc

SEQ ID NO: 22020 - DNA, 851 bp, Glycine max
  Intron number 1 from transcript Glyma07g11470.1 (locus Gly ma07g11470) derived from phytozome v7.0 (chr-ID Gm07; pos 9651629 to 9652479)
gatcgtaacaaaaaggtccctttaaaaaattacttcttttttatgggttccataagatcatgtcttttctgtactttagctttatttgggtaatgggtattgttcaagtttcaattttttccaacccattttttctgcctttttggttctttgccatttatttattctgtgtcaggtatcactattttggttttgacttgtgtgtgcgtgtgcgtgtgtctatatatatatatatatattttaaatcatggcataaagctatgtttgatttcagaaggatggggactactagagaggttagattgcagagattgtaattgatttcatttggtgcttctttctggttatggtaagaaactaagaggtagcatttggcaattattaagatagcctgatcatggtgaactttcctttccttgctatgttttcttgtaaatgggaaatgaagagaaagagacatagttagcaattagcatattttttatttatcccccatgcactcatgacttaaggcaagagtttatcaacatggtgtgatatggttggcaaataaccatgcccgtcaagcatgtgctcaggggttcgatccccaggtccaacatctgttagaaaaggtcaaccccttaaatgaatcttcatctcttgagggattaatctctggctcttggccagggataccttcgacaccatgtgttttacatctattaccatagaacttgcagtaggttgaaagacaaccaaactaagttctagtgtactcaaattgtccttacattttatttgcctatttttacataatgatttgtggtttatcaaacagggtgcactggaggtagagttttttactgagt

SEQ ID NO: 22021 - DNA, 711 bp, Glycine max
  Intron number 3 from transcript Glyma08g11310.1 (locus Gly ma08g11310) derived from phytozome v7.0 (chr-ID Gm08; pos 8251288 to 8251998 reverse strand)
gtgtcaacaataatcccgtttttggtggaagccaggtgcgtgctaccttgatttgtagttcgtctctctaatgtgttaggtagagtttgacatgtgttgcattacctatactttgattttattccctctgatcactggatcactattttatcaccttgcaattcttgttattttgtcaagcttttgatgccctttcagtttcacacgtgaattttatgatggaaaattgtatctatctctattaagtcttaatagatattaaattggtgtatcaagatgtgttgagaatcaatcaaaagggaaaataaacaagatttttacatgataaaatcatgggaaactaaaaattgaatatgaaaggattcattcttcacaagtatataatatattgctttcaggcttaagaagaaggattgttggttagttaattttggccatgttctatcttgggggcactttgtattgacaaacatctaagtagctttctttttaaatgcatttgagctatgcaaatatagcttcattctcactattatttaattgtttttctttttttacttgtccgattcataaactttttttgacttaatctagtttaccattgaacttgtaattccatccatttttcgtgtctgtataggcaaaatgcttaccaaactaaggcttttttacaccttgtatatttcaggtgaaagaagcttgcaggaaagc

SEQ ID NO: 22022 - DNA, 503 bp, Glycine max
  Intron number 2 from transcript Glyma05g28180.1 (locus Gly ma05g28180) derived from phytozome v7.0 (chr-ID Gm05; pos 34081844 to 34082346 reverse strand)
gttccggctcagtgggatccggcttcgttgtctaggtaaacactaagctgatacaacaatctggtagatagacagattatggtatcttgttttcctgatgttaaaatagcttcttttcgctttataacttcaatttgttggtgtaaaaatagtttcgtttcctggtggatagacagattataatgggattgaatttgatagattcaatttgttgctagctttttgtgctcttatcgttatggccatccctgcaaaatctagtatgtttggtagccttgaactggttgattaaaggatttaatatcttcttaccttcgcatgaagcttgaattaccttttagcgtccgttttagttgatgttagttggtgtgttcatgtttgaatgttttatgggtgaaactgtttgatgcagtaacttattttgacattttgaatggtgcataattttgggttgataagtatatgatgctaatcaattttgttaggcaggttcatccagacat

SEQ ID NO: 22023 - DNA, 836 bp, Glycine max
  Intron number 4 from transcript Glyma07g04800.1 (locus Gly ma07g04800) derived from phytozome v7.0 (chr-ID Gm07; pos 3541355 to 3542190)
ctgctgatctgattgagaaggtgacgaatgcttcaacctaagccaagctgcgttcacatcatagctttcatcactatcctttttagattttgacaaaaattgattcaatagaatgcttaatttctagtgggttgtcacatctccacatttacttagtttcctcgaataaaagtggctagctcttaagtcttttgaattgaaaagattgattgcttgaggccataaattttcatttaacagttatctatttgagtttatagcttatacatgctcaacctttggagtgtcaagtatgtatgcatgaagatatttcgctgaaatttctcatgaaattaaacattacataggtcccaaatggaaagataaaatatggaagaatagcctttaatccaaagtagttatattttgagtttgtaacataaagcactaagtaagcaccagaggactagcaaaagcagaaattaacaaatataataactactttcaagcttcattgatttcaactgatcatagagatttcagagtacagaattcgtatttacaacagccaaaaaattcaaaaggaaaaacaagttaaaaccatatatactaatatacagaagctggatttctactcctttacatcctcagaattccatgaagcattggttcaatctgctgaaaagaccctgcatcatccgagccattttattggtaggtactcatatttacatatactatataataataataaggtgccatgcatattatgatatgattgatgattcccttttggaaattagaatctgtgttgccgtttgtacagaaattaaacgtaatccctctgcctctgcctc

SEQ ID NO: 22024 - DNA, 610 bp, Glycine max
  Intron number 2 from transcript Glyma07g10730.1 (locus Gly ma07g10730) derived from phytozome v7.0 (chr-ID Gm07; pos 8966101 to 8966710)
cactagctcttcttctgacacgttttcaaagcagagtaagtggcgaatcttgccctacaagaaacttgcaaaagtcacaaataattttaaccaatctcattgtcttggaaagagaggatttgccactgaatattatggtaagagactaagctgcatccttttatacgaacaatgtaaatagagaaggaaaaaacttagataaagtagcttaagtactttttgagcggttctcaaaacaaatttggagttcaccttggtaattgacgtaataaaagtttgcattaaagatcagtataggttataaatgtgaaattccaattttgattagataacaacaccaaaaggacctaaggaactgcatacgcattttgcccaatagaaatggcagaaagcttaggtttagttatttaggtgcttttggtgctcttattaaaattcgtgttttaccatgctaacacacacaatgaaggtcagtatttaaaatcagcattgaataccgagatgaacttcttattgaagagctaagagcaaaagcacctaaacatctgcaagttttgttcatgcaaatattttcttctggttatttaccttgtttaaggaaaacttgagg

SEQ ID NO: 22025 - DNA, 581 bp, Glycine max
  Intron number 1 from transcript Glyma05g13660.1 (locus Gly ma05g13660) derived from phytozome v7.0 (chr-ID Gm05; pos 14324757 to 14325337 reverse strand)
ccggcaactctgctggcacagtcactgcttactacgtatgttcattaatatttacaataattatatatgtttgtacattattttcatcactacaatatataatctatgccacaaacaaatatttcaaacacaaaacttaatacaggtttcttagctacttgtagtatcaaaactgcagtttcatctagataagttcacacaggttcataatgccataagttcaaaaccagagatacaaaaggaagagaccaaattcatttacctcttcaactttcaaatgaccgttgttgtgagggaatacaaaggcaaaggacaaagagaatgggaccatgaaccctaggatgtgttgttctgaaaacccaaattagaaaaaagaaaacaaacatacacgagtgagcataattgaaaaaataataaaaaatacacagcaccactctagccattacagaagacatcaacatagcaacaacaagggaccatatttatgaggcaaacagaagccccaatcaattaaagcattcttacatgtattattggcaggtgcgacaatcccttgtggagggcgtagagacccagaatcg

SEQ ID NO: 22026 - DNA, 319 bp, Glycine max
  Intron number 3 from transcript Glyma07g18630.1 (locus Gly ma07g18630) derived from phytozome v7.0 (chr-ID Gm07; pos 18673812 to 18674130)
atcttccttatacagatccaagaggcacagggaaggttagaattatatgcaagctagcaccatcaagaaattagcatttttgttgttagtcatatactcatttgtttatgatctgatttaaataattactattttctttatgatttgattattgcttttcttttcattcaaatataacttttccttttggtttgaattgaaaataacaaaaatatctcagccagacactgttgtattttcttgttgataaaatagtacttttatgtacttgtaacttaagctatcttttctgcagattccaaagcttctgttgcataga

SEQ ID NO: 22027 - DNA, 841 bp, Glycine max
  Intron number 1 from transcript Glyma05g31720.1 (locus Gly ma05g31720) derived from phytozome v7.0 (chr-ID Gm05; pos 36809160 to 36810000 reverse strand)
tcgacctcaacactctcgaatttgccatttccaaggtgttagtttagcaccaaatgtctattatgattttcacaccaaggggtaataaacacttgctttgtttgttaattgttagataccagttgaacaatgtaatagagcattacaataggcttaagttaagaacaattgagataagaattgagttccaattagattctttggctttatatttatgcccctatgaaaatattgctcccagttcagttacaaggtagtttactgtctgtgtgtttagattagcattggcaaaattaattttgaaccaaatttattttgcaaattgattttgaagtaggagaatgctttttagtacgaatccaaattcgggaaaatttacgagatgatgtgattggttaaaaatgttcaattgtatatgtagatacataaaatccttttttatagggatccaccatttatggttataaattcccacttttggtactcaatttcgtaaggattttttgcactaaatagcactactctttgaagcaatatgatttatgtttgaaagtttttattctaaaagcaggtttgtagcaaaatccaatataattttttatattcaatgtaaaagttacctaaagttgattcaatcaaaataagttctagacccataataaattcctcaaggtagaaatagaatcaagcatgtgaaatttaccaaaaatcacattagctgatattctaacatgtttctagacaattcaacgtggaaacaaacttgcacttactgtctagctttggagctgctactggttaggtaaataatagataggcttgtttgtgcagaaagacagtg

SEQ ID NO: 22028 - DNA, 408 bp, Glycine max
  Intron number 1 from transcript Glyma08g21380.1 (locus Gly ma08g21380) derived from phytozome v7.0 (chr-ID Gm08; pos 16221510 to 16221917)
gagttgcagcttcatcattcagaaggcatctcaaggtcactactaacactatcatatcatccttttttttcattccaatattaatgttttggatcttaccctgataacaaaatttgattttgatcggtaaaaaatgtttctttattgattttcttggaaattagtttggtgggtaggaagattggagccccttttatgattcattgtatgaaattgaaattaaatcccacgcaatcggtttttctaattcctagattgttttgtcatgttacaattgactgttttgttattcacataaaaaaattagggtggcattcaatggtgtaatggaatattcttttttgtggtgaatgctgctgctgctgctgtttgtgtgattttgtgtgatgaaaccatgtgattagggcc

SEQ ID NO: 22029 - DNA, 650 bp, Glycine max
  Intron number 1 from transcript Glyma05g37420.1 (locus Gly ma05g37420) derived from phytozome v7.0 (chr-ID Gm05; pos 41030003 to 41030652 reverse strand)
aaggtgaaatttcttcatcttaatgacacttcagtttcttatatatgcaagagcacaccacttactctctattgttatatgtttttccctttcatatatttatgtccctttctcatgattctttggttcttcatttaaacaagaaagaccagttcaatacctctttttatctttattgtttaagtagattttgatatttatatcccccaccctactatgttttattactatgatacccattttctaatttgtttcatacatattatttaattcaactatgatagttggtccagattatatcatagtatatatctccgttacaatataatttgacatctcttcttctcctagcttagctccattttttttcaaaagaaattaaagatttcataaaaaataaaataaaaatcaagctaaacatgttttaattagtcattaagatcggtctaatgatgagagggttagataatatgaatagatcttaagttcaaacgtcgctgccgccattgtaaaaaaagaaaaacacgttttagtagaagttttgatgttaattggtgattgttatttatttccagactgcttctatcgtttctctaagtgtgatccttttgttttgttgcagaaagtggtggtgaagttgaatttgcacg

SEQ ID NO: 22030 - DNA, 771 bp, Glycine max
  Intron number 1 from transcript Glyma08g08430.1 (locus Gly ma08g08430) derived from phytozome v7.0 (chr-ID Gm08; pos 6041278 to 6042048)
aacccttgacttcccctgtgttccaggttaatttccctccatgccttgtttttcttttttctgatctgggtgttttgtttctaaagtttgcattttgattggtttttcttatggagattgtttgtgatgttgatatttttttttccccttctgtttgtttgttaaactgattctagatggagtgagttgtgtgaaggggttgtggttagaggcttgagaaattcagttgggattctcagcgttttagggctgtgcttgaattgtgtgtgattttgaaatttagaggaaaaaaaaagggttttaagctcttgatcttggactaaaggtacagcctttgggtagtaatttaggttggttattcgtatgagtggagatgttggtaaagaatttttttttttttttgaatatctaaagtttaggtaagttggtccttggtccctagagtcagggcatgccataaggctcactaaaggcttacaaaggtatttaagatcgtccaccaacaaggtcctcagattgatagtggattccaattcacatccttgtagttggtgaagaagttcagtactaaaaggaattgacaaagtgagggtccattaacctaatgttatgtaataaactcattagagtttagccaaggttttcctagctccattttgttccttttgttgagtttttcttttattacctatctgttttgttggttgttccatgtaatgaaaaacctaatttgataacttctttgtgattaaatgacaattcagtgtgaga

SEQ ID NO: 22031 - DNA, 399 bp, Glycine max; identical to SEQ ID NO: 18565
  Intron number 1 from transcript Glyma07g28520.1 (locus Gly ma07g28520) derived from phytozome v7.0 (chr-ID Gm07; pos 32594394 to 32594792 reverse strand)

SEQ ID NO: 22032 - DNA, 781 bp, Glycine max
  Intron number 4 from transcript Glyma08g24210.2 (locus Gly ma08g24210) derived from phytozome v7.0 (chr-ID Gm08; pos 18410047 to 18410827 reverse strand)
ctccccaagcccaggctttctactatagaggttaatctttatttcttcatttctgcaagtctttttttattctttgaaagaattctaactcttttattaagttgatcgaccaccttggaacttcaactatacatggcttttaagtttttcatatatgtgggcaatgctattgtcaatgttaacttcctcacgtttgtgttactgttcttcacattttgaaataaattactgaaacggtaatatcattttgaaacacatgattttaatgtaacattttcccgagttatttattcttttttaacctattcagcgttcttcttacactagcagtcatattgctttcattgttatccatctttatgcaaatttttcatggcacacaactctagaaatctatgcagatcgttaaatatttaatgtttttggacttgaagaagtttgtttgttttgataatcagtatgagttttcaaaagtgtgtgagacattaaataaatttttaacacctttgatatgaatgtagggattttgttcttttatgtacatgatttagtaacatgcttttggacacttctgtccaattatttttccccccttaaaccagcaccacatattattatcagagaatttttcaaattgcaaagcggacattgacaattggactctcaattgtcttttggtgctcatcttgaaagtgtgctttgttgtgcaatgcttgtttggtaattggtgtttatattgctattttctaatttttggcaagtctgacttcaggttttgaca

SEQ ID NO: 22033 - DNA, 678 bp, Glycine max
  Intron number 2 from transcript Glyma08g24210.2 (locus Gly ma08g24210) derived from phytozome v7.0 (chr-ID Gm08; pos 18411101 to 18411778 reverse strand)
aacccaaccaccgcagggtccggatcgtaccaccggtaccgttcaactcctttcttctgtttgttattgttattattattattattattattattattattattatttcatccaattttgaccttcccaattttctctctcgacgaagtcaatgattaattttaccattcaatattaaaaaaataaatcttgttttgtttgtcgttgatgttcgatgtccgttactttcttaaaccttgcatctgggtaagacaagaattggtggtgtgatctggttatttggattttctgtgtaatgaatgattatgacaccatccctgatgggatggatcatcgtggtctcaagcgtttatagtgtgtgtgggtggtggtttaagtcaagcttccccgttttttgatttcataattatggcttaaattatcatcctgaagggtaattcattttatttttgtatgtgggatctattacacttcattttatgcttccagcaatactgttttactgcgcccttgcccgctttccatttcaaagtatattcacgttctttcttttaatcatgtgtgcatttgtttgcacgtctggatttgctatctccaaatttagctttggttgctcaataatttgtactgctactgcctgtttttcgaagatcatactgtcaattgagcttattgatc

SEQ ID NO: 22034 - DNA, 708 bp, Glycine max
  Intron number 1 from transcript Glyma07g30290.1 (locus Gly ma07g30290) derived from phytozome v7.0 (chr-ID Gm07; pos 35323817 to 35324524)
accttccctcttcttctctctccgccttccgatcggtaccattccgccctctctttcgcatctccattttcactctttctacacgattaaacctcacttctaatttttctgagatgtttgttgagttatgttacgaatacatcgaatcactttgtttttagaaactataacttattgatttttaagatctatgagacgaggctctgtgtcccgtgattgtgggactttgttgtgaaggtgaaatcttcttatgtgaaataagaaataaaattttaactcgtcagtaatactaacagatcttggaatttaccgtttttagaaatgttttgagaaccacacttttatataagatagagacacttgttagtttgaatgtcactgattattaggttatatattggcttgaagttttgctagataatctgcgttttttctgtgctgctgacttcattgtaactttgtattgtatacaagtaagaatgctgttttggatgtatgtaatcttctttttcctccataattgacatttttagaactgcctatccattcgggacctagtaagtatatgaagaattgttgatatcatggcatcgtttgtgcaatagtgattgttgaacttgtgttgatcatatgttagcactgttctgaaggtaattttaattttcattcacatggttgtgcagttgacgagtggcacaaagacatcat

SEQ ID NO: 22035 - DNA, 700 bp, Glycine max
  Intron number 1 from transcript Glyma08g15100.1 (locus Gly ma08g15100) derived from phytozome v7.0 (chr-ID Gm08; pos 10951709 to 10952408)
cactctcttctcgtctcttttccaaatccaaattggtatccctcatatcaattccttctcttccattagctaccaattcttcatagtgtttttttccctttcacgttctcacttttgattttgttgttgcaatctcgggatctgcattgctttcaatacatctagcgatatctgattgtctatctcgataatttaaaatcaaaattattcggaaaagagatatatacgctagaattcgagggttaacatttcgtttatccatgtcttttggtcaattaggtttttctttcttcgctgattctattgtttggggaaattacgtttttcacttgtttgcaccctaggagcagtcaatgtgtttggatttatgatccctgaccatcatcagccatggccacccgattaaaaaaatgtcctggtgctctgtcatattgagttgcgtaatagtgtgtggaaatgaatgatatgaaactcgtgtttgaatgatggtttattcatttaaaagtgacgatgcttgtgatttatctactgatttatctcatatttagttgcggaatagtatgtgaaaatgaatgatatgaaactttccatggtggttaaaatgcataagttttgtttattaattagaaagtgatggtgtttttgatttatctacttttttttgtcatgtgctcatttttctccattttcttacagatct

SEQ ID NO: 22036 - DNA, 838 bp, Glycine max
  Intron number 2 from transcript Glyma07g04160.2 (locus Gly ma07g04160) derived from phytozome v7.0 (chr-ID Gm07; pos 3024378 to 3025215)
aaattgccaacccaattgtatacaagcttgttcgggtagcatatttaattgttcgttgaattttcagtttctcattgtaatttggatggatatgcatgtttttaaggctttttagtttgatacttagatgacaacaaatcaagatgaaatgagttgctagggaaccttagtgttttttttttccagcatactagtaccgttttaagggttgtgatgctattttttatccttataatttacctgtttattagactaaaaccctaaccattgtccctgaagtgttccaatgtttcatttttctttgattcatattaggaattattaattattagattaggtctaataattaataatccttaataaataattctaatatgcataaatatcagcatgattgcttgttattctagctgtgtcacttttttgtttgcctattatttattatagcattcacaataccttgataccctttttttccagaaatggcccgcaatctcagctacgaattaacaaaattcctgacggtttcccatcttccttttgtagtatagttgttctataaattactttctttgatgactgtgcttttttttttatttaagttaactcactttccctaatcttatgtaatggctgaaatgaaaatgtagaaatttgaaaaaggaatgtgactttgtgttaagatttagtttaattaaatcaaagaaaagcggaagtttatttgaaagtaaatattttattatttggttctacattttcttgtgacttatacttctgtttaagctatattcataattctatgagttgtctgtctgatatgatctttaggttgaaggtg

SEQ ID NO: 22037 - DNA, 936 bp, Glycine max
  Intron number 2 from transcript Glyma08g18510.1 (locus Gly ma08g18510) derived from phytozome v7.0 (chr-ID Gm08; pos 13904504 to 13905439)
catctggcaggaaaggaaaggtttgtgcctcattaaatcttagtacataattaacaatatgtttttttgttaaaatgatttcattcctctaaactgggggtataagtcaagtaatatagtcattgatgagaaaatcaacacttcttgtccgttctgtctttctctgagagtgagggtagcagttctatgcattcatgatttgttatgtaagtgcataaaatcattagtttgaaatatttcacacacacattaagtttggttttcagttgagagacctccaacgtctattaaaaaagctcttgtttgattttcagttggattcgaccgtaaaccgagttttgcctcaattttgtcttgaaacttagtttgaaatagaagaaaaggaagagttgttttcgcaaactcaatctacaaaatgaatttcactctaacttaagtttgcaaactttaatccaaacatgtattatactaacgaactacataaaagttaacagcaataatatcctgtaaagtggttttaatatgatatttattgctcttacttttaagtaacgaactacataaaaggaaaagaaaatactaatttaaactaattgtcctgtttatagttaattgaacatgggtactacttcttgttatagaataatatgcaccgacaaaaaaaaacagttttaatgttatctaacaaatcatttaaattactttaaaataatattttaaaagttaacagcaaaactctttgtctgtaatataaaatcattcacacatcttttaatgttgaatttctagaagagacaaatgatttttttggtacaagaagagataaataatttaaacctttgagattgctggcggtatttactacattattcttctaattaacttccaaacatcaattcagggaaagggcgtttaccagtttgtagacaaatacgg

SEQ ID NO: 22038 - DNA, 351 bp, Glycine max
  Intron number 1 from transcript Glyma07g02010.1 (locus Gly ma07g02010) derived from phytozome v7.0 (chr-ID Gm07; pos 1404925 to 1405275)
ggactgtttacacctacaaaacgcaccattctcaggtttcacgttaatagatgtttcgttatattcgagtttgatctctattgctttattgataataatatgcaacgcgagacaatgaattttctaaatgacatacatattgttttgagtgaaattaagaagaattttcgatcagtatgtgaatttaattaacagctctgtgataattaattgttttcgcagttcataaacgaggtagtgttgttgatttgtgaagctggtgagattttcggtttcataactgctttgttttgtgatgttgtttttgttagagcagtggaataatttgcagtggacacttgcttcggttcc

SEQ ID NO: 22039 - DNA, 942 bp, Glycine max
  Intron number 1 from transcript Glyma05g29850.1 (locus Gly ma05g29850) derived from phytozome v7.0 (chr-ID Gm05; pos 35332193 to 35333134)
ggccagaagcgcaatattacttcggcgttattagggttagtatactacttcaaactgctttgttggattaattattcattctctcctttcaatttcacatttttctattggagtttctctgattccttttatgagttctaatacgccaagtaactttagattaaggggtttccgctatagcctagcccaacacggaaaacattcactctttcttctatctcattttcatcccatttttttcttaaaattttcctatttctttttcattgtatcaacctttttttcttttcttttctctctctctctattttccattccaattcaccccaatgtcggattatatttgagatgtactttctgtattttcttaaattcttgtctcaaggaagagaaatacggtttcaagtttgtttccatagtgtttgattaaagtaaaaggatttttaaatttattcatttttatttcatttacaagtttaaacaaggaaaatagaaaaaaaattaataaagaatcaaaattcttcctctgtctcactcatttctatctctgctttgatatgagatttgaaaggagagaaagatgtataaagtccgtaaccttttgtgactggattatttttaatttgaatacttaatagtagaatttaattagaatgttataataacagcctacttttgtaataatttaaaattatttataattaattgattatattaatacgatattagttaattttttctctatgatagaatcaattaatttcacgtttggttcatgatcaatgcattaaaaaacttgtaaaacggaatttatatatgtgcagtatgtagttgtagaatgctggtgtagaagttaattttattttgctaacttatgatttttcttttgcgtttgaaatttgaatgcatggcaacagatataagcgacctgcaggtggatct

SEQ ID NO: 22040 - DNA, 568 bp, Glycine max
  Intron number 1 from transcript Glyma06g18140.4 (locus Gly ma06g18140) derived from phytozome v7.0 (chr-ID Gm06; pos 14479788 to 14480355 reverse strand)
gaaggtgcaatgctgcaacaatatcgaagtaaaagaatgcaacaatatcgaagtgaaagaatcgtaaaaataagagggtgcgtgaataaaattgtgggtgcgatgccacaataacattggtgtgagggagtgatgaagacaagatgtgttggagaatagaaccatcaatgtgatgtcacaacggaacgtgagtggtgtaatatcacaacgaaatgtgagtcttggtgaacgtgaaaataaaacatgtgattattttgattgtttcttgattcttgttttgttttcttttttaaattatttatcatttaatttaattaaaaaattatggtgtgatgggatatattacttatgttttaccctaagggtgtggagacatatttttttagattaaaatgagatttttaaaacttaattaacaaaaatgaaaaaacattaaaacataaagacaaaaggtaacatttagctcattaaacgacgccgtttcgacggtcctcaaagttttaaagcgagtcgagtcatctcggaagtggcagtagctgcgtgcaaactcgcggcggaaggcagcaga

SEQ ID NO: 22041 - DNA, 510 bp, Glycine max
  Intron number 4 from transcript Glyma07g37950.1 (locus Gly ma07g37950) derived from phytozome v7.0 (chr-ID Gm07; pos 42821010 to 42821519)
cgtaagagttagtcatactttgacagttgtgattgttgttatgacttatgagcgtaacttctctttgtatgctgactagtgggtttgcactttggactgaaatttcaaagaatagttttcataccatgatctatttggagattgtattgcaactaatctataatacctcgtagatccttgttatttttaatgtctttctatccactaatactcatatatgtaggtatatttttatcataaatgtttgtccacatcttaaggaaggtttgagatttctgggtgctttggggaatgggatggatgggaaagaagagagagagagaggagagactgaatagaaaatgtgatagtggtttatggaggcaacaattgatgggtaatttagtgtaagaaaatgtgtataccaaaatttcattttgccttttaatattgttataaattatagatttgtttttccttgcttatggaatttcattgttcaggtccgattgacagacagtacattaaata

SEQ ID NO: 22042 - DNA, 456 bp, Glycine max
  Intron number 2 from transcript Glyma05g34850.1 (locus Gly ma05g34850) derived from phytozome v7.0 (chr-ID Gm05; pos 39070298 to 39070753)
ctcctcaatcgagccgttgcggtgcgtctgcgccacactcatcttttcattccttttttttttttgctaatttatttataaataaaaataatgtactagtactccagtagcagtagtagtaattaataacacctttttttttttcctttgtcttttttggttgaaaagttaaaaccgaactgtggtaagtttgaaaagcgagactcgtctctcacgggagacatgaaataacttcctgtcacccattccactcaacaacactttaccgggaattgaatttctttttctcttctttgatagttgtattttttttcgtgtgtttttctgtgtatggttaatttgttaaacaggtgcatttaatacattttccgttaaaatttcgcgagaaaatgaccgtttgtttgtttgggtgagggtgcaggtgttccagtttgctgacaagcatcgtggtgcata

SEQ ID NO: 22043 - DNA, 877 bp, Glycine max
  Intron number 1 from transcript Glyma06g10540.1 (locus Gly ma06g10540) derived from phytozome v7.0 (chr-ID Gm06; pos 7983612 to 7984488 reverse strand)
actgctgtcacactttgtttagtccttcctgagaggtaaatttagatattctttatgcaatattatattagttcaaactttaaaatatttcatggaattaaaagatgtatatatttgaaagatgtattttgtttaatttgattttagccacatgtaagcattattgccatgagtctttagtttctaacattgttatattaattggatttcttttggcagggcctcatggcactggtgcaacttaaataaatactaaaaaacttaggatattattcatgctaggaaagtgtaactgtgtaattacattatcagtttttattgtagctttggtttaggggcattaaggttatatatttacaataaccattaattggccctcacttattaacttaggcttttatttagtatgattaacaaaatggcctacaattcaatctttcttgttctcagtcaaattaaagctttatcccccccatgttgtgtaagtcaaaatttgcaggattttctctgtcattcaaggtccagatgaaattttgaagaggctgcagactgctacatttttctaatgttccatacgttgtaatgcatacttcagtcttcatacatcataccttctggtcatttttaagaccaatatatcttttgcatccaatatagctacaattaattggagttctcttctgtggcttgactatatgtcttgataagaatcatatgttcttgactgcaatattgccggaataatccagccattaaacattatgctttgattctagtttttttaagtcaatataaccataaaaaaatatcggtttcctttttgttttgcacacttattttgttataatgtattttaggggaagcattgacgcattgg

SEQ ID NO: 22044 - DNA, 465 bp, Glycine max
  Intron number 1 from transcript Glyma05g08150.1 (locus Gly ma05g08150) derived from phytozome v7.0 (chr-ID Gm05; pos 8101798 to 8102262)
caacttctcaccagtacacaattgaattcacccttttataaacatgcacaccaaactaaattcaaaattcgatccccccaataaactaatcaaacatacagaatccaaaaccttaaagattcaagctacccagtctaaaataaatattgatatatagataaatagatataattaacactaacgaactcgatcagttttttctaataaagtctagtaattatatatgaccaacctttattatcatcttcttctattccggtatctttttggtaatttctcttcttttttcatatatatttgcctactttaattgatttatttgaatgttatttaggtagtgatattaatcattaagggtaaaaataacaggcaatcatatgcatatttttatttcaatagtattcttttgtgcacaccaagcaatctagttaattagccacacaaatgtctttggttggaacagcc

SEQ ID NO: 22045 - DNA, 472 bp, Glycine max
  Intron number 2 from transcript Glyma06g19240.1 (locus Gly ma06g19240) derived from phytozome v7.0 (chr-ID Gm06; pos 15439045 to 15439516 reverse strand)
gaggaagcattttctactattacactcagtaagttttcttcccttgttgtgaatttatccatctcggaatttggctgctattggaaggtacatcatggataggggcattgttctatcttggttcctgatggagggaacataaaacaaaaaatttaaagtgtaccatgtttgtatcattgctattattctttctctgctcttgaagttaaacctttataatctttgtgaccaatcactttagttagttaggagtcagaataagcatcccttttaagtaatttaattaccttaactaataatctatgatgccattataagaaactaccatttgtagatagaagtctctttcaactcttaaccgtattgattagacatattccgagattcttttttagcttttgatttgagttaattatttttaatggtttctgaaacaggtggacttttacttcaatcaccatttattttgggg

SEQ ID NO: 22046 - DNA, 499 bp, Glycine max
  Intron number 1 from transcript Glyma06g19240.1 (locus Gly ma06g19240) derived from phytozome v7.0 (chr-ID Gm06; pos 15439828 to 15440326 reverse strand)
ggtcaagaattccatctttttggttcttgatggcccaaagtttttgcacctgttcatgttttgtgatgcatgtgaaacccatgagtagtttccctttgaggtcctcttgtgttcattttgattgcatgaaatggctctcttttgttctggtggttcgtttgttcatgagttttagctcagagccttgcgtgggctctgattcaattagacccttttcaaagtttccacctttactttctgggtgtttttgtttctgagtgatcaatagaaggaagcattcatttggttttattagttcaatttgttcattttcattcattcttcttcaatagttgttgtttttccaacatttctcttttcattctttctattgtaataatcttaggaagtggaaactagaccacctcaacttaacattgttactttgagaaaaaccaaaaagaaagaaggtaaaaaataagtccatcatgggttttctaacagactctcacaaagactc

SEQ ID NO: 22047 - DNA, 696 bp, Glycine max
  Intron number 1 from transcript Glyma05g21320.1 (locus Gly ma05g21320) derived from phytozome v7.0 (chr-ID Gm05; pos 25878998 to 25879693 reverse strand)
tcgcctaccacggccctcgcatctacgaagcaaaggcatctttcacctctccccttccagtctctttcaattttctctttcaactttcttttatctctctcgatttgccgcttcctcttgttgtttttcgtttggaattttataattaccgtaacggaaatttacagttgctaactgctcagtaaccgttctgcactggggttttctgtgttttagggatttcgcttgtgtttctcatgttctcgcttgtttttgttttgtgaaaaaaaaaaattagcgaattctccttgctttgactgaattgtgacttaacagcgctttttcttgttaaggagaaactacgaaaggtctttcacggtttctcattatttactctattttctgttgttcaatttaatctgtaaaattttgatggtgatttttatttttatcgcaaggcatgcaatttttttaacatgtgattgatttcatgttgtcatatccacttatgaaattgagagtgtttttagggttatttcaattagtctttttctactacgtttgtctaatgtagggcttcatagtgaataataattaatcactctctagacagagtgcattttatacagttcttttcccatgtcgttttgtagttgtgatataatttactgcatgctttgattgtcaggtgcaaaaagccgagatcagaaagagtga

SEQ ID NO: 22048 - DNA, 564 bp, Glycine max
  Intron number 5 from transcript Glyma07g12280.1 (locus Gly ma07g12280) derived from phytozome v7.0 (chr-ID Gm07; pos 10565491 to 10566054)
gtggtatgtttacttttctatctacagaatttatgtatgataaaaatcttgttggatgcacacaattattaattatgtcttaaaacagtttttaaaaccaagacctccttatggttgatttattagaaaactggttgtttgaagtgatccagtgtcccattgaatgtttatgttgctagatgtggatactagaaagtttatgtctttgtcaggttggatggcttagggttataccataatgcctccgtaattgaagctgtggttggattttgaacttttttgtggttgttaaagatatttagaaaaacggagcgtaataaactttgaggaggaaagtacagtttttgtatattctatcacctaggttgatggttttgacttttttgaatatacaagattttaaaaataggtctcttaaattttctgttcttatcatcaattagcaattaaaaaaactttttcttcctgtatgctgaattgtactatcacatatctacttctgcgttcttatattttagtgtattcactatatatttgatatcatgatactgtttgattatgtag

SEQ ID NO: 22049 - DNA, 603 bp, Glycine max
  Intron number 2 from transcript Glyma05g35030.1 (locus Gly ma05g35030) derived from phytozome v7.0 (chr-ID Gm05; pos 39175901 to 39176503 reverse strand)
gccttgatcaagaagcttcgcaaagcggtactcttttctttcttttctgcttccaattatgctttctaatgcatacggtattatgtgctatgttttactagtgtcctgcacgacacgtacgatgaactttaaggtcaatcaattcatttaatttagtttgtgttggccccagatgactggaaggtttggctttgcaaaattgattcgtgtttggatgcttttaccctgaaaataagtttgctataaaacttgttgtaaattttttaacacaacaacaaagttactgtttattatttagttgaatcaacgttttgagataaaatcaaatttacatagcaataatcaaacatctatattttacgaagtgaattcttatgattcccaccatgaaaacatgcaaactcttaatttcttcataccatgaatatctgttaatgtgttcatttttcatttacttgctgacaggtgtattctgttgtttgagatggattatagatgtttatttcctgtgaggtttaattgtaggaaatgacttgtctgcttaacaatcctttctgttttttcacagaaaagagaagctccaccaggtgagaagccagaacc

SEQ ID NO: 22050 - DNA, 635 bp, Glycine max
  Intron number 2 from transcript Glyma06g18770.1 (locus Gly ma06g18770) derived from phytozome v7.0 (chr-ID Gm06; pos 15022906 to 15023540 reverse strand)
gaagccctaggtttctgtaccgtggacctcactgcaattattactgccactgaggcgaacgaacgaacgaacgaaccgatttattcacagtaaatacagttgcaagagaatcgctattaccaagtttgattccatacatacgatgatgatgacgacgaaaaatatcaaaggaccaaaatagtagagaaatgagtggactgttaaatacaattaattaatttttttttaattttgataaaattttagaaatggatgagttgaggttctaattttttaatctgatcctgagtttattttttggacataataattgctacttgggactcttgatttcaagaattagggttctgttaactgcggtttaaaacgacagactactatcgccgtttgacacatgagaccacaatttctgtgatgtgttatatattgttgcttttggtggtattttttttcgtgttaattgtggccacatgcgttatttttccgtaagacttcgattatattaagcgggtacgtatgtttcttctttgacatttttttatttaaaaaatgaatgagattattcttgttgatttgtattacattgtatatgttattaatttttcaatttgcaggtcaataaaaggggacaatac

SEQ ID NO: 22051 - DNA, 392 bp, Glycine max
  Intron number 2 from transcript Glyma08g09740.1 (locus Gly ma08g09740) derived from phytozome v7.0 (chr-ID Gm08; pos 6951821 to 6952212)
gtatcggtactttgacctgccattctgtgtaacaggtgactaactaactatctgaatttattttatgtttcagcttttttgttatttattacttccataaattgaagctttgttatttgatttagtcaaacttatttatctctctatctaattattaatacaagagtgtgatgactcgtgatcagttttagcttgtgagatattttagtttaattttggtgtttcagttttaggaagggacagattactagattgctttgtgtttttgttttaatgaaatctctagttggggaattgaaccatctggacgaagaaaatgtcaatttgtagctctgtttagttgggttcttgatatgtgtaattgtaaaatgagtacatctaaatttcaggtc

SEQ ID NO: 22052 - DNA, 415 bp, Glycine max
  Intron number 1 from transcript Glyma05g25660.1 (locus Gly ma05g25660) derived from phytozome v7.0 (chr-ID Gm05; pos 31710120 to 31710534)
agcaagctatttacctcttgcccttatacaatcaagtatagattttagcattgcttttaagtgcaataattaaacagattatccacatgatttttctcagtctacgattatgagaaatagctttgcagcttgacacttctttcttgattaaataaacattttagcttttcattctctacaaaacttcatttccatgcatgttctaaccaaaatcaaatgatcgtctaataaaggaaagcttgaagttcacaaagtaacttttgctaaacacaggaacaacactacaaaggtccagtcacaaaagatgcagatgaaaagaataagcctcctacacgacatttcatccatggatatcacttgatccaaggacagatgaatcaacacaggaatctcgatggttatgacttagggttgt

SEQ ID NO: 22053 - DNA, 578 bp, Glycine max
  Intron number 1 from transcript Glyma08g24700.1 (locus Gly ma08g24700) derived from phytozome v7.0 (chr-ID Gm08; pos 18862308 to 18862885 reverse strand)
cccagaatcacacatcctgcttgttcaccttcctggtttgtatggctaataacctcatcatcaacaaaatcatgtttttgttttatcttgcacatcttttcataatttccatattaaaagacaacaaataacaatcaatcatcacttcacatgttatgtagtaaaccatagtttgcctttgcctccattctagtttatataaaaacctaaaaaaccatactagtatcaagcaaatattatcatattactacacatatacgtgtttgatttggtttatttgtaaaaaataattacttcgattattttaaaaaaaatattttcccataataaacgattaacgaatatatgcactacaatgattagtattacaatattgatgagaaataatcgcctaattgcaatattgcacaatagaagactttgtacgagaaatatttatcataactaatgaatttattaaattaaaaaaaagaaacctctatacaaggaaatttattggaacatttcatttcatatatatatacagtcattttgtttcccatgacaagcttattaatttctttgtttttttataggtt

SEQ ID NO: 22054 - DNA, 1007 bp, Glycine max
  Intron number 1 from transcript Glyma06g47320.1 (locus Gly ma06g47320) derived from phytozome v7.0 (chr-ID Gm06; pos 49811570 to 49812576)
ttgaagggtaagtatctcaattattactaaatcacttacataaaccacacaaagaccttatccttccagaaatgcgccctctcgttttcccggtaataaaaatcactttttcttcactgtaccttcatatttgctctgccccttttgtttcccagaatctttctttttttatattattctttcatttttgctcattttgtttttcttgtatataaataatcaggggaaaagctagaacttcaaaagagtgcgtctttttattttctttcatattttatatttgtctatttcatttggtgttcgtttagctacaactttaacactgacacgtatgtgactgtgtagggctacgagtgaaaacaatgaggttatgctggcagggtgtcattatcgtcaagctaaaaacacctttaggttctggttgaaatttgagttatgatttgagttatcaagaatggtgttagaaaaactgaaattttgtattttttgttttttgggctaatggggtttctacaaacattattatctctgcatttctatggaattctttagttttatcattccaaaggaatgtaatgtattattttataacaaagtttaatgctttctttgtaattggtaggaatttggtaaatgggacattggaggtattgtcaatgatttttctgtttgttagtccttttttcttggattattatggtttgtgtatgagttatgtttgtcaaaacaatttttgtagtagttattatcatatgtatcttttttctctttgatctcgtttcagcttcatttttcttccttaattatctattcatttctcctcacatctattattttctctctttctttatcatttttatctttcttccttccttccttctacccaatgcctcatttttggagtgtcagttgtgctcattttcctttctataaccatatgcatgttgtttctcatgatattcctatgtacaggttttgcaagagagcatattggagctaaaactgag

SEQ ID NO: 22055 - DNA, 903 bp, Glycine max
  Intron number 2 from transcript Glyma08g12020.1 (locus Gly ma08g12020) derived from phytozome v7.0 (chr-ID Gm08; pos 8702910 to 8703812 reverse strand)
cttaccgctacattaggtaatttgtacctgtttttttttccatatttggtgtgtatatctcaaattgacttttctgctttctttttgttctcatgatcagtctccttactgtattgtccagactgcttttgcagtcacactgtgtgtcaattgaatttaggataaaaaacatctaggaatttttaatattggatttttttttttggaatattgtttccatgttgatctttatgttagagcttttcatttctcaacaattttatgtacgtagaaatatatctaaaccatctttttcaagtcaaaaagaaatggctgattgagtgataggtgacagcctagccaatagtcatgcattcttactagattttcccttaaataaaatgaaacttatcctggcattggctgagattggatttatgtagtttatgtggcctcctcctggaccccttcttcgcctctgaccatagatcaggctcttatggcccagttcaatttttgaattgtttgaaacataattgcttgggtacttttcattgtttatcagattctggctgtaaagtcgttagttctgcaagccgactgcagagtgggctgagccttctatgcttgcatgtgcatgtattatctatcatttattaagtacaattgatgagattgatggtcacaagcaaggattttatagtcaaaagtactgcttttcttacataaaataatgaccatatatgtctaatgtcttgtacattgttcagcttttttatttgaataaccctgttatgattaccacaaggggtagcgatcagggatgtggatgtatggcattgaccatctattatctctttgagttgatgctagatcaaattgtttaacttgtaggtgcattcgtgggggtaaacattggcactg

SEQ ID NO: 22056 - DNA, 455 bp, Glycine max
  Intron number 1 from transcript Glyma08g12020.1 (locus Gly ma08g12020) derived from phytozome v7.0 (chr-ID Gm08; pos 8703913 to 8704367 reverse strand)
acacaagctcttacagggtttttaagaaagatcaggtgcacactccgcgcttctcttgctttattttctttctaaactcctgtttgagggttaggttattttgcatttttttgtactaaaagaggaaatcacgcttctctctcttctccattttaagaataatatctaaaaacggcaaattttttagtattttttttttgttttaactgggccttgaggtgtacaatgtacctatctggaaagcctgttgaatatgatactgttcttactagatttgatttttgtgtatgtaagagtagatattggtcattaatgttccatccaactagtgtgcttcgtttaattatctgttgattttctgtttgtgttatgctggtggtttaaattgctcaaaatgtgatttcgtgtttattgctcaagtctgacagctaagtctttgcggggaagcaatattt

SEQ ID NO: 22057 - DNA, 951 bp, Glycine max
  Intron number 1 from transcript Glyma08g13540.1 (locus Gly ma08g13540) derived from phytozome v7.0 (chr-ID Gm08; pos 9909492 to 9910442)
ccattttccactatttctctccaccgtctcatctggtacacattttccccttcttctttttagttcttcatttttctttccttttctattaagatcttgtgggtaacagtgaaagatcgtttttttttccgtcgctttttcatcgaggtaattatgattgccgttttgggtatggctctgatgaagtttagaattcgttttttgttttcttggaatggagaacttcgtgtgatcctgaattttagtttgttgggttgttttgaagtgtggctgagctgaaacggtcaatgatggttttttattcgcttttgtcatgtgttggatcttgaaactgtggagtcttctggggttgttcaaaatttgtagctttttctctttgggttattaaatgggaatgcggtcctcttggggggggttcgttttgccccctgttttctcattcgcgtttaatgctctgcggagcaatttggtttgcatgtcttttgtcagtgttatgaatgaataatgagttatgcagagcctgacttttagctttgtgtgtgtgttttaaattttttattggtttgttcttttcttgtactttttttttgagaggcgttctattcttgtacttgtttatgtggatcttggaattctggatgtcttctccatggttcaccatgtttcagttttgaatttgtttgtgaattggagtggctcaatttcatttgcaaaaagtgttgtgggtatttgaattctcagttctttcattggcttaatttgcccccctcctttttgctatttttgctttaatgtttatccttttttttttttttactttactgtgttttctggtgtcaaccctttgtttttttaaattttttgcctggtggctttttatttttgacttctttgggttgttttgcattctagaggagaaaatatctcatatggtgtgattttaactgcagg

SEQ ID NO: 22058 - DNA, 523 bp, Glycine max
  Intron number 3 from transcript Glyma08g13540.1 (locus Gly ma08g13540) derived from phytozome v7.0 (chr-ID Gm08; pos 9911100 to 9911622)
tcaagcgatctccatctttgaattcccctagcccggtaatccctataccattaaaacaccattcaccattaccatggtcaacctacatatgctagtgcatgggctatgtttgctgtatgacttgaatctgtaggttatattatattgtgtattgtagttgatgttataatacatttgtacctaacaattagacttgggagatgtaggtataaatcctgttacacttatgaatacaatgtttctcttgacagctataatctttcatattttatttcattgtggatttgtgtgttcataaaagataaaaagagactgtagacatttattaggccattgagatttgagtgacctactgcatagtagttttcagttataattctcttctttctctcactcaatcttcttatgcatttaagtcaaccatacttttttctcttttatgcatcttagctattgctaatttgttttttttcttgtttctcccccctttttcagttttctgttcgtgaacctggggtcactc

SEQ ID NO: 22059 - DNA, 289 bp, Glycine max
  Intron number 1 from transcript Glyma06g03640.1 (locus Gly ma06g03640) derived from phytozome v7.0 (chr-ID Gm06; pos 2552796 to 2553084)
gaggcatttgtcagttttgagatttttttacacacatactccatgtgtatcttgtgacctgaagtgaagtaagggaacttacatgagttaggagtgtgtgattgtatctcttattggattgttgtagtttgtttttgtgcagtgaaagaaaataacattttgtttttcctgattgattagattcattttgctggaagaacattatcattattattggaaatatggttaaagtattgattttgaaaatgactagtgtttagaatttgatgtgaggcttcaatgtagggaa

SEQ ID NO: 22060 - DNA, 714 bp, Glycine max
  Intron number 1 from transcript Glyma07g03360.2 (locus Gly ma07g03360) derived from phytozome v7.0 (chr-ID Gm07; pos 2365560 to 2366273 reverse strand)
cttgcctgtgcctcctaccattccaaacacgcttggtcagtctctctaatctaatgcgtgtttatttcatttttattgcgtctttgtctccaataatatgttatgttatatgaaactttaagattttgctgcaaaggaccatgtgatgtgaattttcataattttttattatatgggtacttttatataattatatctttcttggctgcggctattgttctgttaagagtcctagaagaaagtttctccaccaaagtaggaatcagaataaattatcattatattgacattgcatcagaactttaataaagctaaaaaaccttattatctgatctaactttttactatttttttccttaaattatttctcaattattgggtaagaagtagctggtggattgttataaccattcaaatttcataagagtttcatattacagagtcctttgataatttttagtctcctaggaaatactattttttttcgattagatttctgcacaagcatttctctttcaacatcttaatctgaatccgaacgtcaattttccatcttaacaatatcggtatgatatagtatcatcaaattgaagaggaccaattatgacaaatgaaaaggagtgtgaactaccttgtatatcaaaagagttaaattagtctatgccttttcaaatgtaacacttatcatttctcatgtagctactccttttctca

SEQ ID NO: 22061 - DNA, 972 bp, Glycine max
  Intron number 2 from transcript Glyma06g17190.1 (locus Gly ma06g17190) derived from phytozome v7.0 (chr-ID Gm06; pos 13513894 to 13514865 reverse strand)
cttctggcttgcgtgatcgtgatctgctcttcaaggttcgtttctgtcggtcaagtatttcatgaatctgaacctcttgcatcctattcctatcctagttttttttatagataaacttgtttcagttccgtttggttctgaattcgaatagaacttgtctactacttgatcgtttttgtttttgcttttggttaattagctgattagtgattaatctctgttttgtaccagctcaattattgcttatattggtttattctatttggcaaattatcagaatgcacatttaggaagaaaaaaaatattagggaaatttatgatcgtttcaatcagagctagttgtatttacttctagaattcaggagcatgtagcttggggtcatgaattcatgaactgcaatttccgataagaagtttttcacctatcactgcaaagtgaaaatacatgaagaaaagaaaatacactaatcctggccaagtgcaaacagagtttcttaagtaaaagaagaaaccataacaatttatttcctaattgttatttaatatacagacaaatgatttatttcataaaataatatgtcttaatgcaaaaaaagtgaaacagataatgtagaacttctcaaaatctaatagcttagctgccatgatgttttagactatgctagatccttacattgacataagagatcaaggcatatcggaaatagacctcattaagttgagcaaataaaccacatggaccaattgggcagttatatctacatcatgattttttttttttgctatttatgtcaggattctcttgacttgaagtctcctttggatataagatttccattcttttgaataaataaataaaaatatgcttttaattgctaatattctcatcattcagttaagtgaatcttgcttctatcaccaaaaaagttaggatgttttatatctaacttttctttaatgtagagtaatcca

SEQ ID NO: 22062 - DNA, 422 bp, Glycine max
  Intron number 2 from transcript Glyma08g09480.1 (locus Gly ma08g09480) derived from phytozome v7.0 (chr-ID Gm08; pos 6773839 to 6774260)
gcaagccactaacctttcgcgtcggtgttggagaggtatgacagttaatgtgctgtgtttttttttcatacaatgttgatgtaagcagcaatatacaatgttgattacaaattttattgagcttaatggtgtcagtgtaaaagcttttacaatgtcaaccaattagatattatggttggcttgaattttaatatcaaagtcaacaaatttaatattcatggtagtttatgattagaagacaattttaaacagaaatggaattgcttcttaagaatggttaatgaaaaccatggagtaaatttccatgtttatttaatgagcgcccccaatcataagtagtcatatcatagagtaccctttatggacagtcatgttctggattaaaagttatccatgaatcaaataggtcattaaaggttggg

SEQ ID NO: 22063 - DNA, 156 bp, Glycine max
  Intron number 1 from transcript Glyma06g12150.1 (locus Gly ma06g12150) derived from phytozome v7.0 (chr-ID Gm06; pos 9385528 to 9385683)
tattttggaaccttcacgaacctcaacaaggccaggtgatcaaactcaaactcgtctacattaatcttcaagttgtcatttcccctgtattttctttttaagctcattgcttgcaagctgaataatgttggtgattttttttacttggtttgtagt

SEQ ID NO: 22064 - DNA, 1041 bp, Glycine max
  Intron number 2 from transcript Glyma07g12440.1 (locus Gly ma07g12440) derived from phytozome v7.0 (chr-ID Gm07; pos 10772940 to 10773980 reverse strand)
ttgttggaagtgctggtagtaaagagaaggtatttctctaattattattgtcataggtgtctgcataaatgataaattagcataacatgctttgtactgttgttatgtattctgctatttaaagcagtcctattttgaattagagtatttaaaataacaacaatcaaagttttttcctctaggaggggttgaattaggcaaagtatattagagaaatactctttccaagtcccttgacaatgcaaactttgagatatgctgcatagttttaggatttttcaagaatgcatttgtaggtataatgaaagtacatgtttttcttttgaaaaaggagcatattattatgtatgacatatataaaaagttacactctaatgctttattaaaactcagaaatgtgtattactttgtagatctatgttcatgtttatatgcaaagcactcctctaactatccaattccagcccttcccatatcaccaataaaacaataaatttatgaagagaggtggaactgagactagcaatagtacttgcacttctcattaattttggaataggaacatgttttttttagaaaagggtatgactgacaaagccagaaatcctttcagtttagatttggagaccagcaaaaagctatttagggtgtgtttgaactattttcaaaagctgtttttagtttttggaatcatgaataaatctttgtaaaaccagcacaacccaggcctcaacacatgcagtactactccagatggctcacatcattgagcctgatcacaaaacaaaagaaaagaatgagagaacatctcgcatctgtttctgttttttggtttttaaaatattgtattggaaacaattttaaaaacttcatagatattttatgaaatattgatttgttgagtagtgtggaaatgttttagaaaataatttttaaaaccgaagagtgagaaggaaatcaaacagactctcagtctttctttcacttaaatgtaaatcttctgcaacaaggtggatctcttgaagaataaatttggatttg

SEQ ID NO: 22065 - DNA, 680 bp, Glycine max
  Intron number 1 from transcript Glyma07g12440.1 (locus Gly ma07g12440) derived from phytozome v7.0 (chr-ID Gm07; pos 10774117 to 10774796 reverse strand)
tcccactttcctactatactggaattcttggtatgtattcaacaatttcaatttatattatttcttagctaagcctgttcttgatgtcaatatgatgtgcaagtctcaacttaagaagtttttatgtgttaaatggctcctttctttgtctatatcattaagataatggtttaaccatcattggagtgacttacttttttggtgcatggaagtttagattaatggtaggcacacccttttgcaagcccagaccactaacctcagcgaagatttatagtggaatttacatatcgcctaatttgagaattaaacttaagtcacagatagtgtgagcggacaactcgaccagatttgtcaatccatgttggcacagaagagacttatttgattctttattcattaaaatatctgcttaaccatctttggattggaaatcaaaattaaatgactttttgtattcatttggaccgatagcttactagtcctttaatatcttttacatttatgtctctgataaactcctctgtttatagtacttctgtactatagtatgtttaggtttttgtaccatacattctgtttcttcacaaaaattcctatggatgttaggctcatagttttctcattttggtgtggcttatgaattatgatccatgttattttcttctttgagcacaggt

SEQ ID NO: 22066 - DNA, 515 bp, Glycine max
  Intron number 1 from transcript Glyma07g05920.1 (locus Gly ma07g05920) derived from phytozome v7.0 (chr-ID Gm07; pos 4629136 to 4629650 reverse strand)
atattgtttctaaagatttccaggtgagattttctcttccatttttggcatttttctctatgtttatgctagttttctaaattgaaatggatcatccatttatacctatcagaataggatctgttgaagctaaattttgactaatcaaatgtctgaaacgaccaattaccgacgaggtgattcccttgaagcgccaacaggatcataataaaaaacaagacttctacaacttgtcgagctaaagattaggattcatatacttaatattaatcatgtcaaaaacctttcaaacattgcctgaaattaatctgatctgcagtgaatttcttcaaattatattgtcaatttccttcaaacttgtatatgccaaggctatatatatagttcacagtttttttatgctgtttgtgtgaattaatttggtgccaaatctggataaaagggtcggatgatgaagatgtttcaggttcctttttaaccaaggattttcaagagttatgtttaacaggcaagca

SEQ ID NO: 22067 - DNA, 550 bp, Glycine max
  Intron number 1 from transcript Glyma05g25910.1 (locus Gly ma05g25910) derived from phytozome v7.0 (chr-ID Gm05; pos 31970866 to 31971415 reverse strand)
tcttgaagcatttcagcgagcgaagagctctcaaggtaagtgtaactaaagtaaaaatccatttactactttctcttccattttgtcgttttgttgcttttcttcacccaggtgtagttctttttttctctccatgtgtatggtgtctttgggctggtttgtttgatgttcgttaaggctaatctttgtgcgcagcaattcagcatgcacgtatgatgatgataaagttttcagggatcacataaaaaattaaaattttgaaaaaaagaagagagattagcactaatcatggagttgcattgaaatatatacaattttattgcatgttctacaagtcatgagaactaggaagtttgctcaaatatggggtgtgtattttgatgagggtgtaaagaatattgctttttttcttttctttttcttttgttgaattcattcattattaagtcttttgtgtgcaaattttcggaatgtttgttttatgcatactaacaaacatttggcttcttttgaagattatctcaggcctgcagaatttcaataaagacaa

SEQ ID NO: 22068 - DNA, 934 bp, Glycine max
  Intron number 2 from transcript Glyma08g15230.1 (locus Gly ma08g15230) derived from phytozome v7.0 (chr-ID Gm08; pos 11049328 to 11050261 reverse strand)
agcaatagaccgttccccccacccttcacatcaaagtgagtaactgcaagtatttcaagttttttatttttgtgttttcaaaactggccactatgctctgctatttgagatcaataactatgaatcaaccatgagcactgaaggcctttgaaactttatttaattatctgacattctgatcttgtatcaatcaaagcttttaggaattacagttaagagttttttctacatacatatatagtcttgtccgttatatgtttattctcttatcataaatgttttcaagtcattttattgttaagtagttgttgatttttggttatatggaactttaaagctccatgcattggtactggtacatatgatgatacatataccctcaaattggcaggaatcataatttctgttcctgtatagtctctacatgttattaacttgagaccttttatgtgatgaggggatgaatatgatatgccatgtattaggttaacctgtccaagtaatttactagacatttgaggctgaacatccttgtaataattccccccttgtgaaattcagttgtgatagattattcaatgtgaaactatgtgcacattgattatctagggcaggaaggtggggactggggagggaagcgaagaagggtggtaaaatgttcgtatagatgattttgcagttgataagtaaatttgtgaagaactatgtttacatcaataatcactggctgattcaatcttagtattttcttagaaatgagctcgataatcctagaaatgagtgaaaactgaaaatgccattaactcttgtctgatctttggatgaagttcaactttaatctatgtccatttttctcatccataggaaccttagtaaggtgtaaataaatgccaactgaactttcctcgctttggtatttcttttttttcagttg

SEQ ID NO: 22069 - DNA, 693 bp, Glycine max
  Intron number 4 from transcript Glyma07g32760.2 (locus Gly ma07g32760) derived from phytozome v7.0 (chr-ID Gm07; pos 37666517 to 37667209 reverse strand)
gccggggagcaatacctctcgaggtcggtagagtagcttgaattctgatattcagccatattcacttgggctctgtttggataaacttctccattagcattaacatttataggagaagaaattaagataaattgagcttctcccataagttaaaacttgaaatctagatagcttctataaaagttaaagtgcatcaagttaattttaacttatgggagaaactgaattcattttactttcttattgtcttcttctataagtatttatggagtttatccaaacagagtcttatttacttactatttcctaaataatattgctttatgcaatatatcatggcatgattctttgagtaattgctttcttggaaaattaaggagtaatctggtttatagttgtatcatttggtctgcttttaaagggttcctttcttcgtaactgattgaaggaattggaagaattgactagttttattttccctaaacatgagatcagtgaggtctttttcgtttttgtccaaatcaaagtcaaatgattttcaattatcaataatatggcaaagatatttggatataaaatatttgagttaaataatgtaaagatgattgcagagaataatatacatcaagggcttcaaaatcttacagcatatgaataacttcgtctagggcttagacttgcgagtcgttgaga

SEQ ID NO: 22070 - DNA, 584 bp, Glycine max
  Intron number 3 from transcript Glyma07g32760.2 (locus Gly ma07g32760) derived from phytozome v7.0 (chr-ID Gm07; pos 37667264 to 37667847 reverse strand)
actagtggagaactaactcaccagtacttgcaaaggttcttcttttgtactaaaatatgttttcactcctgttctttctgtgaaatttagttttagtccctcaattttaactttgatcggtttggtagtagtggtttccgtctctccttatggtgaaaatctcctgtgatgattgaccaaaaccattttttttttctaaagttcagggaccaaattgagcaaagatgaagtattgaaactaataccaatttttaccgaaagtacaaggactaaaaagaatttttatctttattttttttatatctctcttgtttccttttcatggggcaatagtgactgttacatgactttgattgaatgatccttcctttgagtttcttccaataccctttttcctattcgtcaccgcataattcatgtttctttgctacgtttaattgcaatcatattataatttttctgttgcatttggtgccttttgcttatgagaaattgtttacttgtgcaacatgtgaatttgctgtccatgttcaatcatcagtgccatcctcatgtataagttgttgtgttcttaagcaggagag

SEQ ID NO: 22071 - DNA, 693 bp, Glycine max
  Intron number 1 from transcript Glyma08g06890.2 (locus Gly ma08g06890) derived from phytozome v7.0 (chr-ID Gm08; pos 4946228 to 4946920 reverse strand)
tgttggagtctttagcttggtgccaaagctttaaggtaacaacatctcttcttgtgttttttacagtttcgtatgttatcattgttgggttagtttgagactggtgaagggagaagggaggggggagatgtcgtgggttcgaatgcccactaactaaaatctaacaactaacatttgccaataaaaaaaagtttgagactttgagtcatgcagatatgggtttggttgattttgctatgtagtgttagcaacacagtgagaatctttgttgttggttaaaatttattagaaattacaaaatcacgagtgagaatctttaaataagtagtgagagcacacaaatttgttatttccaatagattttagccgattagaaggagtgtgatgtgttgtttgcatttctcatgcagatatcagctgcaagaatttttccctttcatctttcctacatttcccttcaagaaaatgtagtaatatagaaattgaagatgcttaaactttgaagttgtagctaaatcctgtttatattcaaaaatagagtcaattcatacaccccttaagaagctaggaactgggaatttagtattgacttagttaaacagtaaaatcagcttgttgcataatctaatccatattaagaaagttgttgctcgttctgaaattttctttgcaatattatttccttgcagggat

SEQ ID NO: 22072 - DNA, 542 bp, Glycine max
  Intron number 2 from transcript Glyma05g37550.1 (locus Gly ma05g37550) derived from phytozome v7.0 (chr-ID Gm05; pos 41115419 to 41115960 reverse strand)
ctggaagaggtacatgtgtttctcgaatattgttagttttgtttggcttcatttaagagtttaattttttgtacttgcaaaggaaatatctcttttgtgtgattgattgttccacataacatggaaaaagtgtgagtaaaaaccatgcctttacttcaagtgaattacccgtcacaatccatgttcataacttttcgttgctgtggttgatgggattggggtctttccactttgattcctgaactaattaagcagtgggtgcggggccttttcatcaatgccacctcgtgagacaattgagccttttttattttataaattatcttcacaatcaaaactactaatcttttttgcctttttaccctttcttagcaactttaatttgtttttgtcttctttaaattcatatcttgcatatagactcattcaattctaaggtggcggtaactttcaaagcgaaagtgaaatttatatattacttttgtttaacatattgatgttgggaaggttgatagaagatacaaacactaccgtaaccaaat

SEQ ID NO: 22073 - DNA, 841 bp, Glycine max
  Intron number 1 from transcript Glyma06g00360.2 (locus Gly ma06g00360) derived from phytozome v7.0 (chr-ID Gm06; pos 127130 to 127970)
aaacacaattacagcagaaacaaacctaaatttccgtaagcctctctctctctttgctcccattcaattcaatcgaattatcattttgctttcttccgggtgttttgcctcggctgttgatgttgattttcgcgcctctattctcttgtgacttctgcaactgctcaattcacaacaattactttctatcttttttgggaactctgcctcaacacacttttacaaatacttttgtttcaattttaaaaagagcagagcagctgaaacttttcaaaattgaacaatcagattctagcaatcccttttgattaaaaacggcatgaccaaaaccaaaatacgtgagccatgctatccatttcaatgcttctctatgttggtgctattcaagtaactttggttttctttccggtatttttatggctattctgagttatatctgatacgatttgcatgcatttcttgtctgtcacttttttctttctgtttcgatttaataaatcataatctacgtaactatatatttaataagtccatgctatgtaagctctgcagtttgaagtgcagtctaaaatgagcttattaactttttgatagacactttttcgagtgtttacttaaaaagcagttttaatgaatcatcaagtttaatttagtccgaatttattatgaaaaaacaaacgcaagttagcttttgaaatggcttattatgaaataaaagtaagtgaattttagttgtagaggacttaactaatatacttaggacaacaatatgaaatttgtgaaaacagcagaaattggtggatgagaaacatttttgtcttatcataaattgcagttgata

SEQ ID NO: 22074 - DNA, 928 bp, Glycine max
  Intron number 1 from transcript Glyma08g22580.2 (locus Gly ma08g22580) derived from phytozome v7.0 (chr-ID Gm08; pos 17141735 to 17142662 reverse strand)
tttgccaacgctgagggcaatatcctcatcgaacggtgcgtttagatccatctcttcttcccatttccaattctcaatctttgaagttataccagaaccccatcattttccccaattcccttccaacaactcgattttcccatgctgcgatctaaattttagattttgcagatcaaatcatatattatttagattggacccgaaatgggttctgcttagattttgatggggtaatagggttgtggttagcgtagttgttttctgaaaacttttgaataaggggcatttgtctatgttaaacaataatacgaattttcacaagtgcgtgcgagatcaagcttaattaattatgtagtattaactttaatccctttgttgatgcatactctcatgtcatgctcacataacatacatgttgattttcattgttgcagttttcatggagttcctgcagaggagcgtctgcactggcgttcattcttagtcaaactaggagctgataatcttaagggtgtcaaaaacgaagagctcctagttgcttgccacaagtcagttatagcatactattctctcattccatgacttgaaattttatgtatctgtttgtgtgcttatatgaattgtctcatctaaaagcagaaagattaacaaactgaatagcattagttactgcttactagtttattagaatagacccgatatttggcaaaacagcattgttagatgtatagcagttttgggaaactagaatcgtcattcatcacaatctgaagtttgacttgaaacaagattctcttttactaccaactattcctcattcatatttcttggtgtagaaagttgcttgtctggttcttatatgattctaaagtacttgtacattttctttgcatcagatcggtttatattgtatacacagtgcttggcg

SEQ ID NO: 22075 - DNA, 660 bp, Glycine max
  Intron number 1 from transcript Glyma07g32650.1 (locus Gly ma07g32650) derived from phytozome v7.0 (chr-ID Gm07; pos 37556122 to 37556781)
tggtacgtcgtaattgtgtcaaactaattaatatagatttattagtaacaatcacgcatttcaaatttcaattcattagcgggggaaaataaccatttattagcagacgaaaaaatgtgaaagattaggattacttgttgataatagtatccacattgtgatttggaagaggtgatgagttttagtaaatctggaatgaggattagtttcataatcgatacaaatatataatccaagtttataagataaaatagtgattttatcatagaaccaaatgtcctagttactttggttaaaaaaatatagtatagctagacatatattatactaatatttgatcattttgatgcattgattatatatatcaattttcagtacataccattagagttgtctgttagtatatgatgcattagatagtaataacagcagtttaatttcggttattagataactaacaaaggctaattaatttaatgccaaaatatcaatacatgaaatatgttatatatatatatatatatatatatatatatatatatatatatatatatattgtacgtgtattgttcttgaatcacagttctttaatttgggtaatatttgaatgtgatttggcgtgcagggagttgctgggcattttcagctgtggcagctgtt

SEQ ID NO: 22076 - DNA, 547 bp, Glycine max
  Intron number 1 from transcript Glyma06g13280.1 (locus Gly ma06g13280) derived from phytozome v7.0 (chr-ID Gm06; pos 10428870 to 10429416 reverse strand)
tggcccaccacctggctgtcaaccaagttacccataggacttctttgtaattacgcattactatttaattaatactattttaatatcctcgtggccccactcttttttttttcccttctttttccttaaaaagataaaaattccatcgcaaaactgaaaaagcaaaactctcactcacactcactccctctctataaattcatcctttatttctcttgaagccactgatctcaaaccaacactgtttacctaccggcggcgcagtttttctcatcgcttcttcttcttcttcttctttcgtttgcatctgaaactgttggctctgtttttattcaactcaacagcacatcactttgtaaattactataaaaagccagatctattgcttttcatccattaacgaggggaaaaaaacaatatagcaatcaaacagataacaatttctcgattattttctcccttctatattgactgtttcctgaagcgatgtcgtgctctctctcgttttcaaggctttacgctcgctcggagagaactcttccgagcg

SEQ ID NO: 22077 - DNA, 812 bp, Glycine max
  Intron number 1 from transcript Glyma05g35890.1 (locus Gly ma05g35890) derived from phytozome v7.0 (chr-ID Gm05; pos 39842922 to 39843733 reverse strand)
ttgatcagttttgtcgataatctcccaactgggttcgtagatttatctcttatttttttccatcggttagctttttcaatattagtgttttttaatttggctttttatatcaataacaatgaggcataattgtttcggacacttgaggatcaggatgtcccagatttgtggactgaccgtttgtcctgttcgctggaacgttgatcttgttgtgttatttgacatgtctaatcaattttttgttttttgtgcgtattgtttattttatgttcctgaattctgaaattctgatatgatgtacaggataaattagatcagtagttggcttctttatatgcctttttgccccattttcaaactgattttttttatgatgtttatatatatacattacctccattatgatcatatcgcaaaaaagattagagatttttgtttaacgaacatctggggttttgaatctcgaacgagatttgtctggtatgatggttcaaatgatactattttttagcacttcagaagtcacgtgattaaattggaggaattcactagcaaatcattcatggtaataaaactatccacttgttaatggttctgttctgtccgtctggagtataacggtttattgctaaagcatttgattgtttatattgtgttttgaataatctgctgtcaagatgctgagagagcaagtatgtatgattaagtattacattgttattgataacaaaaattataaatatttagaaatatgaatttgtaattcttaaagatttcttctgtgttgagtcattcttcaccttgttacaggg

SEQ ID NO: 22078 - DNA, 727 bp, Glycine max
  Intron number 1 from transcript Glyma07g13790.1 (locus Gly ma07g13790) derived from phytozome v7.0 (chr-ID Gm07; pos 12834881 to 12835607)
cgactgttcttgaatacttagacaaggctcttaaggtccgtgatctgtttatgtgtgtgtgtatggtgcaactagtcttaaagcttaaaaccttcaataatattgtcgctaattatggtcaaagatttcgttaagtagtagtctaatgtctttttaaagaaggagtaagtagtagtctaattatggtgaatgatttcgttaactaatagtctgatgataccttttaaaggagtatcagaatattagggtttttaataggtaaaaccaatataaaaaaccctaattgtcttatactttttcttttaagggtatatataatgttatttcattaattaatttctccaaaagcagcatatgcatgtagaggaaatgaataaccttctgaatgcttcatgcatgggagtcctccccgtggagtcttcataggttcatctgcggctgataaaatcattttaagtgaaaaatatctttataccaaaagttttatatactttttagagaatacaaagagagaaagtgggagaagaaatatatggtatgaattcagtaactcacgtataatttaaatgtactcatcttttttttttggtgacttgtaccctagtgaattactttctataaacaatatttctagaatatattagaaactgtgcctgaattctaacgctttttagtttgattgaattgtgcaggctaaggatccaacaacatctttagcccattattt

SEQ ID NO: 22079 - DNA, 551 bp, Glycine max
  Intron number 2 from transcript Glyma07g15320.1 (locus Gly ma07g15320) derived from phytozome v7.0 (chr-ID Gm07; pos 15180500 to 15181050 reverse strand)
gctggtaatctattcaccttcttctgtataccatgttctctctgctatttgtctaactcaactaacccccattcttaacgcttcaataatcatcctattaacaacttaattgtttagtactaaagtgttataaattgttagtaaccaaccctagctaagttgagctgtatacacgtttctatggatctgagttttttcgtggctatagaattgagattaggaaccctagcaaacaggacaaaagttgtgcagttcttttcctagtgattgtattgattaaaacgcatagctcaagtcacttttgcagcctttagctttcaaaaaaaatattccatgagttcctgttttgtgatatatcgggccattgatatgaaatttgtgtttattttgatagaaatgaatggtttcatattccttttatttattatactttgtgtcttttgattgctttcatgttttggttcgagaacagtagtcttagtggttcttgtttggtttgttgttgtcttaaaacagcacatttaagaagaaagctcctaaagctattaagg

SEQ ID NO: 22080 - DNA, 308 bp, Glycine max
  Intron number 1 from transcript Glyma06g40950.1 (locus Gly ma06g40950) derived from phytozome v7.0 (chr-ID Gm06; pos 44238390 to 44238697 reverse strand)
gtaggcaatctctctggttgggatataaaaaataagtaagtaatcttctgttggtttgttacgagcatatacaatatatttttatcatttcttactaatgctgttatcttgaatgtattacttattacaacctttaaactggagattggctcaacatttattatacatgtttaatacaaataatattttaaaaatgaaaaaaagtactatatatgttattgtcttcttctatgcatgtacgctctgttttgattcccttaagtgatgatttgtcattctttgttttctttaaacttttaggcaacaac

SEQ ID NO: 22081 - DNA, 476 bp, Glycine max
  Intron number 2 from transcript Glyma06g06270.1 (locus Gly ma06g06270) derived from phytozome v7.0 (chr-ID Gm06; pos 4484360 to 4484835 reverse strand)
aagtaggcaacaccgctctccatctttcagttctcaaaggcttcccacagtcatgaggcatatctttcgattcttatattttacttcaaagaaaaaaagaatgtttttaaaagacatgagcttatttaatttgggtttacaaaattagctttaatgaccctttttataagttttagatttttttttcattatgacattggtgtcaaatatcactggttttacttaaaatcttcgttagagaatttgactgtttagtaggatttttttttaatcatattttttttattcaaaagactcaaatttaaaattttatttaaagagacgaaacctagttttacttggattaacaatttctaggttagtttatttaatcatggattaatatgaaccaaaaaaaatcataggttaatttcaatatggtgcttttgatatgctttgtaggcagtaaggttgttgatagacagcaacatagacaa

SEQ ID NO: 22082 - DNA, 558 bp, Glycine max
  Intron number 3 from transcript Glyma07g09200.1 (locus Gly ma07g09200) derived from phytozome v7.0 (chr-ID Gm07; pos 7690240 to 7690797)
aatattgggcccacacaggactttggcattggcaggtactatgttggataatatattaatctttatttgctttttctgacatttccatcctctctatatacagtaacttgggacaacaaaggaagttgaaattaactttttttttctctatacacatgctcttatataatttcgatctagaattatatgaaaaagaagaaatttatatccattttaatggtacatgattttaaaaaccaatcactatatatatgcaataggtgtaagaaccattatactatttttcagcccctacctaatcttaaggtgacttctaaaataatgcaacaaccactaactttcccacaaaccaagctttgatcgatgctacagctgacacaaaccaaatggtccaagtggcatatcagacagtatttaacggtcaaagttcttccaatcatttttggttagaaattttttaaaaaagatatattgaaataataatagactaatcatagtacatataataacttgatttgattttctctattttaattgagcagaggttaggagaagtaa

SEQ ID NO: 22083 - DNA, 607 bp, Glycine max
  Intron number 1 from transcript Glyma05g33050.1 (locus Gly ma05g33050) derived from phytozome v7.0 (chr-ID Gm05; pos 37820243 to 37820849 reverse strand)
tcctctcttttcagcaggtactaccatatccacaagttgtgaatattgtgtttttatgtactaaatactttttagtaacaaaaattgtttttgacttttttttatcatgggttttaagtgtagaaaatagtttttttttttttttgtttaagtcaaaggtttcgttttggtgaccaagtttaaaacttgttcattgtgggcggaggagaggaaggacctgttcattttaaaattccataaaactaattttgatatatttagtttaaacagttaaaaatgtgttataactggggaattgtttgtgaatatttgccaaaggccacgaaattgtttatgtgtccatgttgaaaaatgtgtgtgtattttaaaaaaagttacatatctgtttttgttttataaaatgggtggaggaaaatgaagaggcagataggaacaaaaattgaggtcaaaatgagatgttagaaaaaaatggatttatgataataatataactttttgttttagaaaatcgaaatactttggcatgtctgttattgttattatgttgttgttgaagagtgtggaggattgattgtttatctgacaaggcatgtctaccttgttttag

SEQ ID NO: 22084 - DNA, 939 bp, Glycine max
  Intron number 2 from transcript Glyma06g05280.3 (locus Gly ma06g05280) derived from phytozome v7.0 (chr-ID Gm06; pos 3767847 to 3768785 reverse strand)
tcctcccctctaccgagccacaaccctagttaccggtaaagtaaacatattacctactaacaagattacaaatacataagtactgattatgattttgtttagaataatttcttcacatatgctaataaaagaaaaggaaagaaaaataagaatacaaaataaactgaacttctattagttaaatacatacattaattttagtttttgagaaaagctcaaactattttatttatttattttgtttttttctcctacaaatataaatgaaaaagttattgacacaaaagttaatatatagtatttaaagttaattttattcaggattaatgtgtattaaattactcttcattctgtttttttctttttttaaataatgttaacagtgatgacgagtatgctgatgtggactgggacagtcttggatttggactgatgcccactgattatatgtatattactaaatgttgtgagggccaaaattttggacaaggacaactcagtcgttatgggaacattgaactcagtccatcagctggtgtcctaaattatggtcaggtatggtttggtattctcttaagaaactaattacttcaactttaaaggtgccaaaccatatctggtataaccgtgaagacaaatccaaaaaagaaagataatacagcttgaatttttttattttttatttttggaataaatcattcttaaaagtgaaaaaaaaaaacacctaagccacgcataattctcttaggaatcatgtgcctaaatacaattaactaaaccaacaaacgcaaactcaattcctgtatggagtgataaatataatttaaaatcttcttcaataattttcttttgttaatcatttttatgtttgagtggtggtattgttgttgaaatctgaaaacagggtttattcgaaggcacgaaagcatacagaaaaga

SEQ ID NO: 22085 - DNA, 689 bp, Glycine max
  Intron number 3 from transcript Glyma08g21350.1 (locus Gly ma08g21350) derived from phytozome v7.0 (chr-ID Gm08; pos 16201048 to 16201736 reverse strand)
ttttggataatgtaagttgcatgagaaagagtatctttctggcatggttgttatttcaacctttccatttgaattgttgataggctgtgtataattttttccttcatttttcccatctagaactgttagatagtatatactattggcttgtttattatcttgtagtattgttgattggattttggaagtttaatatcatgattttgagaaattaaaaccataagtttttaaattttgtttttattttcatttaccaaagaaaaaaaacaaacaaggataagagaaatatttcttttttttgctggtttcccgttgaattcatgtgctttatggaaaacacttgtgaccttctgcgcagaatgttgtttttccttctgaatatctgtgtagaaacttttgtggggggaaaaacagaaataaactagtacagggagttgagaagatttttggaaagtcaactgaaatttaacttgatgcttctctgttttcattatgcgtctaagtttctaagatacttttgttttgagcaggtcaatagatttgcagctttaatcttctgatgacatatcatctgcttgtaattttcaatttacaaattaaatggacatagaaaattggtagaaaatccctaatattcttttgttcaactaacataggattgttaaatttcttctctaccaggaagaaac

SEQ ID NO: 22086 - DNA, 582 bp, Glycine max
  Intron number 1 from transcript Glyma08g13380.1 (locus Gly ma08g13380) derived from phytozome v7.0 (chr-ID Gm08; pos 9789928 to 9790509)
tcgttgccgtcaaatacatcccacgggaagacagggtacgttgctacttatgtatacacttgtattttgttttcccaatgatttgacggtggcaaaggaaaatcataaaccctaggagccctatgttttttggatttttatgtaatatctattgattttctttagaattctattgatcatttttagtaaactttcttatttttaatcacttttttttatccacaatactcaaatccctaaaccttatttagaagatcgaattcagtatcacttagatcaataatttattatttatttatctttaaaaatatgagttagaaaaaattattctcgtttctattgtttattaatgtttataatgaagtaataaataactattatacatcccatattcttgtaaaatatccaaaaaaataatattttcgtgttatatttttgaaaaaatatattttcaaaattaaagaaataattcgtaaaacaaaccgcacctcagatctcttgcttttaaaaatgcaaatatccattcactttaataaaccttgtgttttttaaagcaaatttaatactttttgcagattattg

SEQ ID NO: 22087 - DNA, 546 bp, Glycine max
  Intron number 1 from transcript Glyma08g06860.1 (locus Gly ma08g06860) derived from phytozome v7.0 (chr-ID Gm08; pos 4919984 to 4920529 reverse strand)
acaactttcacgacattgcgcactatctcattcaggtaatttgcattttttttggggtgttcgtgtaagtgctttagctcagaattgatgatagcgaaattgtgcgtttcatttttacttttttaaatttaagttggtttcgccttcatatgcagcaagtttggattttttcttctttgggtggttatgtgtcgtttaagaaattaatacttttcgtaattctcagtgaatttaatttatgtagaaggactttgtgtttgattgttataatatttattattacatattatattgtgcatacttgaggacgagccctggtacagcggtaaagttgtgccttggtgacttgttggtcatgggttcgaatccggaaacagcctctttgcatatgcaagggtaagactgcgtataatatccctcccccataccttcgcatagcgaagagcctctgggcaatggggtatgaagtttttattatattgtgcatacttgtgaattaatttaggttgaatgtgctttaattttgaactgtgcttgttatgaagc

SEQ ID NO: 22088 - DNA, 397 bp, Glycine max
  Intron number 1 from transcript Glyma05g22440.1 (locus Gly ma05g22440) derived from phytozome v7.0 (chr-ID Gm05; pos 27607715 to 27608111)
gtggctcttgatagctgataaaggtgacttttctggtaagcatcttctttgtgctcgtaaaaaaatagaagaaaaaaatggcgattcttactttttttatcctattcgtcttcgtcttttaaggcttgaaatgtttttttgagtcttctagaggttaagtgaaacagaagatttctttgtagaattttgtgagtggaactggaagtctcgttgactttgttgaataattgtgtgaggattgaatcttgatgcatacgtatgggtagttgaattttttttccctgtcatttgatgtctacctttgaagcgaaccaatatatgattcttgagggaattagggctcaaaatgttcagagttaaccaatctattatctaactaggtaaaaatctctcccag

SEQ ID NO: 22089 - DNA, 581 bp, Glycine max
  Intron number 1 from transcript Glyma05g20230.1 (locus Gly ma05g20230) derived from phytozome v7.0 (chr-ID Gm05; pos 24380158 to 24380738 reverse strand)
tgttgttgttgtttttcatttggggtgagataaaggttggttttttggttctcgggttttgtttttttattaccctttcattttttccaacattctcaacagtttgtgttgtttcctttcactcttctttctattccttttgggtttttttcgcttcttcacgttttgcttagaaaatgcaccccaaaaaaagaaaaagcaaaaaattaacaggttttatttttgtaacaggctacagtaacaacagcggctttggcaaagaagttttcggagaaattaagaggaagatagaagttcttttattttgattttattaaaatggtgtttatgttttttttgtctgattttttgtggtttttttggatgcttcgttgttattttttccttaaactcatatttctgatattgttcagagttttatgggataatctacgaggtaagctataatttttatgtattttcctcagtgcttaattatctggatttgcatgcaagggtgtctatggctcagtggtatttttagtgctcccagttatgcattttctgatcatgttcattatgacatttattggttgcaggtt

SEQ ID NO: 22090 - DNA, 828 bp, Glycine max
  Intron number 2 from transcript Glyma08g23450.1 (locus Gly ma08g23450) derived from phytozome v7.0 (chr-ID Gm08; pos 17889403 to 17890230)
tcaggcctttgcccagcaacatttcttcttataaggtactacctattctttgccacctttgattgctccttcattgtatcataacaaccttggctgaactacacctcaatagctagtagtttttgttggagaattcaaggcctttttataggaatgttctaaaccactttcataagcttaaccagcaccttcaattttgagcttagtgcttgctaatatgataagtaagaccatataagttccatggaagctcttctaaacacccctaagttccccaagtttggttaggttattatacatttgtgaattattgagaatgttgtcgcatgcagtgttagtattgaagataatgcctttccttgttatggagcataacaaatttttacatcgtctttttttatacctcacttcatcttctgcttctttttttattagcagtgactttcaactcatcagtccgactagttgattttacgtgtgtaccatggaccaggattgcctgcagtgtcctgctccattcataacccaatggctcaaattattttgggattatattttattagatttttcacacctagtgggataaggttgttgttgttcacttttattaactttttattgtatgaaaaaaaatggtagatattcttcttgcattctctctcgagctgcagggaatccagctccctgtactatatgccaggctaacactgatttcatgctttaagaaactgttctaattcatagtcacttgacctttgtgtgacatgcttatctgaatacattgcacataattttctcaaattcctaaatatttcaagggatcttcag

SEQ ID NO: 22091 - DNA, 826 bp, Glycine max; identical to SEQ ID NO: 17736
  Intron number 1 from transcript Glyma08g10250.1 (locus Gly ma08g10250) derived from phytozome v7.0 (chr-ID Gm08; pos 7416003 to 7416828 reverse strand)

SEQ ID NO: 22092 - DNA, 729 bp, Glycine max
  Intron number 3 from transcript Glyma08g40780.1 (locus Gly ma08g40780) derived from phytozome v7.0 (chr-ID Gm08; pos 40608090 to 40608818 reverse strand)
gtgtctggctctggccatcatcaagtcttcttcaggtaagcgagaatccataggtctcacttatatttttgttcagtttaatgcaacttactgcttttagttttgccattttaatttaattttgaatttcagggactaattcctaatattctataatatctatgaaaattggtttctgaatctaaaatggagatttactcgattctttcctttattttgaaattgtttgtacctaattctctttactaatgtaagggacttgtcttttgtttgtgttgcgaatgtgattgccacactaactgaaagaaatgaaaatcctaaggggtgttagtgtaactccatgttacctttgaactgtttataacatgtcttgcctgattatgagggctttgatttttttggaaagttttgtgcctgttaatttgagattatattcaatattagtgcatcatgtccaacattactacaacattttccttcatttcatgtagttgatgacagtaccaatttgccaatggtcttatacatgtattagaacttagaagaacctcgtgcatgcttttaattttttaaatatctacagtagttccttataatttactttcaagaaaattgctatatagtctccaggctacctcacattgctctttagccccttacttttattgttagccttttgcattttgaattgaagttttttcataattttttgttaatagaaaattacaa

SEQ ID NO: 22093 - DNA, 808 bp, Glycine max
  Intron number 2 from transcript Glyma08g40780.1 (locus Gly ma08g40780) derived from phytozome v7.0 (chr-ID Gm08; pos 40608828 to 40609635 reverse strand)
gattaattccaaagaaaaccctctaaaaaaccgaggttagggaaaatgaaacctactgctatatttgtagggaaaatgattaagactacttgatttttagaagatgatgattgacgactcttatttaggaaacttgtatttgactttttttagtatttacatgtatgttttatttaagacacctatgattttttattgttaattatgaatgtcatgaattttgagcaatttttatcatttttgagaatttatacgtatataattatatattgtacattatattaagtataagctacataaaaaaaaattcagaatagcggctatcctctatcccactatattggttttttgaccagctgctacatgccgctactcaagattgaaaacattgctggtaattctagaacatgtatagttttttttccaggttttagaatgccattgtattattattattattattattgagcatgtttggtatatagattactttttgagaaataatcgccaaaagttctcttgtgaatgattgttcctcccgaataaattgaaccaccacgcactaagatcatattgttaaacaatcattcttttggatagaatatagttattgcagatgcagtaatgctctgcaagccgcaataattgatagtaaactctaaagggctaagagggcaattaagttttttatttagttgttaacaactaacaagcatcttcattacttacaagttttttccaatccttcatctctttttcactttctctcacagctctagttctctctcccaagctttctccagctttg

SEQ ID NO: 22094 - DNA, 504 bp, Glycine max
  Intron number 5 from transcript Glyma07g32560.2 (locus Gly ma07g32560) derived from phytozome v7.0 (chr-ID Gm07; pos 37432923 to 37433426 reverse strand)
ctgatctatctcaccatgtaagttatgctattcgcatgtagaggatagtttgaatttatgaagaatgattaagagcctgtttgttttacaatacaattgtgattctccacactttcccatgcaaaattacatggccccattcagagcgaaattttttgggtctatttgttttacaccaggaattaattccccgcactgtgcacatgtttcatttggatacataacccaatcatcttcaatggcttgaagtcaattatacccaacattaaaagaaatgggcccttaatcagccacaaagctctgtttccatccatatacaaacagactgttaatttgaaagggaataaaaagaagggttggatgaacttcttttttggatctttagtttagagaatttattagttgcataatcatttttttttcttatttatttatttgtctttgtctgatctatttatgtcttctgcagccaaaatatttgccaaacttcattaggtaacgaaa

SEQ ID NO: 22095 - DNA, 591 bp, Glycine max
  Intron number 1 from transcript Glyma07g32560.2 (locus Gly ma07g32560) derived from phytozome v7.0 (chr-ID Gm07; pos 37434250 to 37434840 reverse strand)
tgaagtgtttgttctccgtcatctcgcgtcgttaggttagttcatctctgccactgtcgttcctttttattcttaatttcttttctttaatcacaattatcctgtaacggaatctgttcgtgtagagtctgtcatcgagaaaaccgctttctacgcttttaaatttgtgtttttttttcttcaactgagtttttggatcttcttgaataaggtgatccttcaccaatttttgttcctttcgatgaatttgagagccgctattggcatttctgtccctgtacgcatgcgtagggattgctttatgttttaatattattgagacggtcttttgattcaattaatctctattaccgatcgtcgattttagccaattgagatgccaatttgatgcctctaacagtgtaattaatacttctcctccaaaatagtagtattatagaaaatgattagcataagtgtattaaaaaagacctgtttctatgtgtgaatatgttgattgttctgtattacgttaattggaactcatattgtgtatttgttagttcattgaactcactgcattgagtggatttggtacaagttgagttcaga

SEQ ID NO: 22096 - DNA, 642 bp, Glycine max
  Intron number 4 from transcript Glyma07g05390.2 (locus Gly ma07g05390) derived from phytozome v7.0 (chr-ID Gm07; pos 4060475 to 4061116 reverse strand)
aatacgaacttgacaaaaagactggattaattaaggtatgaaccaattgcttcttcgttttgaaatgggagtatctacctatgaagcacgaactttgacacggacaccggacacgacacagacatggacacttcgacacggctaatgtataaaatgtaggacatgtggacaccacatacacacacaaagagattctaattaaatgaaatatgagtaatatataacaagatatttaaattgatggtgtattcatcttttcaagtgtattgtgtaaaggtgactgtttaagtattcaagtcaacaaaaagtaatttttgaatcagacaccaaatgagaagtgttggacaaatgtttgagtgtgtcgattgtcggaaatgtgtccgacatggcgacactttgaacaagagaggtgtgtgtgctttataggtatatactgctataatctgaaaaagattttacaaagaaatctcttcaagatgatattttgtgatcatgttttttctacaattcttgtggattctcaaatcttgacccttcgcaattctgacttgtggatgccattactcgtctatcattatattcttcttaccttctaattaatggtcaggttgatcgggttttgtactcatcagttgtttatcc

SEQ ID NO: 22097 - DNA, 781 bp, Glycine max
  Intron number 1 from transcript Glyma08g13440.2 (locus Gly ma08g13440) derived from phytozome v7.0 (chr-ID Gm08; pos 9840877 to 9841657 reverse strand)
tccagttccttccattcctttcttccggatcacaggtatgtattttaatttctacgtacgtctcctcgaatcttccgtttttctttctttcttcacaagatcacgtacgaaatatttctacacactactctatcacttacattacacgctgcagcttttctgatagtaggatgaactagctagatatatatgaaattcctaattaatttgatacatggaaatgcaaacaaactagctcgatcgatcacgagatcaataccgaaaaagaatgaatgtcctgatagctagtcaaggatattcttaccttaatgacttgcatgtgtaacttaaaaatatcaagtgttttgaaattgtttgtggtgtgttgaagtggtttttggatcactgcggattatatatatattcacaatgattaatatttgtcaaatccagttgatcatttttaatataatatttattctcaattatttatttattttcattcacacagtactccaatttgagatttttcattaaaaaaatgtttcaatcgaaccaacgaagcatatatggtgtgttgaattggtttatatttagtactaagatgattaaataagaagaaacgcaaagtgaaaatttaaaatatgcattcttagtattgaatgagttatttgagaaaacttatcaaaacaaattaaagctatagatacacttttactctatccttttataattaatttgttgactaaggcacatattttatttgaaatgcttttcacgagcaaagggaaaataaaaaaca

SEQ ID NO: 22098 - DNA, 928 bp, Glycine max
  Intron number 1 from transcript Glyma08g16100.1 (locus Gly ma08g16100) derived from phytozome v7.0 (chr-ID Gm08; pos 11739504 to 11740431 reverse strand)
catctcaatatgttaatagttttagatttttacttcataatttagtcttatgtaaataatatactaacaaaatatttaacaacaataaccttagtaaaactaaatttgttcttcattgtttataaaattttaaaacatgaataacgatgaatatcattagagctaaataaatagtgttattttatcaagtataatatatatttcaatcatattagttttagttatcattaaatatgttttacacatttataattataatattatttgattatcgttgttacagggatgcgatgaagacgatgataaaaataaagaataataatattcaatctcatagtattttattttcatgcttatcttaatcatcatttatatctttttcttaaataattatatataaacataaaataaaatattttatttttatttttttagtttaattttttttctaaattctacaaatatactttgatttgttctcagcttatttttttattaaatcatttatcatgtgacattgtcaaactgatattctaaattagtcttataattattctttaattttatttattatgaatacatttcaatatgttagtagatttttacttcataatttaatttttttataaatattatattaacaacatatctaacaccaataattttaataaaattaaatatatttcattatttataaaatttatcataaatatcaaaactaaaaaaacagtattattttatataatatattatatattttaatcatattaattttaattttaatttaataatttttacattcaaaattaaatacatacaattatacatataattttacaagttactgataagtccggaactagtttagataaacctccgactctgttctcaaggcgtcgtaacatcctcgtcactctcacacatcaca

SEQ ID NO: 22099 - DNA, 913 bp, Glycine max
  Intron number 2 from transcript Glyma07g11660.1 (locus Gly ma07g11660) derived from phytozome v7.0 (chr-ID Gm07; pos 9862005 to 9862917 reverse strand)
taagtgcaacaacacaggaggaggaggatcccaaggtaataataataataataataataataataataataataataataataataataattaatgatttctttatttcttgtgctttgtatatgtatactataattttcattggttttaattctttttcttcttgcaaaaatctattatataatttgtaatgatttgtttgtctgttatttttcatcatgtcatgtcatgatatttttctccctcctcttcttttctccatggagaagaaaagttgtcatttgttggagattggaattggaattgagttaggttgtcacgttttttatattttttggtgaattcaagtttttcattattatacttattgtttcgttttgaaattattcttccattttgatattgataggtgatcgctgagtaatccacgtcattttgcatgatatccgaataaacttacttatatgtgttgcattttccacatgtatactcctgaacaagacagaaggcatgcaaaaatcttattaatcaaattgatgaatcctccagggcaataacataaatctcttctaagcaaatatgaaatttgttaatataagtccccctcactaataatgcatgtatcttggaatgtctattggattgtctttgttaatgacctatttttctataaataaataataatcatcaaatataataggtttgttgatttttatattaattattttaaaaattacaagtgataatttcaaattgataggaggtgcagaatgtgcttaataaatttcaatatctttacctttccttaaaattttgcatttgaattgcatcaatggtctggtctaactttaaacttgttttgtttcttttcattgtagaacaaagctcaacagcagcatcagaaggtaaatca

SEQ ID NO: 22100 - DNA, 401 bp, Glycine max
  Intron number 1 from transcript Glyma06g01140.1 (locus Gly ma06g01140) derived from phytozome v7.0 (chr-ID Gm06; pos 704894 to 705294 reverse strand)
ccaagtactctcactccttcctactttcttctctcttccattttctaccaccatcttctcaaatgattcaaagtaattttttcaggaattcgatccatgagtctgtctatacgtacacgtgaaaaaatatctcttacaaaaagtttatctatttatatataaaaaaatatgtgttggaagaggtcactctcttatccatgtctccacgtctgtgtgtataaaaagcatctgttaaaaaacaatctcttgcatgaatctttttatttctagacattagtttttgagtctcggactcggttatatccttgattataaaaataataaaaaatatttgttaaaagaagtaatcatttatttatttaacaggagaggcgtgcatatctattttgccaagaagacag

SEQ ID NO: 22101 - DNA, 553 bp, Glycine max
  Intron number 1 from transcript Glyma08g31220.1 (locus Gly ma08g31220) derived from phytozome v7.0 (chr-ID Gm08; pos 26741815 to 26742367 reverse strand)
gacctggtaagttcaacatttacgtttatttcatttttggaaagataattggggatgtaaaatcgtatccagccccctccgagacttcaattattacaattttattgtttactattagttctccctcttaaagaaattttgagctaaattgagttttcgtaagtaagaattcaagtagcaactcgttggaaactgcttctccatactaccgttttcatcctaaaaggaaagattcggtctcaccttacatttttttcttacaattgatttaattaatatatttttccatgttttcggtgaatttacatttttcattttatttgtctcggagtcaaactatagcgaccatatacgttttgttgttttattgataaaaaaatatacgttttgtttttacattcaataataagaggaagaagaacggattagtttagtttaatcattattttttaatttcttaaaaactgttttaacaaaaatgctattaattatttatatctcgaaaaagattacaatgattgtacattttcagctgtattcaagtcactattgt

SEQ ID NO: 22102 - DNA, 681 bp, Glycine max
  Intron number 1 from transcript Glyma08g27740.1 (locus Gly ma08g27740) derived from phytozome v7.0 (chr-ID Gm08; pos 22069983 to 22070663)
aacgagccaattacaggttttggcttttcttttttttctcaatttgccctaaattttgaacattttgtgttaatgtggagttttcatatttcttgtttattagttcagagaaggaagtgatttgtttgggaaatgatgaattttggagttataggtagaaggaagtgagagatagagataaaaaattaaaggaaaaaagagaaatttgataaatgtgataaacatttgaagacaaatgaagggaggtaggaaaaaacgtagggtggaaatgagatgggttgagaaactgatgatataataatgaataacactttgttttgtgtttcaaaagtttaagagtgttgataaacgtacaccaaaaaggaagagagagataaaaaagaaaaggaagagggaaaaatgactgatttgattagtgatgtggtggaaaaggaaaagagataggaagaaaataaggtgaaaatgggatggaaggggtagtgagtgtatgtttataattttaatttaatatcataatgtatgcatgatgttgttgcttgtcagtataataatgtgtttggagattattatatcattttatgtgcttttgtctctgtaccaccaataatttgtttgaaagagaggagaaaagaaatgatgagtttttgagttctttacccattgtgcaggcataagcaagtg

SEQ ID NO: 22103 - DNA, 767 bp, Glycine max
  Intron number 3 from transcript Glyma08g11800.1 (locus Gly ma08g11800) derived from phytozome v7.0 (chr-ID Gm08; pos 8595190 to 8595956)
aacggcacgggcaacgcgggcgcttcattactctggtgaatttacatgcagtcctattcttttgatattgaccatagctgtgtagtgctctttacttgttcaagatagtgatattctcttatttctagaattttttttctgacttgttttttgctgtctcatgtgagaagattaatagaggcttgtgtagtttaagtggatcaaatgctccatgtaaaagaaatagaggaagaaccaattaagtttaccttggtctgaagtgttttattgagaatatgatttgcaatagagcctagtctagtatgttgattgatcctgaagctgatcccacctagtgtgataaggttttcttgctattgttgcattttattttttctgtctgcctaagtgttataaatggtgaaaggccaaattcttccatataaacacgcctatggcgcctccaaaggaggcctctcttcacaagttgcttgtggcggttgccaatctgccatggtgctgccatttaacaacatcgttctgtcttgaaaattactttcttcttttgattggatagttcgtggaatagagatctgtagttattaatgcatcatggggcattatggagtatgttagctgtttcattatacgcatgacagtctctaggatacatgtcataagtagtcaatttatagggcattttcaatacaccattgatgttatttatatctggacattgataattattgagtctagatattaaacctgggttctcccttctacaggta

SEQ ID NO: 22104 - DNA, 908 bp, Glycine max
  Intron number 1 from transcript Glyma05g37360.2 (locus Gly ma05g37360) derived from phytozome v7.0 (chr-ID Gm05; pos 40969306 to 40970213 reverse strand)
ggatcggagggtttctcgctaattcaaagtttcgctcattatcctttccccaatttctatttctatttctatttcctttctcttcttctttatgttatttttttaacccttattttgtttttgttttcttttttttgttattgctgtgtctatgtatgagtgtgtgtcgttggctttggggttttggtgatttgatctgtgatattctgttgtttgtttgctggtggtcttgagcgttatgaaataatgcaaatttggaagctgggaaaatgtaatttagataatttatgagttattgtactgtctttgactgggatattcataatttttacatcattataactgaaaatgaacctagtgagtagtgacaactgctctgactacggcagcagtcttgtaattcttacacttgtcaataatattgattagaaagataacggaaggttgaacttgatgttgaatgtggaaacatgttgatattattttgtccattgatgggagaggaagttgttggagtgtatatttgaagcatgccatatatgtgtgttagttcagtgttggaggctccaacttggaggagctctgcttagtggtggagatgctcactctgtttgctcaatgcttggttttgagtcatcccccatacacaggcgggattaaaccaatgtgcttcttttgcactttgcagttgtttgacttataaatagcttttactcggactgtttcaagtaatcatctattcctaatagatattgatttcttggatgcatgccgtattggatgaattgtcccttattgggtttaggtttagcctattaatttcagtctcaacttgtgatatactcatcatccttttgcttttttattcattattacatggttttactgactcactgttattgtgccag

SEQ ID NO: 22105 - DNA, 794 bp, Glycine max
  Intron number 1 from transcript Glyma08g02490.2 (locus Gly ma08g02490) derived from phytozome v7.0 (chr-ID Gm08; pos 1708874 to 1709667 reverse strand)
gtgctgttaaggtttgtttgtatggctttcacatcagattaaataccatttaaactattgcttatatcattggcatacattctctgttttattcatcagttacatttttgcacatgctgttctgaaccaaaatgtaatggttttatcttcaagggtctactaaataagcttgtatatttgggataaaattgcttctaagggtgagtttgttacaccttcaaaaatgggagcaaaacattgtggatgaaatttatgtaaaaaattgtactgaaaattcatcatttaatttttcattcccattttcaagaataagagaaactaaccctaaagggacaaatggagaactgtactttaattttgtccagattggcatccgagttttaatgagctgatagtaaattgttggtttcttttcttggcttttctaattggtttccatgattctctatggtgcttgtatgattattttttgacctgaagtgtttaaggatgaccacgtccaattgctggctttattttagttcaaagatggattgcttttttaacttctttaatgtagtactctaggaagcagagaaagtagtaatgagcatgagtatgttatgatacactgggtcccatcatgtagagtttgtctgataaattagaatgacattggtatccaccagaaagcaaaaaaaaaaagttggaaattttttcttttagtatgaaaaatgaaaccatttcttgataattggtatgctcttatttccagctttactaattgcattgcctaaatggctgcattttcagct

SEQ ID NO: 22106 - DNA, 981 bp, Glycine max
  Intron number 1 from transcript Glyma08g07560.1 (locus Gly ma08g07560) derived from phytozome v7.0 (chr-ID Gm08; pos 5412728 to 5413708 reverse strand)
ctgtggcaaatccacactacttgatactttagcaggtatatatcataagtgaagtttctaattaaactttattattaaatttggtccttttttcttaaagaacctaactttatatttcactgcttctgaatttttaaaaattaaaacatgtaaattgttttgttactatatctaaaaacaatatgactcttttaaattgaacaacttattttaaaagttaaagtaagttattttaattaataattaatgattgatattattatagttagtacatacataacaaatcataattaaatatattagaatattagttgttaattttttatttactttatctttaaaaatcgaacccaactctaaaataattgactcaaacaaaaaaaaatgtatgtaataaaaatatatgtgaaaaaagatacttttgaacccaactctaaaataattgatcgaaacaaaaagaaatgtatgtaataaaaatatatgtggaaaaagacacttttgagttttcctttttaacaaaatacataatatattcaactaatatatattaagagaggtgaaaaaatagtcatgtcaacaacaaagatcgatctaattgataaagaatatactcatatctcattggacgttctgttatcaatagatgattttttttataaatatcttataaatacttttataagtactcattaaactttgagacacatgtgatctgatgagctatcccaattcacctcacctaaactttactttcaggggaaaaaaaagaaaagatcttgattaaaaattctgaaggaggaaaagaaacaaagtttgcaaggaagaaacacttttattacatatctttctattaatagttacaagtcttttataggatccacccactggtccagatctggttaattagaatgaacaaattaaaagatagtatgcattcatatttcagggcgactaggttcaaacacaaggcaaaccggggag

SEQ ID NO: 22107 - DNA, 631 bp, Glycine max
  Intron number 1 from transcript Glyma06g44170.1 (locus Gly ma06g44170) derived from phytozome v7.0 (chr-ID Gm06; pos 47123355 to 47123985 reverse strand)
ccaaaacacccaaatccgagcctccaccaaacacagtgtgccacctttgtgtcccctcttccatgggtgattcgcttctgccgccaccaaccacggctaccacgccttagagaacctcccaacaaggcttcttctccgccacctcaagagtaatttcttcttctctggatttagtttttgttagcttaattgttttaattggcgaatatgtttttcttggaaagacaactaatgcaatcgattgagacttgtgtgtcaaagaaaaagaaaattattctttgccaaatggagatggataacaagcaaggatctgaagagatgattagatttttatgttttcctttcggcatgttcatgatggtcgatgggtttttctattgatattgatatctatggtcttaataacaattaatgatttacatatataataaatatattgacacttgctttagtttcataaattaaaagaatttgattttgtaaatttcatttgattttgtaaattaatgattttgtaaaatttcatttgaatttgtttttgtacaagctctcaacttttattatatgaatgagaagtttcttttttcctttttgagtttatttgaacttgtggtgttctaattgtatatat

SEQ ID NO: 22108 - DNA, 779 bp, Glycine max
  Intron number 2 from transcript Glyma08g28100.1 (locus Gly ma08g28100) derived from phytozome v7.0 (chr-ID Gm08; pos 22388684 to 22389462)
aggtgggatgttgcattgattgtgttgtaactgttgtttgtgttcgttttgtttggacttaagtcttatgtgctcaaatagtttaaattgttcatttcgtactgttttgaattatgttctataaatttaattgcattccttttgtgttagttcaaaagaactaggaactacccaaggaacacccttagaaaaccatgggagtttggagaaagttcaaaagtttgaagagggggaaggagagagtatcttgaggaggcaaagacctacttggttagctctaatgttgtaataaaattatggctttgatcttatggtttttaatagaaaaaaatataattatgttagaatgctttttggaggcaggtatggtagccaggtgtggcaatcataagataagatggggatgaatatgtgtgatgtaaggtttttttgggtatctctatgggtatgaaatcggagatgagtagtacactactagctactcaagctgatccgtatctcctcaaatcacatgcgcatattgatgtatatacaattaaagtataaggcttgataagacttgaagattgtgcctttctaacggcaaaatgttctttctttttgtcatgttaccctatatatgttctacaatttattctgaataattaagttccctgggaatgacattttatatctataggtatattaattgaatatcttgttatgggtgcaaccatatgtattgtttattatttgatggctcaggttagaatacacaagttcttggagaaaactaagaa

SEQ ID NO: 22109 - DNA, 539 bp, Glycine max
  Intron number 1 from transcript Glyma08g37180.1 (locus Gly ma08g37180) derived from phytozome v7.0 (chr-ID Gm08; pos 35525816 to 35526354 reverse strand)
tgccttcctcacccaccaattctaagcattccaaggtatttaaacaactcccaattaattttttctatcataattgtttttaatccctgtaattagaattttttattctattagactttgagatactacgctcacaagttttgattcttttaagtcgactcgtaattaatcataaaccttacatttaataacatttaaagttcttcatcctttcaaaggatatactttgtaaaaactaaactaaattctacatgtattgttgattgcgctgcacaccctatgtctttaggaataatataacctatgatttttcttttattattacaaatgggatagtggtgttactatttattatcatcataaaatccatcaaatattagttattaattttattagtggagaagatcgaatctagagtattttttcttttttttagtcatcaacccaccttataactccaagatgtgtttatttctgatatttttttttattttattttgttaggaatcgaaggaaaacagggggcaaagcttgccagt

SEQ ID NO: 22110 - DNA, 787 bp, Glycine max
  Intron number 1 from transcript Glyma06g11590.1 (locus Gly ma06g11590) derived from phytozome v7.0 (chr-ID Gm06; pos 8937120 to 8937906 reverse strand)
tatcgcttctggcccaagaatcctccttcttacaggttaattatactttcatcaatcattccttcccccttttgcatatatatggacgatgtgccatctcattaactagcatatgatattattgctatatattattttatgcattattataaagtctcttggtgaatttcaaatttcataaaccagcttaacgtttttcttgcttctggggcatgtttggtgatggataatcttagcgtttttcttattgttcaattcgttctcttttatttgctcaacttaataacctcttaatagtgaataagggctggtttgagaataaattacttctacaaagtattttttcaaaacaaaattctcttcagaagataagaaaagaagtaattaccaaaaattctttattgtgtgtttcctactattattattattaaacttcaaattaaaattaaatgcgtcgtatatatggtggtgtgttttgttggtatagcaacacatcataaaaaaatggtgtacggacattattttatcatatatcacattttttacacacatttttaaatacattcttatattaaaatttgttaaaaataaataaaaaattctaggtcctatattatatttaataattttttctttattttataattttcaaaaaaatttaattaattaaaaaaatgcattgaaatatgttattttctaacactccccgtttatcatatttatttaagaatactattaattatatggagaataatgaatgatccttgatttggttgcagagaggcta

SEQ ID NO: 22111 - DNA, 893 bp, Glycine max
  Intron number 1 from transcript Glyma05g33260.1 (locus Gly ma05g33260) derived from phytozome v7.0 (chr-ID Gm05; pos 37979752 to 37980644 reverse strand)
acacaacagccggcgatcgccttcggatctctgaggtaccaagttctttgttcctctccaacattctcttactctctcttcttagatttcagtcttgtacttctatttgtactaatttctatatagtatcgaatttaagcataaagggaaagattctcattcattatacatacacgtaatttctatacagagaccagacaggcataactacctgacccaaaactgtctaaccaactaacagagaaactagctaactaaatattaccaaaaataggctttgtgcaattaattagagaaaatagccttttcattaacagattaaagcatatttataccgttatttaattacaaatgattaaatttattgacttttattaaactcaattcattattgactatatttggatatatcattatcctgtaatattatacgtgatatcatgctttgggttttgcattttttggtccttaatatttctttatcttacgtgaaaaatatcacgacttttttttcttttttcttttgagaaacgttgagtttccacgttacgtgatgaggtcatttagagaatctctaaactctaaagggaactaaccatgataacttgaaagtaacaaacatatgtggtaatatatgataatactaggaaacttaattaagttgaagacgaatgaaaagtttgtttgagcatcatgtattttatattagtattgtttatatgctatattaaataatagaatgttaaattttgatgtggaaagctttttatgccaaccctcaatcatttgtttggtgattctttatgaatattatggattctctgtttttgtgtttgacaaacaaaaattgtgatccagaaaaggaattcaaaaagagggtgtgagagaccttt

SEQ ID NO: 22112 - DNA, 456 bp, Glycine max
  Intron number 1 from transcript Glyma07g30420.1 (locus Gly ma07g30420) derived from phytozome v7.0 (chr-ID Gm07; pos 35435135 to 35435590)
ttgctttatctgcccttgttcctggactacagaaggtataaagaaaatatcaatgtgaattttgccctcatatggttctgcttttactgcataaatgttgaacacatattggagtattagtccttgagattatataactggtatcatatatgttagttcctcttatattttactttagtccataaaaatttaaaaggactaattaacttggtatgactatagcaaattcaaatattaagctacaagtggaagataattttaaggatttgtctattaattatctctttaactagctgtataatattagaaactgttaatcaaaaaaatattagaaactaataataattcagatcttggtttggtaatttgttattagtgtgtgcttctaacacatacattcgtctcattttgcaatgtgctactaataacagacggacaaagcttctgttcttggag

SEQ ID NO: 22113 - DNA, 718 bp, Glycine max
  Intron number 1 from transcript Glyma08g24410.1 (locus Gly ma08g24410) derived from phytozome v7.0 (chr-ID Gm08; pos 18600259 to 18600976)
aaagttcaaacctcacttcagattttgtttactgggtatcatttttttgtgctttctttcattcttaacgttatctgattccattttggactctttcgttgcatgagtagtttttcatatctgcgcatcgtctgttcgattatttgcccaagtggtttacacgctggaatttttgctttttgtttatgttgctcgtgtaccttattttcagagctttgagtatgtttgtggggttccatttatatggttgactcgttaggaaatttgaaaatggtggaggctttattttatttttttatcaatttgttttttggcgagttcaaaaggaagggttttgggtttgtgacatttttttatgataatttgtattgctggtttttcttgaaaatgctagattggcttgtaactggtttgtattagggtgctgatagaagctgagtagtgactatgcattttatgttataaaaaacttaaatactgctccttaaggacttttcgtgttgttctctaatcagaattggagttttgccaccataatctatagtgacatttaattcaaacctttattatgcagtttactgaggtgaaactctaattctgattggaaaacatcaccaaaaacacctaaggaattgcattttaagttttgttcttctatgttttgatattggtttgtggatgatgtgttgtcatgcctatactgcagctgggagattaa

SEQ ID NO: 22114 - DNA, 974 bp, Glycine max
  Intron number 1 from transcript Glyma07g34640.1 (locus Gly ma07g34640) derived from phytozome v7.0 (chr-ID Gm07; pos 39684468 to 39685441 reverse strand)
ctgtctctcttactgttggacccaaaggtatatgtatcactatggactatgcttcgcaatttgatgattgaccaaatcattgttattgtgtagctaatttgttgcattgcttaattgctatcatattcaattgcatttttctgcctcaacaatgaccaatacctagaatctctatcagcaactggtttggttaagtgtgtgtttgggtgagcccttgcgaagttttttttttttcttttttatgaaaatgattttgaagtaaaattatgtttgtacgcttttatttcgaagtaagataggagtaaagctcatttttttaatccaacataaaagctacttagaatcaactttacacccaaaaataatcttctcaacgtgggaccaaacacatgaacatgtttgagttcatcacgttcgaattccagctaatatgattttaggtaagtgttcacatgtttggtttcactttgagaaattacatctaggtccaaaatcgatcaagttgaagcaactttagataacttttgtgctgtataatattttttgtattgagtttactgctaacttgcttttagagttaaaacattaaacatctgacataaattacttcacttcaagatcaatttcattcagaattaagtttacaaagctcacccaaatacacaaaaaattaactaaaatcatgttagctggtgttttaacattattttggatgatccattatgaatccaaacatgcaccaagtgcattttttgttttgattgggctttggtttgattataagctgttttgtatacaaaataagctaatttgaagaaacactaacaagcctcaaaattgctttaaattatatttgagctggaaattccttgcttttgaatctcaatattattatatagtcattggttgattctagtccagtgcttgttgacttttcttgcttatttatttcattcctaaccatgtaggacgaa

SEQ ID NO: 22115 - DNA, 916 bp, Glycine max
  Intron number 4 from transcript Glyma05g30830.1 (locus Gly ma05g30830) derived from phytozome v7.0 (chr-ID Gm05; pos 36089237 to 36090152)
atacattgaaggtacacatctcatgtcagccttgtgcatgatattaaagttgctggattcaagttaatttctgtacaacttctttcattgagaaggaaaaagatttaattgaataatgtagttggaagaggtttcataatctcatcaaagattcatgtgcattatttgttgaatgaaggatggtaaagaaagtgggatgagtaagtgggccagatgaatgaagtaaattttatcaattgatgttagtttacaattttaagaaccatgctttaatgggttgtagtgggtaggctcttaagattaagtagatggaaactcgagtttttgaggaaatgaggtgctggagttattcatttctgttattagtcttctgcttaccttttatttatttatttgttccaaaggaaatactgctgtagtaacaaactagagtaaaattggccggctttcttttacctagatcttcctttcattttcagtcatgcaacagactgctgagcccaaatttatcatcaagcattgagtaattttattaaattcataaattgtaaagctccctgtctctctctctctcttgcttttacacacacaaactatttcaccatcaacaatctagagaagttgaaatgtagaaacaaaaattccttatgaacagatacagggtgcttttattaattgctaaaatattgattcaaatgtaagaaagagagtaagaaattactgctagggtgatgttgcaaaattggaaaaataaaataagatcaagcacacggcaacaatgagaatcagaaagactcgtgcttcttttgttaacagcttttgagtattattttgtattatttaatattgggaaaatggtttgttaaaggctgaataatgattgctgcatattctcttgattctctgcattgcagat

SEQ ID NO: 22116 - DNA, 627 bp, Glycine max
  Intron number 5 from transcript Glyma08g22560.1 (locus Gly ma08g22560) derived from phytozome v7.0 (chr-ID Gm08; pos 17127225 to 17127851)
tctcaaagaagggacaggtatatctcacttccatcaactactatttgataacttaatttaagttctaaaaccatcaaatgattgcttataaaatataagcaccgtcgatattgttgatcccaaatttcttgctcaatgatgttttcattccaaatatcccttttttttctctttactttccctgtattttggcagggatctcacttcattaagccgatggtttcaatgggtaaattcttaacattttagtattactttacaagtgaatttattcctgttagcctatgtcttcatccattatcaaaattttcagcaaagatatttagtttctacaatggctatgagcttgtccaaagagtttggtctgcttaatactgacgaattattcaattgagttgtaatattatgtctcatgtgactaatgactatgcaagcaacttcaatcctcatgtagccaaatagcttaaattagattacaaggtagaaggaatttattcaaacatcccgaatgggggctatcaagaattaagattatgtgcccccttccccttttatttttcacagttgtattgtattgtaactaatgttgttctctgactttcttctacccttgcagataccctttgt

SEQ ID NO: 22117 - DNA, 733 bp, Glycine max
  Intron number 1 from transcript Glyma08g01340.1 (locus Gly ma08g01340) derived from phytozome v7.0 (chr-ID Gm08; pos 824771 to 825503 reverse strand)
tggtgctcctctcggcggctctggatcttcaacaggtgcgttttgttcttatgaaatgccaaatacttattggggttgatattgtgtcctataattttttatgtttctggtcttgatttttcatctataaaaaggatattcgcacaaactacataatcaaagaataaaaaaaatgcggatagcctggcctctcgcaatgcttgttttccccgtagtttctaataatgtttattccgaaccgaaagaatttatccacgggcttgttgtttctaacacatgagaagtttgaaatttaaatgattgacagaaccttagtactatgtctgttgtgatgtttgatgaggtatatattatttttggggagggaaaacctgcttgattaccggaaaatacagaggttactatacattgtttttccgtgtgccttcgcgaaattcaaaatacaaatttcaaagtctgtctcctaagtgcaagtttagagttaacctcttccctcaacaataaaaacgacatcatccacaaaaaaagtacgggttcaacattgaaccttctttgttaagcaatgaataaatccaataagttcttcattgttataaataattttgtatatttttgttgcccggttattttattccttttgtctggctgtcacaaacctgaggttctttccgttaccctgtgttgttgacaatgtaaccataaactgatatttcttctaaaatctgcagttggt

SEQ ID NO: 22118 - DNA, 431 bp, Glycine max
  Intron number 2 from transcript Glyma08g08820.1 (locus Gly ma08g08820) derived from phytozome v7.0 (chr-ID Gm08; pos 6286846 to 6287276)
acttagaggtctcaaggtaaaattatcactgccacatctctttctttctttcttgatcttattttattaagtgtgtattctttcttttgcgaattttttttccgagttgatttgacttaactggtgtgtttcctcaagcaaacgccctttgtcccaaaattgtttttaatgttttgaggcaatttctttgtttacatcaatgggggtttctttaaaccatagttttggaattttcgttttaaattgtttgccttttggctacattgtttggttttgcattgtctggttcttctttattcaagaacgcacgatcttgtgcaagaataggtattggggtatatataaatcctaaaaggttggcccagaccatgaaaacagaaaaacactgatgctacgatgagatgaattctttattcatcgcttgaagaagg

SEQ ID NO: 22119 - DNA, 772 bp, Glycine max
  Intron number 2 from transcript Glyma05g37590.1 (locus Gly ma05g37590) derived from phytozome v7.0 (chr-ID Gm05; pos 41153352 to 41154123 reverse strand)
cgactttgcgcagattgttgcctcgcgttgtggtggtatgtgatctggaacttcctctcactatggcgatgttcttgtcaattcttgttctgtagatctgatgattgttgtttctagtctgaaattttgttcgtttggacgaggaatcgaatctttaattttcactttcgctgtttatcattttcgagttatagaactcgcattaacgttgacttgcgtggactaacgaagtaatttgatattctgcttaaagaaaaaggagtttctgcgctctgttcaaattgatcggtgttattattcgtttaattgtgtattttataagatctgtagatctgaggaagaaagggtgaaaaacgttcatattcatattgtagggtatagacaaactatgcttattccgggtggtttaagatttactgaattgtcaaggggttggtgaatgtaaaataacaatggcgggcccgtggctctgtctttggggacaataatgtcttggacagtaggtgatgagtgttgaaggaatctggtctctgacaatgtcagtattgtatcctgagtgaacggagtctgatggtatcgagcaaagtgatacgtgaaatatttgatactatcgtgaatgataaatgttgtctttattttggttgtgaatagtttgtatccttaagaaaactacgtcgctgtgatattttgaggatctgctgtgtctgtcactgctttaatttattttctgcagtaagtaatctaattttctattgttccattatagtgcgcc

SEQ ID NO: 22120 - DNA, 546 bp, Glycine max
  Intron number 3 from transcript Glyma07g19210.1 (locus Gly ma07g19210) derived from phytozome v7.0 (chr-ID Gm07; pos 19102899 to 19103444)
ctcattgattgacacagcgttcgttggccatataggtacttctatggaagtcaaatttaggatctgagttttaatttaacttggagaaataagaaagaatagttagttagttagttgactgcagcattttattctgaattcgaaagctaaaagggtttgttttgttagagaaaatgttttttctgttttcatttttagctattaattacaaatttacaaaatgccacattgtttttcttttccgtttaaaatatttatgcaagaaaagatgaaaacaatagaattgttatttttgtcatttcttatacaaatctttgaaaacaggaaataaagtaaaaacaatatgtcaatttgtaataactattacacaaaatggtttctgaaaccaaacataccttctaatcgtgttaataagtgttggcttttctctggttctgtttgttttgacttgtattgataaatgattgctgttgaatagagaattctcccttaatcagatttctctatgcaggggcagttgaattggctgcagttggggtttcagct

SEQ ID NO: 22121 - DNA, 525 bp, Glycine max
  Intron number 1 from transcript Glyma07g11760.2 (locus Gly ma07g11760) derived from phytozome v7.0 (chr-ID Gm07; pos 9972201 to 9972725 reverse strand)
gctgtcgccaagttgtggggtgtgtttctcttccttcttcttctgggctttcagtttcttaaagtgctgatttttaggggtttcgttctctaaaattaatgttcttttaaagtaattttgagggactaatttctaattcaaaatttatttagttttgaaataagtgttttaaaaactaaaaaaactgacaagagaaacaaaatttagaaaacgaaaaccaattttgaaaaaaaagatggtaaagatacaggccattaatctctagaattgaagccggtggacaactttttaaatttacaaggttttctcaattcggggtttcttcttatttattttattttttttaaaagaaagggttaaaagcgcgtcctttgatttgattattggacggccggtgggggaaaaacttttttttttaataaaaaatgatttttttggtgggtttgaagttaaatttgtcttttctgtgtgcatattgaatcgttaatctgacatgttttgtggggtgtttttggaaatgaacag

SEQ ID NO: 22122 - DNA, 846 bp, Glycine max
  Intron number 1 from transcript Glyma07g08320.1 (locus Gly ma07g08320) derived from phytozome v7.0 (chr-ID Gm07; pos 6917676 to 6918521 reverse strand)
ttgcttctgggaggacttccatttcttcagatcctgtaagatatgcttttttttttagctcaaaaagtttttttttttgttttgatcattattttgtttggtgaactgtttttgctggataaatggaagaagttaagttagggaaaaaatgatctaattaattgttttaggtttctgggatttttttggaactattgaggatgctgcttgtcagttttttcctctattttcttaaaaatattttctggggttttcatttttatttttttagttggttcttatgtgattttattatcttacatgtatcctttattccgagtactggtgattgtggatttttttttttgttttttttggaagatttaggtgatgttagtaacgagttttatgatcttaccttttatatagtctacatctgagatatattctcatttactgttttttctatgtaacatgatctagacacaggatgattatgtgtgcctatttaaatggaagctttgcttacattttatgcattacctagattaagtgacaaattgaacttaaagtttggttgcattgcttgctggtgttccaccttgaaggagtgaattgggatgtgtacctagttgtttgttcttgattggtttttgtaatcaagctttgtatttgattatgatgaaacctaaatgtaattaacctgacttttaagtggttgagtaatgaaatttatgtggaatatgattttttttctctctttctccactaacactcttggaataatgcatgtctggaatattttaagtgaacttcaagctgtttctttcagggaggggattctaactcaaaaagggccaagtttga

SEQ ID NO: 22123 - DNA, 943 bp, Glycine max
  Intron number 1 from transcript Glyma08g10920.1 (locus Gly ma08g10920) derived from phytozome v7.0 (chr-ID Gm08; pos 7962586 to 7963528)
aggatcccgccacgcagattgatcgccaattgcaggtgcgtcgctaggtttctcgattgttccgaattgattggtgaatcattcaaatgctatgctatgagagttattttcacagctaggttttgcatgtttagccttagaacgcgattagtatgatcacttgaagatttacgatacaggatgcttgttgaacgacattagatgctgaaaatcataagaaatttgatgaatgctaatgttcacaccagtctagaaggtaggaatatcctaatggagttttctcaggatcgcacgagttgaactctgcttatgtacctgcagggattccaacgccaagtcagtgttttataattgtagctacaggaggagaatgggcctatttatataatttatttatattattctactataggctatggtagtgcctcttacttgatgaggcgtgagaaatacctccaagggtcaaccctttgaggctgcttaacaaactttggcatcagatctggtacattgcgactgtattgagattggtgtggtgccagaaggttcttgctgttaggccttatgtatcagctaatgagcttgatgctgttgggccagcacattggctttattcttagttgtagaactgagtcctcctgagagggatccggaacagctagtgttctgtcatgtttgaaatttgtgctgtggaacataaaagctgttttctccacttatttatgttgtgttgtggtaattgttagtgttttgttttgattgttttatgagttgatatgtaatggattttatgtatgatatatagtttcttgattttttttttagaaatgcaggctgttttatagtttgtagttgtacctatatttgtgcagcatagctattgttttacaaatttctgttgttaatgttaaacagggcttgtttctggtgtcaggttgattta

SEQ ID NO: 22124 - DNA, 827 bp, Glycine max
  Intron number 3 from transcript Glyma05g31910.1 (locus Gly ma05g31910) derived from phytozome v7.0 (chr-ID Gm05; pos 36943937 to 36944763)
ggacagaaagttgtgaagggcacgcatcaccctaggtatgatcatgaattcaaagcttctctcattttgttttttctttaatttttaagttgattaaagaatattaaattgatcaaacctttgatgatcgattgtatatcccaacacttgcaacatattctctctctctaatctgttacctctctttcattattgttttgatcataatcacataactggctttgctactagtttcggcaagatcttaattttctaaataatgtgcggatgcctataataattaaagatatatataaaagcaaaagtccactttatatgtcaagttcaaaatgtatatataaagcatatataaatttgttcaaaggataggaagaaaattttgccaaggttaaagaactaaataattatgaccctcagatgtatatagtatatgtaaatgtaactggtctattagaactttttcctgacactcaccgagtagatcatgatacattgatactcttgcttttctcacaaacccattaaagcactttcgggaaaaaaatacaaaatggtttttatagtgcctgcattaattatggtattgataactcttagatactgattctgattatagcatgaagatttttgttattaatagtcactaattaatactactatgggggttaaatatttcatcagttggaataaaattcactctctaaaaatatgatcgatcacaacaactcattgaacgattataagcattatgaagttatcttattgtgttttggcctacatttgcatgtatagaagctattaccgttgcatacaagataattgtcgtg

SEQ ID NO: 22125 - DNA, 1005 bp, Glycine max
  Intron number 2 from transcript Glyma08g24780.1 (locus Gly ma08g24780) derived from phytozome v7.0 (chr-ID Gm08; pos 18934226 to 18935230 reverse strand)
tctgcccaagcctctctgggatctagtgttgccttgtaagttacacaaattattcttatgttgattttcgattcaatctttttacaggtgtgtaatgtttaggctatttgcttatttgatcaggtactaaattttagttgatgtcttgactgtttaacaaaagattaatcaccatgtgaacacttctctactgcaaacactccattataagcactcatcatcaccattatctctttctatctctcacttttcatcatattatattatcaattatatctatatttttctcttttttctatctttccaggtatcaagcaacatatgataccatttccctttaaaaatgttacacagcttttaaattttaatcttatacatttatgatttatttctttcattcccataataagtttaatttcattcattgtcggtgtaaagtattgtatattatttactaattaaaaatcattctaggtacggtatttaaaataatattaaattataattttagtcttggataattttttactataatatttggtttttttaattttataaatttggtgattttgatccgataaattactcattgatcatttcttacacacatataagaaaagattaacttacactcttataagaaaagattaacttacacttttttgaaacccattatttctctttccacttaattatttctacctaattaattaattaattgtgatagtgtttttgtccaattcttctaagagatataatgcaattatctttttacactccacttgttacttataaaaatgaccagagttaatacaaaataactaaggatattttagtaaaaaaaaataattaatgtaaaagataaaataaaaaatatcttataaaaaaacaaacaaaattaaaaataagactcttacgttaaaggaaggaggtagtataaggaagatttgtatagttgttcttatttgttactatgtctataatggtgcagcccctaaaacaaat

SEQ ID NO: 22126 - DNA, 801 bp, Glycine max
  Intron number 1 from transcript Glyma08g24780.1 (locus Gly ma08g24780) derived from phytozome v7.0 (chr-ID Gm08; pos 18935283 to 18936083 reverse strand)
tgtaagctattttcttccatctttgtttcatcattttttactgttttaacttcaccactttattacgtgctttagattgccattttctatgccataaaaaattaaaaagatatcatttttttgttggtttaatttgcccccattatatatgtcttcactctttttagtttatgattgttaatttaataagaaactcaatttcagatttggttattaccaagaatgttattagcaccggggaaaggcacttcgtgcctctctaaaatttttgagaaataaaagtaataaaataaataatattggatagtttttaagatgtgaatgtgtttttttttttaaagatgatttgagagataaaatgtgtacaccaaaatattatatttcttttattaatagtataaatatatacatagatgttttagttggggtgagactgactcaagataaaacaggtaaaacttaagttttaggcctactgataatatatacttttactagcttttataaagcaaaagaaaatcacttcacaaaaaatctaatatatatcttctttatttaaagtaaaaaaaaaaaaaaattcattttaaccatcactcatcattggactactccgagttggatgattaagtttttttggagctgtttgaggttgtggttacatttttttattgaatcgaaaatactattactaagtaatactgtgttaattccttttaaaaaaataacactgtaaatcaaagaaaaaattgatatgtgatcttaatctgaacattcttttgcaggtaactctcaagggagctg

SEQ ID NO: 22127 - DNA, 886 bp, Glycine max
  Intron number 1 from transcript Glyma08g15680.1 (locus Gly ma08g15680) derived from phytozome v7.0 (chr-ID Gm08; pos 11382445 to 11383330 reverse strand)
tttcatcttctttgttttgggtttccttccattttgtaagttttactctctttccccccttgtttttctttgaagttacagtgcggcattttgaatcttggcgagatttcctcctgtttttgtaattttttcgtgaaaagaattgagctttgggaaaatgagtgtttttttttttaaatctgggtattgttccttttcgttggatctttggtgattgtgaagatgatgttttttctctgttctcaattgcggtgatcgatttccacgggagcattttaactgctggcagggtgaaaaatagatctttgtcgtgtttgcaattctgggttcttaagtatgttaggatatgctcaatgtggttggtaatgttgaagaaaaagaatcgttgcatgttgtagtgttggtgaggaagtttagtttttctttggggcttgaattttgtccattcaatgttctgttgtgctttgtcttctctgtagatgttgaggattggatcttctatcttgcatttcattgacgaaaaatatatccttttgtttgttagtttgtttttacatattgaataactaaaatcaagaaaatattttgctgtgctttacccctttctttctcttggactcataatgagcattagagctataattcccttatgattattttctcttttgaattgatagcatgacggtttgaaagttgaaagtacagaatcctgctaactcccccattgctttaatctcctcgaaagttcttttcaatttctgttatggctatagtatgcttttattttactttgagcttttgtaaaaatgatattttgattattttctgtttgtatttctacttgatattttttttgtctttgattttattgtagaagttgcctgac

SEQ ID NO: 22128 - DNA, 1001 bp, Glycine max
  Intron number 1 from transcript Glyma05g27950.1 (locus Gly ma05g27950) derived from phytozome v7.0 (chr-ID Gm05; pos 33805772 to 33806772)
aggatcccgccacgcagattgatcgccaattgcaggtgcgtcgctacgtttctcaattgttccgaattgatttgtgaatcattcagatgctatgctgtgagagttatttttcacagctaggctttgcatgtttagccttagattgcgattagtaagatcacgtgaagatttatgatacaggatgtttgttaaacggcattagatgctgaaaaatcataagaatttaatgaatgagttcacttcacaccagtctagaaggttggaatatcataatgaagtcttctcaggatcgcacgagttgaactctgctcatgtacctgcatggattccatcgctaagtcagtgcttgagaattgtagctgcaggaggagaatgagagactgtaaagttggaaaatgggcctatttatatgatttatttatattattctcctataggctatggtggtgcttcttacttgatgaggcgtgagaaatacctccaagggtcaaccctgtgaaatccgttgagtctgcttaacgaactttggcatcagatctggtacattacgactatactgggattggtgtagtgccagaagattcttgatgttaggccttatgtgtcagctattgtgcttgattatgttgggctagcacattggctttattcttaattgtaggtctgaatccttcccagagggatctggaacagctagtgttccgtcgtgtttggaatttgtgctgaggaacataaaagctgttttctccacttatttatgatgtgttatgacaattgtttgctttttttgttttgaattgtttcttgagttgatatgtaatggattttatgtatgttatacagtttcttgccatgcttacattgtattttttttttttttgagaaatgcagggtgttgtacagtgtgtggttgtacctgtatctgtgcatcatagctattgttttacaaatctctgttgtcaatgttaagcagggcttgtttctggtgtcaggttgattta

SEQ ID NO: 22129 - DNA, 822 bp, Glycine max
  Intron number 1 from transcript Glyma08g26830.1 (locus Gly ma08g26830) derived from phytozome v7.0 (chr-ID Gm08; pos 21144435 to 21145256 reverse strand)
ggatcataaataccgaaggtaaggccatttttccctaaaatgaaacaaaagttttatgtttaattttcaattagacgttaaatttagatcaaaataatgaatcagcgtcgactatgaaccctaccttttccgctacgtacccgcttaaattttctatttattctatttaaatttatttattttttgttatagaatgaatctagaattattaattaatttgtagggacggaattttctgtttttctattttgggaccaaattgatgcaagtaaattaataccaatttttaccaaaagtataattaggctgaaaacatttttttattgagacgggccaaatgctcaaaaaaattactgaaaaatcagacaatttgggatgcaatctgagaatcttacaaattttctgcacaataccacaaccccagcaccttgatggccttaactacagcttgggaatcaacttaaataatcagattagaatactgtctctcttggtctataagaagaccttgaagaattctccacaattaagcaatgaaagcattagaaatactatatgcctgacataccccccaagatatctcccatgctgagaagtcatccacaaccagccaactgggtatgcatttttgcagcttcatttctaaagatataaattatagaaagtatgaaaacttatcttatctactataggccatgacgcatttatgcataacattctgaattttgtgtatatatgtgtattcagagctgacacttaatctagccctcactggttgtcaatgcagggttcccgattataaaagggaaatttcaactatcc

SEQ ID NO: 22130 - DNA, 899 bp, Glycine max
  Intron number 1 from transcript Glyma07g35290.1 (locus Gly ma07g35290) derived from phytozome v7.0 (chr-ID Gm07; pos 40426201 to 40427099 reverse strand)
caggttattaatttcataattttcttttcagcttccaatttgtgaatgtctcctaggtaatgttgggttgggggtgaaagaaaaggaaagaaagtttgaggaatgaaatggaaacaaagagagatgcaagagagatgaaaagtgagattggggtagagatgaaagagagatgaaagttgtggtagagatgaaagaaagataaaagagagtagaaagtgagattgtggtagagatgaaagagagatgagagaaaatgatgttctagataataaaatataaaaatatttgtgaaattgcgtttgtatcgatgtatttttttgtgttttattttttttaaacaaactaattttgaactgtataacttatttgagagactcactaacttaatctaatatgattggtaacatattcgaattggagctggagttatcgcctagacaaaattgaatgtgctttagatattcgaataagttggataccattaatcaattaaggcggcgactatagttggggtacatatttgaatatggctggtgcatatttaaatatggttggggtacatattcaaatttgagctttctaggtttttcccacacagtagaaacgaacataaccttaatttttttttttgatatcaagagagttggtgtgaattatcattagttttattgatgactacttcccaccaaaatatttaatggatcatctttagtaaaatgtttccttccgaataccatttataattttatatctaagatcttgtttaaaaaaattaagttcaattttgttccgataaacaacttatttttacctatgtcttgatttagtgactcaataattcatttcttgtcactgtttctctagcctttgatttaataacgaaagaaaaggtgaaggca

SEQ ID NO: 22131 - DNA, 517 bp, Glycine max
  Intron number 2 from transcript Glyma07g01780.1 (locus Gly ma07g01780) derived from phytozome v7.0 (chr-ID Gm07; pos 1176883 to 1177399)
ccaagagggaagaggttcttcaccggcttggagaggtaaagggagagatagagagaattttgttttgatgattcttcgttgtaatgattgttgcgatgccgagttgatgtaattaattgtttgatgacgacaactcacgttgagaaacttatatgtatgatgatgtcaaactaggagttgtaggggtaaaatatgcaactttgtttgaattgataagggtgtttatttctcttacgaggagcttagtctaattgagtggttaatacatgcttcttattatttatcatttggtaaagttctttttctgttactttgtcttgctggcaataataatcattatagtttgaattgtggttgtgacgatggggtcttgtctccaatcgctttatgagtatacggtcatttaccatctattgagaagctatttagttacttattatgagggtaatcattttgcttttaatttgttttctttatttcagatagttaaaagttgggtgaagcaactgacccgcct

SEQ ID NO: 22132 - DNA, 296 bp, Glycine max
  Intron number 3 from transcript Glyma07g01780.1 (locus Gly ma07g01780) derived from phytozome v7.0 (chr-ID Gm07; pos 1177438 to 1177733)
ctatcattttgacttttggttcttatcggcttggtgtgagtatcttacctccttgctttgcattcgcacattcacatcttggtttattgctgttgaatcaaacaactcaataatgatctttataccctgtttgggaataagataatcttaccagtttgcaagggattgtattgttttttagctattaaacatggtttttactctttgttaagttctgtatgtaattttcttcacctatttttttattaattgattaattaagcctatattcattggtttttttatgatgcaggttc

SEQ ID NO: 22133 - DNA, 769 bp, Glycine max
  Intron number 1 from transcript Glyma06g13620.1 (locus Gly ma06g13620) derived from phytozome v7.0 (chr-ID Gm06; pos 10745258 to 10746026 reverse strand)
cgttttggttcttcagatctcttctccgatttccggtaattaccttaatccgatctcgttttttttctttttttcttttttacttttcttttccgctccgtttggctggctattttattttgattttgaatttaggcgttttaggttttcgtttgcttttgtttcaatcatgttagggttcttcgattcgatgattttgttgcttgtttgaattgcgatcgatatgaattgttgtttgtgttgactcggattcgatctgtggttgagtgaatctataacttctcactcggatttttgggtgagatgatgagacacaatcggttgccaaagtcaactgttcttgtggccgctaaaactgtattccgtatgcacttgattacagatttaatttttttttgttttcaatattatagaaatcgaaaaaagcatctaaattaggtgtctcgtttcaactaatctaagaatatgtagggcatgttcttcttttttgagaaatttatttaaataaaggtttcccagggttttttctgtgcttcttcgttccggagtcatgattttatataggttattttcctgcttaatgtcataatattgatacagtgtggattctgagttcactggtctttttagtttatttctggatctgagattgggataatttaacagagacttgcttctttgattgactcattgtgattgctccctattttttttggattcactcgactgaaattgtaagagctgattgttttgtgccatctggtagagc

SEQ ID NO: 22134 - DNA, 780 bp, Glycine max
  Intron number 1 from transcript Glyma06g21210.1 (locus Gly ma06g21210) derived from phytozome v7.0 (chr-ID Gm06; pos 17722017 to 17722796 reverse strand)
ccctccgcgcagacgccttcgaaaaactcgagaaggtgaagaagaagaaggggtcaccaaatatgtttttagtcctgtattttttgcgaaactagattttagtccacccaacataaacttttgatcaatttgctcccttaattttacgggaaaaaacattgattttcatctctcccaacagtctataacaagggaagaaaatttttatttttctaaagttcaggaatcataactaaagtagggggattacgaaaaaaagaaatcatgacttttgttttttcttttcttatgataaatattagattgttaattttattaaaaatgatattaatggattcaaaacaacgatctctcttttcttttcttttttttcttctcctccttttgttaattttattagaaataatattagaaccactcttccttttttctctttatcattttttcaattaccgggctaatcctatatttcttttaaatctcttcttacagtgaaaaccgtctgtctgtgatgataaacggatatcactgtttttttagagttcaggaatcatagttaaagtacgggactaatactaattttcatgcagaaaaaatggagactaaaaatacattttttcttaaaaaataaataaattaatcttattatttttataataattattttgattatgattatgattatgattacgatgtgatggtgatgatgattaagtgattgagtggtggtggttgatgttgacagatagggcaggggacgtacagcagtgtgtttagggc

SEQ ID NO: 22135 - DNA, 1008 bp, Glycine max
  Intron number 2 from transcript Glyma08g03930.1 (locus Gly ma08g03930) derived from phytozome v7.0 (chr-ID Gm08; pos 2792025 to 2793032)
tctgccaccagctagaggttccattcttttcttttcttttttttctaaataaattattttaaatagttttacattctcatccgataagtgtgttaattttaacaataaatagttatcgatacgactagttatgttggttttattagtcgtttaggaatgtttgctagttgttaattacctatcggctctagaataggctctatcaattagaaatacttctaatgaagcttacccaaacaacccttaagcttattttcttatttgcatcttttccatatcaatcaatacaatgagatacttctatggaagtcctatctttcacttgcatctcttctcaaaattccgaatgttatatacctaacatttttttattggttgatagtgtaaatttttgtacactaatactgtgtagaaattaaattaaaaaaatggtatgagaagttttggaataataattctacagaatgctccaatgtggttgttgcttcattataatgttttgctttttcttctctgtctttttaaataatcaagtggtaagagcaatatggtttagcatgtgatgttggagaaactcccattcctgtatgatgtttggaacacttcttttgctcattgacagcttcttttctttggtttctcttaatgatctgaaaaagtctctttcttttttctttatgatgggttacttcaacctacttttgtgtattggctgctgtgtcccttgacattcttcattcaaaagaagccaatcatgtttcgttgttggctaatgtttctcacatatttccatctcctcacggatatctcaaaaccctcaatcaccactattagggttgatgatgaagggtagggaaggaaaggaaagatgatttgggaattgtgagatttgtagggaaatggaaatgtgcaaataacattgctctgcgttattatttgtgttcatcttgactcatttaatctgatttgtcaggaaaggacaggggggaaaatcattcacagaaaggg

SEQ ID NO: 22136 - DNA, 594 bp, Glycine max
  Intron number 4 from transcript Glyma06g23500.1 (locus Gly ma06g23500) derived from phytozome v7.0 (chr-ID Gm06; pos 20757943 to 20758536)
agcagctagtctccgagaattcagctctcaaggtaatgttagaatcttatattgctactttttggaaattggaagtttttaaacagagggaaagaaatgaagagggatgggatggtggggtcattatttcctcttgctcaaatgtctaactaaagaaaggagaactaaggaactctctaaaatagtatttaatgagaattaaggcataacattcaaaacatcaaggattccatttaacaatactggaacatagacgttaataataacaagagtcaagtaatataaaagagaaaaaaaaaagtacaacaaaaaagggaaacatatggttgcctatctaaacatgacagtgaaagaaggaatataaaatagaacatagacctctctttgatgtgaacagagtagagaccacaaaatggtgtgccaaagttctagagtgtgggcatgtggggttgtccagaaactccactggtatgccatgagttggcaggaaatgcaactgatagctttggatcatgttgtttgtgttgaagagaaaagagactggtgttatttagcctttaaaaggaatgagtttcacatagggcttggattcta

SEQ ID NO: 22137 - DNA, 357 bp, Glycine max
  Intron number 1 from transcript Glyma07g30670.1 (locus Gly ma07g30670) derived from phytozome v7.0 (chr-ID Gm07; pos 35609864 to 35610220)
ccctctgatctccctctaccttctgctcctggcgtgtaagcaccacccctttattgttttatcacttgttttcaatccatggttttaactttttaatcttttcgtgttagtttgatttgtcttcgattattcgcaaatgggtacccctgttgatgctgaggttgtgaaaagaaaaaaaaaaaaaggtgtttaagagaggaattagatctgtggatgagtgggttctaattgtgcttatttttgttttgtttttggcgtgatgaggtttcttcatgatggatttgtttgtgcaatgttttacccgttttttggaattttgcaggactgtgaggacttcagatcgttctggttttgatc

SEQ ID NO: 22138 - DNA, 914 bp, Glycine max
  Intron number 1 from transcript Glyma05g37990.1 (locus Gly ma05g37990) derived from phytozome v7.0 (chr-ID Gm05; pos 41464145 to 41465058)
tgggaagaaagtgagaagacaaaagcagagaacaggtaagataccatctcttagttcgttataatactttttttttgtacttgcaatactattttgttttaaatcattggttagagttttgattatctccttaattaaaatgagataattaaatatattcaagtttccgtaaatcttctttgactttaaacgctttttctactttagactgattttttttcattaaaaaattttaaccacccaaaaaacagagagtgaaattgagctatttaggcatgtttttggctatattaggactttagtttaggagtgtgtttcccaataaaaagttagttcaccattttatcgtgtgattgacgttagtatttgatttctttggtatttacaatattttgttgttgacgattactattatttgctagtatcatttattcattccgtaactcttcttttgacacattaattaatgaagttcaagtaattaaatatttttttatcttactataattatcatatgaaaataataaatttatttcataataattatagtttttcaataaaacattaattatattttatataatattaatgatagacaacaaaatatataaataaattaatcatgatataatattaattttataaaattattattcttttttatttatttattattgttattttatctgtgaaaaataacaattataataagactgagagggagtagtataattcttggaagaaagaaaccggattttatcttaaatttactatgttgtgaaattctgagacatttgcttgactttaagggtccgtttgaatagacgttcacaataacctcttgaattccattctctattgattgctaagcttgataaatgtgaaactgtcaaacagggcatataaaaggcaca

SEQ ID NO: 22139 - DNA, 623 bp, Glycine max
  Intron number 1 from transcript Glyma08g17320.1 (locus Gly ma08g17320) derived from phytozome v7.0 (chr-ID Gm08; pos 12827764 to 12828386)
gctgactgctacataatttgcttcttatttcttatgttgagctaatgcctgaatttattttaattttaaaataaataaatttacttcttaaaataaacagaaaacacaaactgacctgatggaaaaattgtggtatggtttgaaattattatgtgtatatgattctgatcaatttgtctgtgacataaatttgagttttttttttaaatttaattatgaaaaattaatgggaaaattactatgtgaatcaagactattatgtgttcataatttgattaattttcatgtgacatatttaattatgtttttttaaataaaactcagatatgtgttatgtgaaaatcaattgttattttgaacattaatatataataatttctcgttttgaagatacttattcaataaattataaaactaatttaaaatgctactaattaatgaaaaatataacgatggatgcaaaacataaaatattgtatattttaataaatatatattttttactttgaaattgttaactattttgacaacacttattgctgttattattaattctgttatgttttggtacaactcttttacgtgtagacgtacggtgccaaggctggacagacgaggagagt

SEQ ID NO: 22140 - DNA, 998 bp, Glycine max
  Intron number 2 from transcript Glyma08g25470.1 (locus Gly ma08g25470) derived from phytozome v7.0 (chr-ID Gm08; pos 19767668 to 19768665)
acatatatctgtactattgggttactgaggtaatattcatcttgcttatgtcagctcttttttatgactatcactttgttactgatttaaatttaaaatagagatgtacagtaccagggatatacatttctttttttctagttgagtaaatttcttcttttatgaacatgcttgtctctttctatttccctcccatttcactataggcttcaatagctccaccaattatagaattagtaaataattttctacagctaacattttatatttgtaagctttgaaggactatgcatccctccaaagttgattgtgttgaatataatttaataacttgacatattattttagcactgttgctcttttaataacttgacatgctatttttccaatcttgcagtaattatcatagtcaacacttccaatacacaccttgacactcaatacaatgtccacaacttttttttaaaaaagaatcctatattggaggttcttgaatcgtttgcaagttttattttgatgttttactattaatcccatatgcttggataagatactttatcacattatcatacagagatgtcacaacctagttcaacttctgtcattgtttaactgattttgtcacttccttggtgtaatcatgataccactggcttttgtgagtatagtataaaggaacagttactcaacttcctactgggtagtttgtagacagttaagtttgttatgtcagctgtgcttataaatacacttgtactccattattgagtgggctaataaaatcagttaccatcttcattttctctgaattcaacaggctttcttgtctatacaaatttatattacattttatctttattaatcatgaaacctctggatttctcatgtatacaaattatattacaattttatctttattctctaaactaaactaatgtttttatctattttaaaattgttttcaactgcaggcacataatccacttctagcaaattac

SEQ ID NO: 22141 - DNA, 885 bp, Glycine max
  Intron number 1 from transcript Glyma07g32920.1 (locus Gly ma07g32920) derived from phytozome v7.0 (chr-ID Gm07; pos 37803022 to 37803906)
aaaagcgattcaggtttgttgatctagttttttaccctcctttatttgaatctctctctccaataaatggtggagccagaggaaaatttcgttagtgccttgggggtggggggattcttttcaactggagccaaagcctccttctcctcaactatgtgcttcccctgtctcatggaattctttccagtaatatttttggccttaaacaagactattcatgtggagttgtgggcctctgtacggtgaattactctacaattcaggttgcagatggaaggttttttctttgcatatatttctatctttgtttgacatactactagattttactgtattaggatttttcttatatctagcaaactgctacaggcagagatgctttccagttttgcttttaactatttttccgacttgcctgtgccattgccttttcggtttagagctctttactgtaatcaaccttagttctcttactttctttcataaagaaatttagtttgttgatagtcttatttgtactttgtatttgtaagtttaggattaatttataggaggaataatattttttgatgtcttggaataagtgtgaagcacccatatatttatgcatgtgactgcatacataaatatatatgtaatgttgcagaaagattttgtactttaaatggaatacatgtactatcagaactgactattgaccatagagtgacaagaaaataaagaatgtgcactgtcaaagtctgttagacacttagacatgtgacatactgatatgaaaatatgttttccatactcagcttatcttcttcttaaaagcaatgcttttgctcaacactgttaattgggccctcattagttgatattctggtgtgctgatgcagttcc

SEQ ID NO: 22142 - DNA, 836 bp, Glycine max
  Intron number 2 from transcript Glyma06g46620.2 (locus Gly ma06g46620) derived from phytozome v7.0 (chr-ID Gm06; pos 49202343 to 49203178)
gacaagtaaagtcttctattcttcctttcgaagcgcaatttctattttttttttatatattttactgtagaatttcccatttatctctttactaaatagtataatacggctgaatatagatttaagtgtccaactttgggtgcagctttattctcttataaataagaagacttcgaatgcaacatatggtggaaggtaaacagttgaaatatatggcaaaaacaaatggtgatgaacacttcatttccattttgttgcgagtaatatggcgtgatgggcatcactgcttctaattgaaataattcatttcatagataaaccatggaatcagatgctaagcttcaaagttcaaacgaagtatgaaatcctgaagcttataaagttgtacagggttaagctggcatgttgatatgttcgatcatatgataattaaaatgattttcgtgagtttttgaatatagttaggaatgagttcaatagaaggaataaggtttcgaagatgctctgcaatagaaataaaattcagtaattaaggtcagttacaaactataacagctggtattattgtgtggtattaaaggacttgttaattatgttaagcacttgtttgttaattcattgaccccacatataccttttaactttgtatctcctcagccgttgttgtgtatgtgcaaaactaccataccatgttgctagcgtggattttataaaattaaaacttgaaattaaatatttacaattaacaaagcctgaaatgccaatttgaggtgaatcgtttatgtagtagtattaatactcatctttagtgcattttcttcataatgcaggcgcac

SEQ ID NO: 22143 - DNA, 933 bp, Glycine max
  Intron number 3 from transcript Glyma08g24890.1 (locus Gly ma08g24890) derived from phytozome v7.0 (chr-ID Gm08; pos 19037736 to 19038668)
ttttacagcattgccatcttggacattagctgaaggttggtgattgcaaatttgtaatctaagtacttttggctactttatgttttctctaaaatgtggcatattaataactggaggtagaaattataagaacaggcaatgctttcatgcggatcatggatgttaaaagttgtgcttcgttgaggtaccttatatacagggcagatgtagaagaggaatttttttgagaaaattataggatgaaaatcacaattgtagctttactttcatagaactactgtcaattgttaacttgtaaatcccctaacataaatatagtccttcctcacttagtgtataaaaaacaatgatgctgccaaggtgaagttttatatgtttaaaaatgtgtagctaaatgttgtataatttgttgtctatgaaatgagatttaatacatattagtttgacaattcgtctgaaatattttatggggaaaagattaaattttttatttctctagggtgtccagctcatgtttgttactgggccgtggagggtacatgtgtgctattttttatatgtaagactagtttgcatgtaagtataataataatggatgcaatttttacttgtaccactttgtttcaaggttcctatagggtattgtataacaagagcttataaaaaataaaaacaaagggacagtatgtaagttgtgcatacaagataagttattactcttgatatctaagcaactcttattctgttcaaatcatttgagatctttttctatatattttttcttcaaagagttagaaaaatataatcttattttgatcttgctttcaagcaaactgtatccagtaactaggctaaaggagttctctgttgttgctgattatattcatcagttgtttttaacttgttttcttattgtcatggccaaagctcaaa

SEQ ID NO: 22144 - DNA, 530 bp, Glycine max
  Intron number 2 from transcript Glyma06g09500.1 (locus Gly ma06g09500) derived from phytozome v7.0 (chr-ID Gm06; pos 7025489 to 7026018 reverse strand)
ctacctacaccaaccttaaccgtctcgtttcccaggtatatagtcaaaactttttttgaaacgaattttcagtcggttgattctaaccgttaaataaaacatcgaaatgattagattttaatgcttgattaaaattcaaatcatttggtcttcatgtgaaggttttgagtttctgatttcatgaatgtgtttggattgacttaataatttaaattcgaatgaacctggatttcatgtaatgaatttctccatgcattcccatagttataatttgggtgtcaaggagatctagctcaattgattgactaaggttcatgagttcttaaagctcttgatgctttcttctgtctttcatttctacgaataaaaaaaaaaggttaataattcgggggggcttaatatttattaatttttgataagtctaaatcttactaaaatctgatttgttacgaatgaactgaattcttaattttttaaaaatttaaaaatttgcaggtgatttcatccctcaccgcctcgttgaggtttga

SEQ ID NO: 22145 - DNA, 793 bp, Glycine max
  Intron number 1 from transcript Glyma06g02820.1 (locus Gly ma06g02820) derived from phytozome v7.0 (chr-ID Gm06; pos 1941356 to 1942148 reverse strand)
acgaggagctctcgcaaatcgcaccccctaccaaagtgcgtttccattttctctttttcaattgtatttgcttcgcctgtaatatttaagcatgtgattaggctttcaaatgtaagcgtcagttccttaagcatgtgattaggagtttgagccataagtctatgtatggaagaacatctgtttagagagattggtccgttaaatagatctctttacctcgaaagattagaattttactattgagtggtggataccttggacacactagtgaattaaatttaagtttgtatgattttgaagatggaagagtagtaatgatttaaaaaggtgtagttcggaaaattgttcttagctttgttagttctggttataggtgtgtgtgcatcataagttgcaatggagaattttttggattcatgagttgtgctataaggcaatatgtggtatttttgtggatgatacaatagactggattcttagtatgctttatattaattgtgttgtagaatgcagatagatgaatagtaaatactaaatacattgtcagtgttgtttgatggatttccttttttataacgaagctagtacttatgcctgtatagctacaatgtatatgtgataactcggtgatatggtttagtgttgagtttgagtatggttttattaactgtcttcgatactcattggctttgtaaaacgtggcttgtagctatatcaattttaattaatttgtgtgttttatgtgcccattcttttagccaaggaaagcagaagacaagaagcaataggcaat

SEQ ID NO: 22146 - DNA, 886 bp, Glycine max
  Intron number 1 from transcript Glyma05g08490.1 (locus Gly ma05g08490) derived from phytozome v7.0 (chr-ID Gm05; pos 8368194 to 8369079)
ccttaatccaacctgtgcttttagacaccctgtgagatcttcattttttaatttttttttttatacctgcttatgtggagtggaatgcctccctgaaattctgattctctttgtggttggatactattgtcacgtgtggtcggatggttgtttctgtagtgaaattgttttaagattagggttgctgaaatctatttgactatttctcagagtcaaatatatgctgaataaagtatattttttcatgttataccgttagcattgctacgtggcggaagctagcttgtaacagcagccagctcaaacattgtggttgctctcatgctatcaaaagcagtggggtattatttgatacaaaaatattaattgttcaggtccttttgtaatgcttcttaaaatatcacattgaatgtatgtgtttaatagtttgggttgtatttttcttaaaatagttcacctgtgcgtgggatataccgtgtctagcttaattggtttcttgttttcctctgtaaatagcatgtgatgatgcaagattgttcacatattttgttatatgtcattgtatatgtatattattgtctgaagaacaatataacatttttggtcatttgtacacaccttcatggtgttttctaaatatcaaattgaaaggcatgagatcatattatcatctccatgttttgaattatgggttgtattttctacatgtcttgaattatatctgttgtccatctgagaatggaataaaagactgtcttgcataatttgtctctggttttactgaattatttgctactgttgttaccttgtagttaactttatgatttcctttcttaggaaatttgattttacttgctatgatagatatgatgattaaaaatatcag

SEQ ID NO: 22147 - DNA, 723 bp, Glycine max
  Intron number 3 from transcript Glyma08g18500.2 (locus Gly ma08g18500) derived from phytozome v7.0 (chr-ID Gm08; pos 13896806 to 13897528)
tcccaaagaaggttctttttatttatttattaattaattttttgggttctcccaccatttattttaatggggttctgaggaattttttttaaaattatttttgatcgacaaaattcttgaaccccacgaccttttcctctctcgcttattttttaccaccaagtcaacttataactcggttacgtggaattgttgttttaacaattgggaatatcaggttgaagatgctcaattgataaaaagagaatttttatatgttttctattatctttttgaaagttcttattttttaaaggagaaaaaaaacagatttggattttcttgattgctatatatattttgattgctctgaatatgtggaattaggaaggtcttctgtcaggtcttggattttataatttgcgagaacttaagacaagaagacttgttgctctttgcagttgttcagatgggtagcaatatatagcttaatctctgtgtgaaatctctatttcaatggttcttcaatgttttagtttatattatttgaggcaattagtatattttatagaaatagaaatttgttattttctagtttgctttttggatactattgctgatagtcattgtttagttgaaggtatagcacatttaattttgttatttcctcgctaatcatactgaaattttgaaagaggatcctaaattttctcaatttctggaaatccagagagagaactgaag

SEQ ID NO: 22148 - DNA, 601 bp, Glycine max
  Intron number 2 from transcript Glyma05g35080.4 (locus Gly ma05g35080) derived from phytozome v7.0 (chr-ID Gm05; pos 39206678 to 39207278 reverse strand)
ttaaccaaagcgcttttccaggttcttagggctttcaattctctttcttctttttttttttttattcactaaatgcttcgaattttgcttattcaagttctgaatttcagttaattacattgatgaccatatgcgcgtgtttgatacttgatagttactttcgtgtagttattttcggttgattagatttagaggagctattttccctaatgctttgtcatgagattaaacctaaatcgattaattttcgtattgagttgtcgtctggtttaaagaaacagttctcactcttcacccgtgattagtgtttcaattgttgatgcccttgacaatgtagttacccagtttgaggtgatggagatttatttatttctttaaatttgaacacttttaagattcttttagagggtccctgatgtttcgtgcatgtatgagtgtatctttttcttggacttcccttgaattatatttggaaaaatcggacttccactttggttttattgttcagtaaccatagtatttacctgagggtcttcactcttcagccacattatactttgaaatttttgtccgttttcttttgtttaatcaggcacaaatt

SEQ ID NO: 22149 - DNA, 794 bp, Glycine max
  Intron number 3 from transcript Glyma06g07180.1 (locus Gly ma06g07180) derived from phytozome v7.0 (chr-ID Gm06; pos 5212112 to 5212905)
acagtacaggtagtattcttatctcatctgagggactcaaggttgctgttatttttcatacagtccttctactctcttttatgaccagagtaaaacatttgtctgaaaaatgaatagccatgttttctcagtgtcaaacaaacagaaataatcctcgttatgactttaaaagtagttattatacatagcagtttgtaattggattggatgacagtataataacctttacacgatcagtgcatatattatgtttttcccgttaaatatgtagctagtccacatttggggtgccaatgccatttgttttgacttttttacctgatataattaagcttgcatcctctacttgatatgcttccttaatcatccaatttggcatcaagagcctaactctaaaactaagtagaattccaagctgaattcgattttgagtcttacaggaaaaaatgccaatcattgctatcatggagacaaaccatgctagtaacgtagtgatggctttttcagatatgtctcattgctggtccttttcaaacaaaattatcctgtgacttttctcctatgtaatgaataatcaaatggaaaatttcccatctttctcttttctataactccattttagtagtagttctagcctttgctcatcgattgaatttgtttaggtaatttttcacaaggcgtgagccaattatagaggaagctgtgcggtatcttattatgttttcttggtaatagtgtcatcatcaaattcaaaatgtacatatattttttgcacttttcatgttgcaggtggt

SEQ ID NO: 22150 - DNA, 914 bp, Glycine max
  Intron number 3 from transcript Glyma06g01310.1 (locus Gly ma06g01310) derived from phytozome v7.0 (chr-ID Gm06; pos 834565 to 835478)
tcattactccttccattctctctgaccgtttgagggtatcttctatcatcacttttttttattattattcttatgttaaaggattattcttattgatgggagcgtttgtgttggtgatgttttgattcatttcatttattttgttgttcttaaaattaaattgtgaattataagagctttaatgtgggtgaggtctcagttatagctattccttaattggtagtcgtctataagatctgcattcctagactgattgattgtatggagcatatgtttggtattgttatgttcttaattgggattatctagactgattggttgggttccaacttcaattgttgcatatttgaaactttgtatattctgtgtcatttgagattccgaattgtattacaagccataaacctaggatttattgttagttgcacttatttatgtgtctatgctttgtccttttgctgccttttgggaaataattctggaaaattgttttatgttctaaccatatgacagtcttcttggcacatggctatgctcacatttttttgtaatggtttctttgatatcattctagagtctagatttactaactattgtttttccctgctatagtaattgcccagtagtaagtagtgaaatatgacggtaccttttcataggtaatacttgtgtaatctattaccacattatttagttaggatggacacaagccttgtgtactgtgttaactcatttgaaatttgcaatgtataaatggggaagtggttgaaaattaattctcttttggccattttcagcaccatgacattgttctacactcaaaacacaattgttctgcatgactgttatcttttcaattagtttttatggattatattaagattctcataatttttcatgcactttacagatta

SEQ ID NO: 22151 - DNA, 511 bp, Glycine max
  Intron number 2 from transcript Glyma08g21440.1 (locus Gly ma08g21440) derived from phytozome v7.0 (chr-ID Gm08; pos 16284140 to 16284650)
ccaaaagggaagaggttcttcaccgacttggagaggtaaagggagagatagagagagttttgttttgatgattcttcgttgtaatgattgtttgcgatgctgagttgttgtatttgattgtttgatgacaagaacttgtgtgatgatgccaacctaggagttgtaggggtgaaatatggaactatgtgtttgaattgatcagggtgtttatttctcttacgaggggattagtctaattgagtggttaatatacacgcttcttattatttatcatttgtcaatagttctatttttttgttactttatcttgctggcaatattaattgtagtttgaattgtagttgtggttgtgacgatggggtcttgtctccaatcagtttatgagtgtactttcatttgtcatctattgagaagctattttgttacttcattaggagggtaatcattttgcttttaatttgttttctttaattcagatagtgaaaaattgggtgaagcaacttacccgcct

SEQ ID NO: 22152 - DNA, 925 bp, Glycine max
  Intron number 1 from transcript Glyma08g18090.1 (locus Gly ma08g18090) derived from phytozome v7.0 (chr-ID Gm08; pos 13592775 to 13593699 reverse strand)
ccaccagaagcagaagaattgccagcaatttgcaggtttttgatcatacaacttttagcattagtctttgactctttgcacatgcttgaacttgaacttaaataacaattttctagtttcttaggatagttatgatagtttctattaagtaatgacatctattctatactgcaattttgtttatgcaaatatagcaaatctattacagtccttattcctcatgatctctataatattctatacggtaagtataatttttcttatttttattgtagaagatcttcattagatttggatgtggtgtatgtcatccatttttttttcttttcaaattcacttatagttaactttttaaattgtaacttctctatccatgttgggttgataatatacctgcagagatattgtggttgaatactcaaaaagagtaaagacatttgcttctacaacttttagcattagtccttgcacatgatgtaacttcaataacaattttccagtttcttaggatagttatggtagtttctaattgatgatgttatctacatgactacattctatattgcaattttggttaagaaaatgaagcaaatgtgttactcgttaatccgcatgtcatcgcctatgtaagtatagctgttctgctcatttttattgtagaaagtcttcaatagattttgatgtgataccttttgttccatttttttaaaattcactctgcacatattttacacattcccatgaatcatgatttttaggaatcaactttgatgtgataccttgccaatgtaagttacagttaactttctaaattgtcatctcaaaagaaaaaataaaacaaattctaattgtaacttctctatgttgatgtgttgataatatacctgcagagatattgtggttgaatactcgaagagagtaaagg

SEQ ID NO: 22153 - DNA, 953 bp, Glycine max
  Intron number 4 from transcript Glyma08g37250.2 (locus Gly ma08g37250) derived from phytozome v7.0 (chr-ID Gm08; pos 35621943 to 35622895 reverse strand)
aaataccctgttccaggagctaataaagctgtgtaagtcaattctttctccgcatcatgctccatcaataatactatacaatatgattctaattctattatttcttggcttaattaagtttttcataccagaaaaataggtcgttttcacattactatttaacattcatttttttcaactaagttcttgaaaaataagccttatttcttttaagatagagtaaattacactaaccatctttgaggttttgtgaaattacacaaacaccccaatgcctttttaggctttacaataacctccctttaggggagtccagtgtaatgtttttcaaacaattaaggaggttagtgtaatgtataactcaaaaattaaggagggttagtgtaggagtagaaaaaagcagaggatgtttgtgtaatttcatgaaacctcagggtagactggacagttagtgtaatttactctttaattaacttattatgaaagtcactgcatggaacttatgattccctacaaaattgttctagttaagctactttctgatgtgaattcaaccaagtagcaatctacaaggaagggccaagtaaaaatcaatcatggaatggaatgcctcaatacattataaatctcattttgtgtagtatgatgatgcagctttctaagacattctctgttgattttttcctttttaaaatcaatgaccttcatgtcacttttgaggttttattatttactgttctttttatgccattttttaaacagtttccattgactgtgtgtagtgtacctgtcggttcactgagtagtgatgactagtttgagttcttttgtgcttggttgttttttcaagtcacatataaatactctcaatctatcaaccatgaatgcataaccatatattcccttttccccatgtaaacagaggggcagcattattggtagaagcagcagaa

SEQ ID NO: 22154 - DNA, 401 bp, Glycine max
  Intron number 1 from transcript Glyma08g04460.1 (locus Gly ma08g04460) derived from phytozome v7.0 (chr-ID Gm08; pos 3149978 to 3150378)
aacctaggttttccatattcttcttcgtttccgtaattatgtatgctattaagttgagaattgtcttcggagatttgcttttggaatctggactgttttgttgaactagctcttatagcaatacgcaattattgtggagctcatgcattagttgaaaattcatatctgcgattagtgtcagagtgccaaataatttgcgttattttttttattgaattttgaagggaattatgattctggatattgattgttcgacatagaatgagataaactagggcgggatctgtttatttctttttttctttcttttatgggtttaaattattgcccttttgcagttctgagtgttgttggtttattttttaatttctttttgatttgaatttttttgtgatgcagat

SEQ ID NO: 22155 - DNA, 949 bp, Glycine max
  Intron number 2 from transcript Glyma05g26030.1 (locus Gly ma05g26030) derived from phytozome v7.0 (chr-ID Gm05; pos 32046490 to 32047438)
ttggttttcaggtcatatatctcttctatttgttctagtaaaaattatgcatacttttaacatgcacattatatacatatgtcaggagcgtatagtagcatgagtggagctaactaatcttgacccttttaccttatgtggatagtcaagattggttttactcatatcgaatcttgaccataagattgatttggtattacttatctcacctctcacgttaccacttaacagttaattcatctcctataaattttactatcatttataaaaagttgttgaaagtataagtttattaattaatactcacatctagtgtcaatggatactgacattcattatgctgaaccgttgattatgttgttagaaacttaaaaggtaggagtagtggtaatctacgtaagtagactctagatagtataggatgtttcttgaaagttacatcatatcatcattaaattttgctctttgttttaaaacataatcatagcttactttaactttaattaatagtggagtgtacaaagctttttctgatgatttattttcttttcgaccacaggtttttgatttgttttgattaaccacaatatcatgattatcatttgaactgaactaattaggagttgttattacacatttaaagtagcagtgaattttttgttctttggaggttgtatgtatgtataatttattgcttttctaccttattgtacacggtacttttttttatgaaaattttccccttttaaaccacaggtcttatattgctatggttccttccaattaacaaaaatattatgattatcattgaactgaactagctaattaggaactaatatactacatgaaaagtagctatgaaatttctattctaacttggatgcagtatatacatatgatttttgcctttctatcttctttgtgcacagtctaacatttcgtctaacag

SEQ ID NO: 22156 - DNA, 480 bp, Glycine max
  Intron number 2 from transcript Glyma05g27640.1 (locus Gly ma05g27640) derived from phytozome v7.0 (chr-ID Gm05; pos 33548886 to 33549365 reverse strand)
ctttgttagtttcatctgtctctctctcttcatcttaacaacttatccatcactttcgttcttcttatgtatagtttttttattttattttatgaaaattgaaaaaaaaggaaaaaaaaggtttttttttttttttttgtagagaacgggttttgacttgattaaagggtctaggacttgaaatggggtgtcatgatcacttgataaggatctgcccgttactgattgagattgatcatctttaattgctttctagtggttgataaagtgggaaattttggtgctttttcattgaatttgtgtctcagactggaatttggtggtaaatttgattgtgaaattctttgttagggactatgaaatatactatgtgtatggtttttttttttttctttttttgtgttgtgcatcctctgaatttgaatactgggtgtgtgctctctagggctgctgcaattcccagagccaagggtgggactc

SEQ ID NO: 22157 - DNA, 1021 bp, Glycine max
  Intron number 1 from transcript Glyma05g36630.1 (locus Gly ma05g36630) derived from phytozome v7.0 (chr-ID Gm05; pos 40452333 to 40453353)
atcgctgattccactcgttatctcgtcgtcactaagtgagttctcccttccattgattttcttatactcgctataatcccttattagaacccttgctttgttcttcttattatttccactgcttccgccgctgatccgagtcagtggttttacttcattccactggtttaggtttttttttttttttgatcagaatcacttcgtaaaccttcttttttagtactgtttgattttgtgttttatttgaatcgggagtgttcgggattgttgatgcactgtgttgtttggctgtttgaggaaatgtagaacatcgatatgtagttcttcttgcattttcgatctgttgggacatctgcaaacagtgtttgaatgtgctgaagcgtattttctgagcaatggggtgcttccattttgattatttgggatgtagtttgttgcatttctggggttacttcttaatgttattatacacttgttattaccatgttctctttatgtggtgacatagggtttatgagaggtttaggtcaatttctcatgagtagaaaacactagttttatctatactgtctgtgctatggttatatatcaatatctctttgtttatttttttcctgttgagataatgagaacacacttcaggagtctagttttgtatgctttatggtgtcacaggcccatagccgtacgcatacatgacactttgtctatcatttacgatttatttgtctttcttaatctcaccacttttaaatttgttgcacgctgaatcagctggtcttttgttgttaacactttacttctgcaattattttgcattttttcattgccagctatatccattttttgttagtattgtacattcattatttttttttgaattttttccttttttgcttgtctggtttgtattttgtaatttggttaagttatattttcatactaatgtttgtgataagtcatggttgctagtttgttttggtggataatttttcatgcctttaatgtgtttcaggttcag

SEQ ID NO: 22158 - DNA, 932 bp, Glycine max
  Intron number 3 from transcript Glyma08g17720.1 (locus Gly ma08g17720) derived from phytozome v7.0 (chr-ID Gm08; pos 13232704 to 13233635)
gttttgcttactgtttgcacccctgtatttgcttggtgtgtaactgctaatggcacccctgtattacactatggtaaattgttgttactgctgtatcttggtctttgcttgtcatgatctcccctgtatctgttaagctatcatcacatgtatgtactcattgaaaattgaaatgcttctgttttcaaaatttctgcttgctttttccaattttcgggttagtatttgggggattagtcagttttgttgtccagtacctatgttcttaaggcctcagtggctgagtgttctgcttttgattctctacaaatataaaaaatgcactcacatgtttgctgcctttaagttttcaattttgagttgttattgtttcttctaataaaggggcagattaaaatttcagatttttgtacatgctgttttttctctctcaaccatcagctttatttgttgtcacaaataatcatataaataattttctatttttaattttaaggtatgcataggccgatgttttacgagaacgtgatactagaaaattacattgtatatgattgattatgattatttacgcgagtgttagacttggaattgatcttatgctgcatttgtatcacccagagccactaaatgctgagcaatttaactttttgtagtctaaaattctaataatttgtgccaaaattctctttgctatataatttagatggcatctgttatatatccatttcagtttccatgcttataaaaggtgcatcggttgagttaaaagtaaacatattccaaggttgttacagaactctatttagccagactgctactttttattattctcatatttatctatatagatttagccttaataatagctatatatcttgttcctaccagggtatgaaaacatgttgtccagaaaggagacactgtcattg

SEQ ID NO: 22159 - DNA, 540 bp, Glycine max
  Intron number 3 from transcript Glyma06g19030.1 (locus Gly ma06g19030) derived from phytozome v7.0 (chr-ID Gm06; pos 15266561 to 15267100)
cttgtttaaggtgcagaaatgtgaattctggtgatggaaattagtatggtcttttgtctgggtcactttaaggagtttagaactaactaatgaaatgatagaagtgtcttttagtaagaggttgccctatcataaagagttaccataatcaaatttcaattgctctctatgggggcttacatgaaatatttttgtcatcatcaaaccattttctccttgcagaattggagcaaagaaaaatgatttctggagagagaaaaaccaatttgtgctcgtaaacgttacttacatcaaatgattgatgcattacttatgtgtcttctctctgtttctagtaccaatattaaaatttgtaattattgtataaattcatatttattgattccaatatttcaattatttttttaagttgcatacctgtgatcattgcacatgcagaaacgtacacaaactaaatgcacatgacctgtagtcctgcttctcataacaggtttattgtttccagtgtagggcctcctttcttttgtgtagccaagctca

SEQ ID NO: 22160 - DNA, 687 bp, Glycine max
  Intron number 3 from transcript Glyma06g15470.1 (locus Gly ma06g15470) derived from phytozome v7.0 (chr-ID Gm06; pos 12195324 to 12196010)
ccagcaatcaccttcttcttggcactcctactaaggtaaggttgagttcagcttaccaccaacctaatggaagctatatatatagatatatttatgatatgtttggcatgactgtgcggtgaatcaaattcgattttaaaaccatggtacccttgaagtgctactaccccagagttgttttacaaaaatcacgttttttatgtgattttattggattcaccatgattttggtgctatccaaacaaacactttaaaatatagcacaaaaagtatgcatttattgatacgtagttatggttgaaaaacaactcaaatttttaggagattacctaaatttaagaaaatattgtttttttcttataatcttttcttatttttttatggtgttgcttttttaatttaatgaagttctctcactatgtctgaagtgatgcatatgtttttttcccaacaatagggaagacaacatttcttttctctttcaacttttggaatatactagtatttggtatcgtttggttttcaaagtacagaatgtttggcatctaccccagcaaaacggatcgctttgaactgtgtgacacttcataattaaataggcctttcacgcaatatgctatatattaatccacatatgaatttttcatttcaggattgagagtttgaaaataaagacgacccctggga

SEQ ID NO: 22161 - DNA, 973 bp, Glycine max
  Intron number 1 from transcript Glyma08g39520.1 (locus Gly ma08g39520) derived from phytozome v7.0 (chr-ID Gm08; pos 39064778 to 39065750 reverse strand)
agggaaagtttaaagccactgattctcctcttccggtgattcccactttctttcaactttgttcatttttcattttctctttttttttttgtgtctatgagtgtattttattttttattggcaaatattagtcgttagaaagttgttttttgttaacaatgggggaacgaatctgtgacctttctcccctttccttcttccttaaccatccaactaatctctcctttccttcttccttaaccatccaactcaccttagtgtgaaaattgaagtggaattcatggtctagtggggaaataagagacatcaaataaaatcatggggtaaacttacattcctatgttcataaggaaaaagggtaattgattaggagaaaatagtacattgtgtaattctcattcgataattacgaattgtaatgtaagtttgttaaattttactatattattttaaaagtcatatctattataatttcttattaattagctgtgtaaaattagcagcatggttattttattcatacattgcaattaagagctggcatcttaatccaattgtttcgtctagtacatgaaaagtggaaaaattgaagtttattataggcttttctcagtaagtatttatagcctgtaaatgaagaaattaagaagataaaatgaaatgagtttcttccctaagttaaaatcaactttaatagaaattaaatgaaagagcttctataaatattgaagcgcataagttgattttaacttgtaggagaaacttaattcatttactttgttattttattctctcataagtacttattgagccaaacaaggccataaatgaagatgttatttagcaacggaggaaagcttacagtaattgtgtggaaaggaaagaaaagcttcagcttatttcataattttgtttgagttactaagtaatgaaatcaaatttggttgcctttgtccatagactgttccgggct

SEQ ID NO: 22162 - DNA, 841 bp, Glycine max
  Intron number 1 from transcript Glyma06g03240.1 (locus Gly ma06g03240) derived from phytozome v7.0 (chr-ID Gm06; pos 2276278 to 2277118 reverse strand)
actccatctttaggtaaatgtaaactctattattcttttgtggaatgtactataacattattagcacatgacagttgatgcttttagagtatcccgatctttgacagttgattttgctgatggatgaattcttttggcaattatctttgaatttatcgtgctcacttcctcaagcttcacttttgtctttccaacagaggcaacggggaaattttttggttaagctctctggctgaacccaactttttttttttcatgctgtacctttcactatacttattaataatgttgcataatggtgtctagaaattgctatggccaggttggttacagtaatttcagcctctgcctgccaagggggtgaagtgaggatcaatgtaagggtggcttggttatattaataggtctcctgcacttcatttttaaatggggggctgtacactctcagggcttagaagttcctttatcaatcagcggtctttctagattcattttcttttggaaaaagatgaaaaacccaccttttcaatcttactcatttctagtttattttttcataatttattttgtatgcaaggatctctttcaaaccggtattctttatatcatgtattgcctttcatccactgtttgtgtcctatctgtatggttttcaattttggtgatgcatgttgcttcctgacagccatatgattattctctctggttcctaggttgcctgtttttttgtttgggaattaatttttctttcttcttcctctttgtgcttgttgcagatctattcatgtcaagtaattgctctgcagtggtgagttttgaactgctaaatttgatacaaaag

SEQ ID NO: 22163 - DNA, 693 bp, Glycine max
  Intron number 1 from transcript Glyma06g16620.1 (locus Gly ma06g16620) derived from phytozome v7.0 (chr-ID Gm06; pos 13008039 to 13008731 reverse strand)
tgcttgtggtggtgctcacaccctcttcttaacaggttcactttttgttcaactttgtcaaactgagtattcttcggttttcttttaacctcggtttggaatgagggaaagagagtggagaataaaagtttcaagaagtcaacttcttctttccactccctcttcaacaaaacagaagaaaagacatcgttatccgtgttttctttctttctatttatttatgataaaataagctatgcaatcattcaaccataacccataaatgataaaactgtggtaatgcatgaccgttaaactttttatttattcgttaaatttaattgaggattaaagaaaaaacggaattttgagtcgttttctgcttaatcggttaaataatattgtgtaatagtatgaagtgcaattgtttgtcgattatataagtacagatattgttggagtcttttttgtggttcgtgtgggaattttgtagggaagggatgaagtggtttttatcttgaattcattggaattggaatgtctttaacttcctagttgctggtttagcttagtaacagctttcactgtgctattggattggatggtacaatggctctgtttaaaattggtgatgggttttcgtgactattgaaagtccacaactccttataatgcctgtgttggagctcataaattgttctcctttcacagaca

SEQ ID NO: 22164 - DNA, 463 bp, Glycine max
  Intron number 1 from transcript Glyma07g06650.1 (locus Gly ma07g06650) derived from phytozome v7.0 (chr-ID Gm07; pos 5346045 to 5346507 reverse strand)
agtattcttcatctgtgttataagaaactctcattgtaggaagagggaagagaaataaagccaagtgtttcaaggagattctgatctcttatatataccttctcaaccaaagtctgccatagtacttggttagggaaggattctgattgtgagtttcatttcattaatatttgtctctctctataatcaaatcagaaggaaaaaaatcatagtttgtgcctgtagtgagaaaacttgtccttccactgatgattagtggaaatattactgcatgatagaagcttcaatgggtttggttcatccatggatttccatgaaagccattgaagaattcagcactagagacagaagaagacttctggggtgacattcatggggctccatagatggtggcaagttacattgttaacattgtctttgtttttgtcatgtttggtaggtggctcacagtcttattacgacc

SEQ ID NO: 22165 - DNA, 709 bp, Glycine max
  Intron number 1 from transcript Glyma07g02090.1 (locus Gly ma07g02090) derived from phytozome v7.0 (chr-ID Gm07; pos 1454521 to 1455229 reverse strand)
cggtaacccttagctcccttgaaaagtttttttctgcttgcttgtgttgagtgtttaagtgggattgctgcaaaattcccttgctgatttacatcgtgttgtgatgctctatgatccgtgcatgtgttcctttgtgggttacttgagtcatggagtccgattggtgttcagattttcaagtagattaaattttgctaggtttgattaagaatgaccaagttgtactgctcaaaaaacaaaaaacaaaaaaatggctagctgtcggttttgcacagtatagggatgaattgccagagagagagagagacagagagagactgggggcatttaatctgagcgttacttgctgaagcttggcaaggtcttcccacgtttccggtggctactctctaccactttgtcttggtataagaagaatttactccctattatatgttcagttttaggtaattgtaatattgtagtattttaatttcaataaaaaaaaaactttatgtatttactactgaaaatgtattttcgagcataggatagatgccacgtaaatattacaagttattattagtatatttatattatttcgggtgttacgcattacatgcttaagtgaaattaaattatatatttcaatagcatgattgatgagactattgctaccttgtttacttggtggatgtagctctgcattgtggaaatttacaaaaggagg

SEQ ID NO: 22166 - DNA, 564 bp, Glycine max
  Intron number 5 from transcript Glyma05g30140.2 (locus Gly ma05g30140) derived from phytozome v7.0 (chr-ID Gm05; pos 35573982 to 35574545 reverse strand)
gacttgacaagagtgactactaaagagttgatagcgtatgtgtgcacttgttttcttgccgcgtccattatttattcatatttaacatctcagactcagcttttgtgttgccttcatagtctgcataaacatgtagaaattgatttaggagtaattagcttgcccttttccctatccttatcaatatgtcatgaaattttgatttatttatatttttgttttatatataatggatttgcccgaactgctacatgagtcagtcatgtaaagttggtagtaaaatgtaagtatatggtttatggtctgttctgtagttcttatattatatagggagtcaatgtgtttatttgttcaaattcttagcatgcgattatttactcttatttggcattttttgtgtgtaaatatgtaacgtagttacacatcaaatttatttcgcatgccataatgatcatacatttccctatatttcttcatccctgtaatgactaatgagaagaaacaggagtattttaaagattcttttgatttttttgttgacctgtgacagaaaatacggccttg

SEQ ID NO: 22167 - DNA, 543 bp, Glycine max
  Intron number 1 from transcript Glyma06g17480.1 (locus Gly ma06g17480) derived from phytozome v7.0 (chr-ID Gm06; pos 13834288 to 13834830 reverse strand)
atccttgggatttgccaggtaccaaagctagctagctctagtataattaagcaattaactctctaaacacaaacacaagaaatttacttttttctgagcctattttttcctagaagaattaattaattgcatgttataacaacaatatgaagaagattctaaaggtgtaacacaaaatcattcatatttcttttacttaatgtgtaagtttttagattatatagctggctcatgatatggtattaaagtatatttaaccctttattgacctatgatcacgtggtctagagaccctagactttgattattaatttatatattcacaagagactagtgcaacttcaatcttaagccagctagaaaatacaaatagagccaaaccaaacgaaatagaaaagtaatcaatcaatcaatcattattcattaacgtgccctaatcaacgaaaatgtacttacaacactgagctcttgtaattgcatgcatgcatgtaaccgtaacttgactgttctagtttggcgtatgtatttatttaggaaattgtg

SEQ ID NO: 22168 - DNA, 591 bp, Glycine max
  Intron number 2 from transcript Glyma08g38200.1 (locus Gly ma08g38200) derived from phytozome v7.0 (chr-ID Gm08; pos 37105554 to 37106144 reverse strand)
aggggtgagaatgagagagttttaaggtcaaaggatgcgtggaatggtctagtggggagctaaaactaaaagaggaaaattggggatgaggctgctttggttttggttggtgatggtgataagaaaattgggttaagagtgaatggtgatgcttatggaatgacggtgagtacaaatcgcaatattaatagtcatggagtttctgcagttgctcctttgccagagcagaagaaggaaaaagaagggatagttgaagacgtcaaggtgaatcattttccagagggggaggaacctgctagtagagggtggcagggagcatctggattgaagtagggatcacagaaaatccaaatcttggttagtttcagattaattttatgtttctcacatctaagttagagtgctaattttgaataattctaaaatagtcccattggtttaacgtgaatttggttactaaaattcaatgtcttaatagttatgccttagcctgatggcaatatagtatattctaatcaatttcattaatcatatgatctttgaatggcatagtattattttttttgcattctaactttctggtatgtagta

SEQ ID NO: 22169 - DNA, 926 bp, Glycine max
  Intron number 1 from transcript Glyma07g09500.1 (locus Gly ma07g09500) derived from phytozome v7.0 (chr-ID Gm07; pos 7926329 to 7927254 reverse strand)
ctcgcccttccctagtggttcgagatacggtgagttcacttctgaaaaaataattgctttaattttttttggtaaactaaacatgcacttaaacaactcattatatgaaacatgctaaagatcttccaccattcttaactagatattaatagtaattaatataattgaaatgtttatacacataaaaagtatagtgagttttctgtactgaaatagagaaattttatgctgcactccaaaatttaagagttttggtactgttattgagaaattctctttctctcttcctttctctttcttgatgcactcaaactcatttaactattggtttagtaccaacacccttacattttattaagggtatcaaagcccaactctaaagaaaaaaaatcttagtttgagatgaaatatagaaaaatatatagaaataataatgtaaatatgttcctgtctaaatcgtcatagtgctctgatagtcaattctgatagaccaattgatctaaggcccatgtttttttgacaaagctggaaactggagagtgaacacagcctgctaacatactatactatattttgcaataactagcactctcaaaagagtttgtgtcattgttctctctcacttcattcattgtaactcgtttgcatgcgcaacaaggtcagcatcccaaaaccttagaataatatgtcctttgagttcgagatcaatcttttttgtctgcacacaaccactgtgtgtcagtattcacagacacaacactggaagcatgaaaagattattgtcattagtctccaccctggtgtctacaatttcctaaaaagtttcttaagctatcacctttccaccccactttttaatttttaatgtgatattgagatcttttctttttctcttcattttgcaggtgcatatcttgccacaacag

SEQ ID NO: 22170 - DNA, 1004 bp, Glycine max
  Intron number 2 from transcript Glyma08g09760.1 (locus Gly ma08g09760) derived from phytozome v7.0 (chr-ID Gm08; pos 6985470 to 6986473 reverse strand)
ggccattcctgtgactgtggccgtgtcttttccaggttaattactttctttgtattttgttttcttttccctcttaataatccccgcttctcagttctcacacatacacctgcgtgtggtgtttcttgtccattattccaagttcacacctttctctctctttcttggtttttgtgttttttttttgctcctcagattcagccccctgctcagcaattgtttttgctctcaataacagaaaccaatttactactataacaatgattattattattattttactacttaaattatatatataattatactacatgattatggtcaaaccctaaaattctaggtacaaggatgatggtgcagagaaacaaaattttcgaatctcagatacctttcatgtgaaagatttcccatcttctagaggttattaatatattaatattctagtttgcaacttcaaaaacatgtaagttgaaaattttcaaagtcttaattaagcatcatgttatgaatatattgcatacatacactcaatccatctcattctggctttgcactaagagttctatgacagcttttgagttctatatccacacttctattgataaaccaaagacccaaataaacccatatctaggagggaaaagtttaatttttttcattcttttttttttttgaacttatgaagactccattaattagatcactctgagttattttattttattgcactattcaatttaaacatgaccacagaatccatatggaccagaaccagatctttgattaattattttttatgtagtttcatgcttgtttttaaaacacttacatattaacaaggttttcatacatatatatccttgtttgaccaagtttttttccctagccaattatatattcagagacaacaagatgaagccacagcacatatatcataatgtaatctattttaattacctaaacgtttgtccttttcagggtggagagtttcatagaacaccaag

SEQ ID NO: 22171 - DNA, 924 bp, Glycine max
  Intron number 3 from transcript Glyma07g04820.2 (locus Gly ma07g04820) derived from phytozome v7.0 (chr-ID Gm07; pos 3553381 to 3554304 reverse strand)
acgacgaaaacgtaagtcacttacctgacaccatatcatagcatacccttctgttcatccctctgtttcaatatgttgaagagaagcagcattagtttgaccccgttttttccacagtaaagtaaccaatttggctgggcatctatctatcttttttaattttgttattcctgggtgttctaagggtaaatcttgcttttttgttcattttattctttcaaagaggatctgaaattttaacacattcagttaatcagaatagtaatatatgtattgagagtgtaaatgatctataaaacaagataagtttgttattttttataataattatttaaaagttacaccaaaaatcattttctgattgtttttttgtcatggtgcatagatattaagttctaattagaataggtgaatgaagataagaatagtcatttgattttgttaaaccatgtttaaaatatgcatccgacatttgaacagtcaggttttcatccaatggcaatgattcatgaatcatgattgtgtgaatgaatgagtgtaggaaatccaggtcaggggtatttttgtcatgcagtcttgtcacgtttctgttttctgcaccgtccatgtttttttttctccctagttcatgtgaaaagaggtatcttcttagggattaataagaatccgatctgtcctacaaatgcttggctctattcattgggattgccacaaaggcacaagcttttttataagtcaagtcaatttgtgtgtacaaatttacatgggcatgttgcttaaagaactcaaaaagaggggaataattcatggaatcctgtttggttggggggatggaattggatcttgtttccaccatagggaggagtgttcttgatccaataactttgatgacctaatcatacaatgaatttccttttgcagggc

SEQ ID NO: 22172 - DNA, 1005 bp, Glycine max
  Intron number 1 from transcript Glyma06g13210.3 (locus Gly ma06g13210) derived from phytozome v7.0 (chr-ID Gm06; pos 10369052 to 10370056 reverse strand)
cgccttcactctccgacattcatatcattcatcaggcaagcaacgccccttctctttcatccccatttcttcttccttctactgtttcttttctccactttatgtttttttcgccttttattcttctattcgtttattttcggaatctgaaccctagcgtttctttcgcgtcgttttcttgttttcatagctgcacgatagatagtgtcatgtcatattcttcttcttcttcttcttttgctctgcctaacttacgtttagaactttcttgcgaaactgcctattcttggttgttattattattatttgatttgattatgttatcattttgattattatttgatttggtattatggaaaagaaaacctggaaatggaaggaaagacaaatttacggattatgatttgtttctttatttagagcgcataatcagaggtagccaggcttaaatacggaaagaataaaataaatttgtcagagatttgattgtctcttctattttgtacagtgattgtttgatacttgtaaatattatattttattattgcttttttttcgaaactgataccaagctgcaaactcttcttattgttgctcagagataatacataattatttcatgtaatttatcatctatcggctatatgttgtgcccaaagtggaattgtaatattttttttcctttttttcggtggcttattttattaatcaatatttgattgacgatatgttccgtacttaactctgacagtgaataacagaccaaaacctaatgataaaatcaaataaaatttatgaaaaggccaaataaaataggaaaggcagtccttataaattgagattcttcttaatttgccattgtgcttccactttactctgtaagtgctgcgatttttttttttttttaatttatgaacttaaagatggtgggataattttcttttcgtgacaactcatgtgcttatagtatacagagactggagcctgagaagaaaaggagaattt

SEQ ID NO: 22173 - DNA, 887 bp, Glycine max
  Intron number 2 from transcript Glyma07g11600.2 (locus Gly ma07g11600) derived from phytozome v7.0 (chr-ID Gm07; pos 9798645 to 9799531 reverse strand)
tcgttcttggcctagaatctgttgaatcctatcaggtcccattcttgcaattctttttgtaaaattcgggcgttaatcgtaacgggtagttttgttattgcttggataggcttaattggttgatgggcatcaaatttcacttttcaacattctacctttcatgttgaaaaaatggaatgatggatggcctctgagaaactatggaagtgatctgttgtgactccaatgtgtctattgttattcttattttgtcaaattttatcattttttataatattagtttggtcaatgaagaagattttgcattaaattattcaaatgagagtgacaatatacattaccgatctcaaacatgtaaaaaagttggagtttaatttccatacactttcattaaagtaaatttttttacattcattgtcaaccaataaaaaatcttcttgttggagatgtttgggccaaaatagtgcatgtaagtaggggcaaccctcacttcatagcctatcctagtggctgtttgggcctattgagtccccgttatcgaattatccgcagatgtttagtcttgtaaatttcacacttgagatgtccagagtgaggatgtgtgctcgaaatcccacatttcaggttgacatctcagatatgactattaaagtagtagttcttataaaaaaatctttatgcggtcagtgtactccaatctaattcaaaaaaaatcatcaggattatgtaatcttaactgtccatgaatggttggatgatcaagattagctttccttgcttcgtgtattatgtttatacttttcagttttcttctgatggttgatttactgaatttttgttgcttgcaagcagaaaggtctcgctccttattttggttgcattgtggg

SEQ ID NO: 22174 - DNA, 904 bp, Glycine max
  Intron number 2 from transcript Glyma08g12910.1 (locus Gly ma08g12910) derived from phytozome v7.0 (chr-ID Gm08; pos 9446205 to 9447108 reverse strand)
atccaagtaagaatttcatcctacttaaaagcatgattatcttcttgtgatcattttcttggttgcgaaattgatatttaaaatgttttacatgtcttaaaatggatgaataagtttttgcatccgaggctgcatagcaagggtaacacgtcatgtcaggcacagagcaagtatccaatacataccatcatgcatccaatatctcaagacctgttgggaattttgagtacagcatggatagctcaagtcaccattcttctttcatataaaatgcagattcttatgcaaattttctataacacgagaggcagttgagggactatataacccaataatttctagttggatcagcccacctcccttgtttctagctttaaaatgttaaccatatatctttacatacctatatctaagattttttgaagtacaatatctccttacccataacttaccaggccaggaactcatactttcacctgtggagcaagcgacaaggcatcaagtgatgtcattttataaaaaatttaatttaattttataaacaggaataaattcccttccataaaaccaaatatagtaatgtttttgtaccaaaaagctatagtaatgtttttctttaagtaactgatgaaggtccagctgctgtctccttaacacctttctcagcaatgtatgaatgtcctcaaaatttcagccgtctgcttagcttactttcctcacattatgactaagaattgtgggcttcatttatttcatcgatttttaaggggattagactgcgtctgtaaacaattcttactttgctctatgtctgttaccgtatgcttctctaccttaaaaatagaaaataacatctaactccatggcaggtagtgggagttgcaaatacgcatcacccaagtca

SEQ ID NO: 22175 - DNA, 903 bp, Glycine max
  Intron number 2 from transcript Glyma06g05710.1 (locus Gly ma06g05710) derived from phytozome v7.0 (chr-ID Gm06; pos 4087345 to 4088247 reverse strand)
ttcaagttggtgctcggaaacaaactcaatttcaggtacttaaaaaaaaaaatgctcacactgaaaaattaattttaccctcttgctttatctgtccttatgctgattatgaaacgtctaacctatgtactgacttttgcacaagctattttttgtcttggcttaataatattttaaaattaaactcataataaaaaggtttaaaaataaagtagtagttgattggtagttttagcttagaagttcccttgacttttatgctgccagtagacattgatcctgtttatttgatttctattttaaaaaattgtttttagtttaaaataaaccggacactcacactaagttcatgtctcaccactacagattactcacacccttgagctaggatcaccagatagaagaagaggatgagaatatcattcaactgtttcttttttttaaaaaaaaaaaaaacatgttttggaaaaaaaatttcaaaacataatagattttggacgacaaattgatttttgagtagcatggatttatttttaagaacagtttttaaagccaaaaagcaaaaaggaaatcaaataggcccttagtctttacagcaagatcaacctaaaagggtgtacaggatgaatggtaggcactgggcacaaccttgtcatagcttacttgattagctaaagcaggtttcctgtacagattaagttatgtgtagcagaactgtaaagattataaacaagttcttttctgttgcaaattgaatatattagggatgtcaggcaatataaattactgacagatatgtctgcatgaaagaaaaatggcaaaatacacacatgaccttatggctaatataacattcgtatatgcatgaactgatgcagctgttgctatttcccttctgcctct

SEQ ID NO: 22176 - DNA, 1001 bp, Glycine max
  Intron number 2 from transcript Glyma08g27190.1 (locus Gly ma08g27190) derived from phytozome v7.0 (chr-ID Gm08; pos 21493216 to 21494216 reverse strand)
tgtcagtaacttgtcaccgagttctgtttcttgttcatttaacttcattatgtttggttgccgatgtaaaatttcacattttattgaagcttcatacatttcatctatctattgcacagataaatttagtacgctactttggatttgataatgcaagtaactataattaaattttggagctgaagttttttcttatgcttttcaaaagcatattatatatgtacacattttttaatttggctggaaaaaaatccgtagggaatttcttctgtagtttctgtaaaaatctatatgacccattccaagatatgaatctgacttttcacattttgatgtctacagatggaagatgcaatatatgaaacttgaaaatttatatgaaaatattttattggatgttcaaataaggttttatatatatttgaaagaaaaatattttttttagaacggtacactgtgatctttcagagtcagagataccaatcaatatatatcttttatgtactttgtaggattagaattatttcattctcctcatttaatacaacatgggtgcttgaagttgcaatagaatcattgtattttttggattttccgtgtatattttaaagatttttgtgtctcaacatccttacttcttcctggtgtatgctggactcaaatccatgaaagttataacattaatttctgacttttctatggagcttcaacatgtaaacatggcaagacatttgaaaaaggattttaaaaaaatgaactgagagttgaagttaacctttgagaaagtattccatattacttccaataaattctaacaaaaatttccttcccttctcaggtggaagcagtaatgaaatcaaagagctcaatggtacaaagcaggaagctaaggtaagataacactatagcagtagtttaactctttagggaattttagcaaaatcaattaaagttgtgtgaatgcaggcaaagaatctgaagactgctagagaaaagcaaca

SEQ ID NO: 22177 - DNA, 1008 bp, Glycine max
  Intron number 1 from transcript Glyma05g31200.1 (locus Gly ma05g31200) derived from phytozome v7.0 (chr-ID Gm05; pos 36370149 to 36371156 reverse strand)
tacgacaaattcgacaccacctaccaggtcacattcattctcaatctcaatctcattttcaatttctttttcatttgccgttgatctctctatttacgacatgcattttatttatgcatgtgctttcgctcacgtgaatcaatctgtgatgacggcatgatatatatatatatatatatatatatatatatatatatatatatataattttaattggtgactttatttgggaaatgagttccacaataagttttgatgtaatttgaatttgttaagacgttttgatcaacgataattaggacttgggaggatcaagaggagatagaaaaatgtgctctgtcatatacttttgctctgaattttgtggctatcggatgaaaaaaattgagggatgagttttttcttgtgttgaaacttatccctcaattttttaggggaagctaaagtggtagctaggaatagaaccgtttgtttgaaaactctttgtgacattatcaattctgggctcagcattcatgttttgagttggcgaaatgctagaatgggaagaattttagtcattgagaagggcttcactccagatccacattgtgttggtttttaagaggcttgttttattagatttctgattgcttgtaatgcttcttgtttagggaaatgattggtatgtatacactccatgggtgtatacacctagtgaaagttaggaaattgaagagagaaaagaaagacgtgacctgaaatgaagagagaaatagagagaaaaatgaagtggaagcactttgtaggtgtgtgtatgaaggtgtatgaatatcattattgtcttgtttgtattagccatcatataaaattacttaaaatggacatggaatcttgttttcttggtatatttttttattccatcaacgattcacaatttttatgcttcctgctgctagactgctgacaaaattttttgttatgtaaatttcaggcaactattggtattgactttttgtcaaaaacaat

SEQ ID NO: 22178 - DNA, 978 bp, Glycine max
  Intron number 1 from transcript Glyma05g21790.1 (locus Gly ma05g21790) derived from phytozome v7.0 (chr-ID Gm05; pos 26667600 to 26668577)
ggcattaagagcttctcgcgtcagaaataactaaggtatttctattcacctaattcacccatgtttcttcctctatatttttaactgaacgtttggatttcgtgttttggtgttttcattccgtagtagagagatttcgtagctctgtttgaaaaaaagggattcgatatttcgtttaggttgatgttttgatattttcgtttattactgtaaacaaaactgcaaatgcgttctgctacgacggcaacgttgcggtgttgtgtccttattagtgtattggaatggtactattgaggcttcgaatttaaaacccttaatttttttaacataaaaatagttattacttcttaaaccatctgaagtttgtcccatacaattaaccagtgtaagacatatatctaggaaaaacattgtccaattgtttcatttgtttgagtacatttgataaactatatgtatttttgtgttttgatatgcaaaacataaatggcttagatagaatggtccaagaaggtatgaagagggaggttgtaggtactcttaggttgagaattatgagaaagtaatgggtattttaaataccggattagtgtttaatttggatcgtgatatgattattggtctgtaatctatttcatttagagggttttggaagcaactactgtttattgtcttatgttattgttaatgtttgtaatatagtttttgaccattaaatggtcaaggaaggtatgaagagcgaggtggtaggtactcttaggctgagaattatgagaaagaaatggggattttaaatacagattaatgtttaatttggatcattatatgattatttggtcttttatatgttccatatagagggttttggaagcaactactgtttattgtctttctcatgttattattaatgtttgtgatattgtttttttaccgttattttaactgttcttgacgtgctgttggctaggctgtgtgaat

SEQ ID NO: 22179 - DNA, 689 bp, Glycine max
  Intron number 1 from transcript Glyma05g38470.1 (locus Gly ma05g38470) derived from phytozome v7.0 (chr-ID Gm05; pos 41821704 to 41822392)
aaccaaaaaggttctgaacgtgctaaagaaaaagggtacgtgctaatctcactccttttatattttcctcaacctgggttttgtgtggaaatcagaaagatcatttccttgacttgattcttcaaggagggaggaaaatgtaactgatttatgcgtgtttggtgcactgcattttggaatttgggctgagctgtttgttggatgtattatttactctctgaacatcttgcctttcacttgtatttgaaagagttcttaatttttcggtcatgactcgtgatatcgaatgattcaaagtgagaaaaagaaccaggctataatttgttcttcctgaacatctaccctgacactgtgcgtaatatgtgatataactagaagccacttaattgtgactatgcaaagactattttgcttaaatttttcaaataaaagccaactttttttaacaagaactgggcatttttttgtcaaccatgtttgcttgattttttttcttttcttttccaactatccattgttttttaagtaactaattatgggtctggaaatattaatctttacattgtggtatgttcttggtgtttttgtgtgtatcatttaagaataagattccatagtttctatgtttgtatctgcaaagttagggaggaaagtgtatgactgatgaccccatttgactcttgtagggc

SEQ ID NO: 22180 - DNA, 353 bp, Glycine max
  Intron number 2 from transcript Glyma05g38470.1 (locus Gly ma05g38470) derived from phytozome v7.0 (chr-ID Gm05; pos 41822453 to 41822805)
actttgatattataacttctgcagatcttaaagaggttacctttatttcctattttatttctattttgattttcaaattgttggtgtgtgtatatggcagtttactggacaaatttttggatcgaaagataagttattagtagttaaaagggaaacatgtgtttttatattggcatttggtgttcttaacatgtggattatccataaaaactaatttatacaatctcatttcagtcattttgaaaatttaaatttctattttgggtttggtgtcttcagaccttaaccttgcatggtgaaccttgactcaatttataggtgaggaaaacattttcattgtgtgagatagttgg

SEQ ID NO: 22181 - DNA, 493 bp, Glycine max
  Intron number 1 from transcript Glyma08g42250.1 (locus Gly ma08g42250) derived from phytozome v7.0 (chr-ID Gm08; pos 42240410 to 42240902 reverse strand)
ttcgacttgaaaatcaagcttgtagaggaaacactgtaggaactgtcacagcattttatgtatgtcttgttccaaactcattattattaatcttttcttcatgtttatatcattataaacataactcaaaggattgacgcataggtgtaaagttttattatgttcatataaataaaaacgatctatttaacgaaagaacttgtaattattttttactatttgtaaaaaaaaaattgaatcagtaacaatcatatatcgcaaatagaattagtctctaatttaatgggttaaaagataatcaagatatgtgacctaggacaaaaaaataactataaatattaaaaataagaataattaatctttaccataaaattatatttgataataagctttttttcattatataaactttatatatatatataatcacacaaatgaatttgaatatgattaatcttaatcgttacaagtcttgtatatttatatatagatc

SEQ ID NO: 22182 - DNA, 508 bp, Glycine max
  Intron number 1 from transcript Glyma07g11680.1 (locus Gly ma07g11680) derived from phytozome v7.0 (chr-ID Gm07; pos 9885221 to 9885728 reverse strand)
ggaagcctatctgcaattttgcgtgagttgagcctcaatttggttttggataatagtatcatgcttctttttttaattacctgcacatggttttgttatgtctttatgcttttgtggttatgacttcagattttctttactggttttggtataagttttttctatagaatgattgctgcaatttgcactcttttggattttttctatactgtttattactttgcaattgacaatagatgggggaagagagtgtttagcatcatttaagaatcataatttgtctggcattgcatctccactcacagttcacttgtttcatcttgcatccatttgactttgttactttgttaagatgtaatttggcgtcagctttttattgtaactttgtaacatgaagtagagtctagcatctctcatccattggcagaacaatggtaaaatgaagtttatatcatgattctttgtcatcacaggaaacaaaggagctggtaggacaccattgaattgg

SEQ ID NO: 22183 - DNA, 598 bp, Glycine max
  Intron number 1 from transcript Glyma08g04640.1 (locus Gly ma08g04640) derived from phytozome v7.0 (chr-ID Gm08; pos 3312951 to 3313548 reverse strand)
caagtaagaaatccttctccctctttttcatccttttcaatcaatcattatcctgattgctgatcatacaaacaataatattctttcaaactttgtgtaatttaatcaatgtatgagaattgtatggacttttgattttcttcttttcttcaaactggtctatttcttccttcaagttgttaaaccaagccttttatagtcaatttaaaattatatcaagtacatattggggttaggtttactagtaggagaacatgacaaaccacaatcggaagagatatccatatgtagtgttcaattatactttgaacagaattgcctccaaaagaagatacctgtggaaaaaaaaaggaccaagtcaatgagttagtaagaaggctagtagacagcaatagttaacattagatggccgtgtaagcataaccatctatttgtgtattggttagggcatttgttgaagttgaagagtcgttgaagcaattagtcctagttctgttgttatcttaagaaacaatattccttgctacacaacaaccccatgttgatctttgctatgttggtacttggtagcaattacataactctttttatttgcagt

SEQ ID NO: 22184 - DNA, 720 bp, Glycine max
  Intron number 2 from transcript Glyma08g10230.1 (locus Gly ma08g10230) derived from phytozome v7.0 (chr-ID Gm08; pos 7402657 to 7403376 reverse strand)
ggtttcttccgaatttgatcctagctcacttaatttgaaagggtgaatttaaagtaaaatgaccccataagttgggatctgtttcctctaacgtgaacacttgctttataggataaagtaagtaattttacttgttgaagaaaatatcacttgtagatatttaacatgtttggaaacatattgagaatagagaaatcacttttgagatgtagaaactataactattagctttttgaaaatcatatctgaaacatggaaaatcacatctgaaacatgaaactaaacaagctaattatgtgtacatacataacatatcatgaaagcggggttttgatgtgaaaaattaagaagatcatgctttcatgtggtggggactgatgaatctttcgtttgacatggaatgataactctttttcataatagactactcttctgtggttgttaattgaaataccattgatggacaccaaaagactacttttttctgcttttagttatcacgttgaccaagattgtgttttgacaggattctaactagcatgttttgtagtgttctgaaatgagtcagtgaacttcagatatattcatacttgcatttattgatattgcatagcaactttgcattggaatggatttgatatgattttatgttatttaatttctatacttcaaactcactttcagcagatcctgcggaaattgtaagaaaatcttatgaag

SEQ ID NO: 22185 - DNA, 407 bp, Glycine max
  Intron number 2 from transcript Glyma08g05180.1 (locus Gly ma08g05180) derived from phytozome v7.0 (chr-ID Gm08; pos 3675372 to 3675778)
ccactaaaggagtctttatttcctggtaacacaattttctttctgcattcccatttgaaaattttcccatatactatactgttttgaaagttgtataattgaagactgcaatatgccaaatattcaaattattttgtttaccaagttttacagctagcaattttatctgcaactgttggaacctctacattaactataaggagtgtttttcctttctttctaggctagaaactagaaattttaacaagaatcacagtcgtctatttttgttttttccacctacaaccagtcactaatggcatcaaattttgagcggtttgagtagacatggtttataattaatctttactttcttagtgctatctgaataaatgatgagctatattggattgtgcagtgacatacct

SEQ ID NO: 22186 - DNA, 1041 bp, Glycine max
  Intron number 1 from transcript Glyma05g35430.1 (locus Gly ma05g35430) derived from phytozome v7.0 (chr-ID Gm05; pos 39461640 to 39462680)
ctcgcccatcccttgtggttagagatacagtgagtacacttaaaacttatgatcttctaaatgacatactcaacatcttcatcatatatattcttccttcactgaacctatttaataacataataattagagtttatttatatatcttgttactttcaaccaatcagagtaaataagacttttaagataattaccattaaagtaaataaactaatcataaccatttataattggataaaaatataaaagcttttacaccagcaatatattgactatttactcattaattattgtgtttatatatatacattggaaagcatattgggtgttgctcttactttcagttgactggtcctcttaaatccagtttaaataagtgttccggtcgaaatcgatgtaagactcttgttcagctggaaaaagtgacgtgaacagagtcagctaatgtattacgtacattatggagtaaatcataatatgaaactatgttctgaaagacgtttgtcgtattaattttttaacgatgatgatcagtgaccacgcctaaagtttttaaatgtgtatgttgttggtgaagtcagatttcaaatatgtattctattattcaaattagtctcataagttattgtgagggccaaatacaaactccaaacgtcattttcattattaaagaattagtatgacagaaattgattctccgcgaaaacaaatttaattcttttttaaaatttaactcaactattaactctaaagaaacaaaactctttgaaaatgttttttcttaagaaaaaatctcaaaaatgttttgtcatggtcctcaatagttagcatgcgcaaacaacgtcagacacccaagcctttgatattgatagtatgttcttttctctcatcgaaccattttctatggtcacgggaatcaccgaaagcatgaaaagatgatggtcactaatttttctagaagtttacaaagcaacttttaagatctttaattttaaacgtgatattttctttttactgtaggtgcatatcttgccacagcag

SEQ ID NO: 22187 - DNA, 959 bp, Glycine max
  Intron number 1 from transcript Glyma07g30050.1 (locus Gly ma07g30050) derived from phytozome v7.0 (chr-ID Gm07; pos 35125422 to 35126380)
gcctcaaggtagtttaattctcttctctcgagtcccaacaatcgaattcattgtttttctatttggttgtaatttttttctctaacacttcttattttaatgttagattgtttttctatttggttgcacatatgtatgatttaagaaatttttttaagttagatgtcctgtttgcattcattgatttttaagaatctgttgtccaattattggaagaaaaaaaaaaatagaaaaaatgttatactttttatgcaagaacgtgaagaatcaatagggaaaaaaaaaggtaatattcttcatattaagctgatccggtaagaaataaatgtattccaaataatgttgcaatagtaattattaggaaatgagataaactattttatgaaagttctatcgaaaacaaatatcataaagaaaaaggactttgctcaaaatgagaatttagattttgatagagtttgatgagatcattgaggtgtagaattaattacgtagtgatatttggccaagttatttatgtaatatttatgaatattaattatgtattacttattcaatattttgacttatttttttatttaaataatacaaaattttctattttactttttatttaaattttatcatttcagttcttataccgataaatatactgtattttattttataaaaaaaattaatgatcatgcactcacttgtgattcaatcacaacttatctttaatatgactttcatatcattattataaaaatcaataaacttattattatatataataaattataattaaataaagattatgtataatctattttcttaaaaaaaaaataatatgttttaacttcttgtcgagagaataagatcatataatttcaataatttttaaagcctatatatgaataaaatttaaatacaagtcatttcactatattactatccacttgaaccaggtgttgcac

SEQ ID NO: 22188 - DNA, 918 bp, Glycine max
  Intron number 1 from transcript Glyma07g18150.1 (locus Gly ma07g18150) derived from phytozome v7.0 (chr-ID Gm07; pos 17894704 to 17895621 reverse strand)
ctgccatcgttgctgagtgctttggctttggaagagtgagtccctctcatcatcactccacttaattagttgttattgttgttgcacatgtttgcattgttttctcagtttcaactaactcaatcattcatcaactcaactaattcaatcattcaaagtaattattaaaatgtgataaataacttcatcttttaaatataagatcagtaggttaaatttttaaatggtatatgaactgataaaaaaaaaattattagaaaaaatcagtttcttaaatgaatttttttgatacttctacagatttgtctttaatttttatttgagaatgtcatgagtttacactcaagaaaaatcgttttcgtgtaattattacaaattaaaattctaaagaattttttgtacatgtatagctactctcgtaatgggagtctcttgcatgaggttgcccttgaactaattcaactcccacacttattcacattcaatgagttgtagttggatggtccaaaccttgatcttcctcgaccgtgacaatcttttatctgtgaaagtgaaagcatgcatcaaaaaaaaaaatcatggtcaactaaattaactaatattgagtttaaaactaacttggccatattttgaatacggcacttaaattaattatgatagagtagggcggttcttttttttatcatttaaagtttgtttcgaactaagatggttacgtgaaagttgaaaattctataaaatttatgaaatgtttttcgttaaaaacaaattttaattgttgcagaatgatttttctattgctcatttgccgcaattacgccacgattattgacgatcctctctcttttttttttaatattattattattattatatcaaacagccttggatttttatattaagcttacttggacttac

SEQ ID NO: 22189 - DNA, 864 bp, Glycine max
  Intron number 2 from transcript Glyma08g39110.1 (locus Gly ma08g39110) derived from phytozome v7.0 (chr-ID Gm08; pos 38407677 to 38408540 reverse strand)
cacgcgctgtgttaacaacgaatccggcttctgaggtatgaatataatcatcatcacgtcgtttcaatccaatcatcattattataattattataatgctatcttcattattataatagttataattgtaattctaattattaacgagaatgattaatttactctgagaattacttcctgtctccatccttcattttccttgatctaacaatttaatctaatggttaaagtagctacttcgaccgttacattaagaaaaaaaaatgaaaggtgttggatgagtcagaacgaagcgtaactcctggagtccatctcattattattatttaattaattatttattattattattattattattattattattattattattattattattattatttaatgctgctgataaaattgcattggatgcctggtaggtaaccttgaatgtagctctaacaatgttataaagaaacagtaattttaatggaaatactgaagcatgctcactcttgacaaatgtctcgagcggaacattgaaaatataacgttaatccgcttgaggcattgaatacttgtacatgagacaatagcttgtgtatcattgtataggggtctagcttagttgatagagtaaggccaggttgcatgagttgttataaaccacccgggacatgtttttgatttctatagataaaaaaaaagaacttaatttgggcgcaaaatcaacatatcgtgtgtttgtccacgtaaattttaatcaatcattcaatgtgcttcccttcttgtctgcttttatcaacttgaatttgagtgttgtgttgactgcatttttgggcatggaccagctttctgggaagttcaaccttg

SEQ ID NO: 22190 - DNA, 710 bp, Glycine max
  Intron number 1 from transcript Glyma08g23170.1 (locus Gly ma08g23170) derived from phytozome v7.0 (chr-ID Gm08; pos 17657893 to 17658602)
ttccacccccatcgccgccgatctcttccgctccggtaatcaccaattttaccctttcctttcataattcacattctttatcttcccgtaataattcgaatcaccattatttaaagcttagattttggtgtttcgtgtttcttttatcataatttatacgcatatcttctgctctgctcttgttaaagtttatgtttttcccattttgtgctctgccctgcttgtttgttcttcaccgcaaacttatcttgctcttttgtttttatatagaattatagatatatatcttttttggaattcggtgggattcggggaatttggtagttggtaaggaccagtgagataggagaggcatataagttcttacttgagagtttagatcttaagaagaaaaacatatctcccctgtgattatcgagtcaatttagcacttcatcaagcaaagactgtaagtatggactacacaggctcaatgaaatctctttaattttaagattgaggcaccaggatcaaacattcaatgcttgctcgttgatgccttccgtgtgtgtctgtgtgttattttatcatgtttatgcctttggtcaaacataattggactagtatttagtaatcacttttgtagagggcaattaaatgtttcaatactctaatcttaaaagcataacttttcagcttcaagtaaggcaagctcgaaggaatcagagcga

SEQ ID NO: 22191 - DNA, 446 bp, Glycine max; identical to SEQ ID NO: 18786
  Intron number 2 from transcript Glyma08g24050.2 (locus Gly ma08g24050) derived from phytozome v7.0 (chr-ID Gm08; pos 18286395 to 18286840)

SEQ ID NO: 22192 - DNA, 749 bp, Glycine max
  Intron number 3 from transcript Glyma08g22400.1 (locus Gly ma08g22400) derived from phytozome v7.0 (chr-ID Gm08; pos 17041951 to 17042699)
atacactcttcaatcccacggatatcatagagaaggtgagtttgaagctttaactaataatcatctcaatttattaaggcttaaatatgtttttagttattataaaatgagcaaatttttttatttattctatgtaaaattactatttggttttgaccccttcaaaatctgaaatggctgttattggttcttaacgttcatgttaaagtagattaatatcattcattttagaaatttagaaaaataatttaatgtatcacatgctgatatggtaccattgacattagtgagtgctatctttgatggttacttgatattttgctgagctcaagttgattacgggtgtcggttgtcacattcacataatggttacttgatatttttttgaacacaagttggtaaggagtgtcacataatagtacgaatcgaagacaatgatttcaaaatttttgaaggatgaaaaccaaataaaaaaaattacaaggtccaaaaccaaaattcactattcacaaaaaaaaaaacaaaattcactcattttacgtgaacaaaaatatattcaatccatttattatctattggttaaattttatcatttttattctttcaaatgaatagattttcctcctatctttttgccaattattcatttacggttggattccttggtcattcattgttattgttgttgttttgattatgttaactcttgatcaatttctctttgttcttgttctaaatgccacacaaga

SEQ ID NO: 22193 - DNA, 1006 bp, Glycine max
  Intron number 2 from transcript Glyma06g02680.1 (locus Gly ma06g02680) derived from phytozome v7.0 (chr-ID Gm06; pos 1810651 to 1811656)
tggtcagttatctaatgcctaataacctcttatataagaaactgcagttggtgaaaaatgtggtttttctgcaaacttttggggtaggattgtgttaaaacagtttaggaacttctgaaatttataaaaggtttaattaatagcttccaaacttatcttctttagtccctatagttaataagtgaattttttacctatagttaataagtgaatttttcaatcccagaagtttacattttaattcttgttctactatttaaattcttttaactccattataaaatacaatcgacgacaagaggataaaaaatacgatcaatgacacgtaagaggagtccttaaaagagttaaagaattttaacggcagagacttttgagaattaaaatatcagggactaaaaaattcacatattaattatatggagtaaaagtgataagtttgaaaattatagggaataagtgggtaattaaacctttataaaattctattatctgtatggttattattagttgtatttttcttctctgtattgttgattcctcgtgtattccctctcccttaaaatggatacggttttcatagaaatgggaagggaagggcattgtttgattgtgtgttctgtcattcctgcacgcttgtttggcttgatttcctgttcaaaaacatacattttaatgtctgactacgcggaaagtgattttggagtagtgcttaattctaatttttgtttttgaaatctcaaaatgggatcaaggcagcagaaatttcaccttaccatttgttactatttctatagttttccctttacctgtgaatttatgaaatgaaaggttttttttttaaccaaaatgaaagtattttctgtcataagaactaggatattttattttccatgtgactgattgaatgatgattcaattgctatgcctctgagtatggagtgttctaattttcttttacgaaaatgcaggttataccttgtgccgtgctgtccttgcttattca

SEQ ID NO: 22194 - DNA, 1038 bp, Glycine max
  Intron number 1 from transcript Glyma05g37680.1 (locus Gly ma05g37680) derived from phytozome v7.0 (chr-ID Gm05; pos 41232743 to 41233780)
ctgcccagaaccgcgtttctcaaccttctacccaggtataacaaaaaaactattttttttcttctgggtttggatcattttgatgctttagacctttttagccttttggttctctggagttcttttccttgtttttttttttttttttttttatgtgttccattccatcattctgtgttgaacgtgggcactgtttggtcgagtttattttataatttgattaatctcttttccgaaaagaagacatcttttcgttttcttttcttttcttttttttccccccttgaataagagcaaataaagtagcaaacttttcgttttcaaaagatagtaagctcgtgaaaaagagaaaataaaaattaattgaacaatgttaggattttcctgtgcttagtctttgccttcggtaatagcatagcgtttaaagtccgaactcatcagttttctctctctttctgcttttagttgatatcagtcgttttcttgatgagttagtagtaatagtatgggaatatatttttgtttaattatgtaagtcttctctttggagtctgagttttttacttactgaattaatttaatgaaaagcaataagcattgtatgcatagtttgctgaaaataacaaaataggctttgccttgtttttttggctattgaatctcactcttggataatcagattaatgaataccaaaaattaactaggcaggagtaataaccaagtggaagattggatctgacgcctcatacttgtctgaatcttttacttactgaatcaatttccaatgaagtgatagcttttgtcctgattcatgccatgtatgacctttatgtgattcactggaagaagggatgttcaaggtgtaaaaactactgtgtatgtttcttcttattcaatctggggtctatcaatattaaaattaagctctgaattaaatttcattttgtatgcaactaactataatgcatcaagggaatacttgtagtgtcttctatgactgaaactcaagtcagcttcttttgcttgcagaagaaaag

SEQ ID NO: 22195 - DNA, 559 bp, Glycine max
  Intron number 4 from transcript Glyma06g21800.1 (locus Gly ma06g21800) derived from phytozome v7.0 (chr-ID Gm06; pos 18386132 to 18386690)
agatagtgattctgaggtatttttcccctttaaatgtataaataaatgtgcttatacatgacatagtctgtaactgataatgaaatttctgccatatccacttgtttgatttatgtatgttattgcactgccagctagattgttgtttttcctaaggtgtatttcagtaatctttaataaacatattcaactctattaatcattgagtttctggctttgtttattgggtaattaggtctctttcagatatttagattcatatgtgccatggtggtaatgagctattatttgcctgacttaaatatgatttatgttttcaaaagaaaactagattttgtgcagtctattttttgttgataatgtgaaagcggaatttgttaagaaaacttccctttgtgtatatgatgttttattacatcagttttgtaaaagcatttattattattattattattattattattattattattattattatccgtttcttgtcttgatatgattgcttgcttatttgcaaacagtccgaagaagaaagattgaaagatcaaagagagaa

SEQ ID NO: 22196 - DNA, 800 bp, Glycine max
  Intron number 1 from transcript Glyma08g02960.1 (locus Gly ma08g02960) derived from phytozome v7.0 (chr-ID Gm08; pos 2043704 to 2044503)
gtctctgcttcctctcgccatcatcgtttccttaggtaataatcagatctcatcactttttctctttcaatttcaaatgtagtagctacatcgatctcactacgattcgtttgaacctttttcgtgctttgtttcgatctctatttccatggatctgataagaacctaaccctatttgcttaacattctcatcaccgctctcgatttagtgccactgagtattatcatcatgcatttctcgctctcactctacacctttgaaatggctcaacaatgattagtcgctgtttttcatctgcgtcattattgtatccgtttttctctaatttcgcgaaaacaacgcatgctgcataaacctttttttcttcgttagagtactcgtgttgtttgtcttgtgcaccagtaaattaattacatgcttattaatttagtttctcgaattataatattcctcatctttggtgagattagattacattatgcatgatttgatacctaaaacatattttttttcattcgtttatgtcaatctttgtcacgcctccaaataattgatttcttccttttaaactaagatttgcctcctctactaaagcgagcaagagtaaatgtaatctagttgattagaaaatcaattattgatatttcatcacattcataattcgatgttgtgcatgtatacttgatgtcaactattgtcatgaataaatgagattacttactttacgcgagtcagtttgtcatgaatttaactagtttgagtttacattgtaattaaccttgagagagttcatcgcagg

SEQ ID NO: 22197 - DNA, 828 bp, Glycine max
  Intron number 1 from transcript Glyma08g03730.1 (locus Gly ma08g03730) derived from phytozome v7.0 (chr-ID Gm08; pos 2664326 to 2665153)
ttgattagttttgtcgataatctcccaactgggttcgtagatttatctcttcttttttccattcgttagcttttcaatattaatattttttatttggaaaaaatgagacataattgtttgggacacttgaggatcaggatgtcccggatttgtggactgaccgtttgccctgctctctcgaacgttgatcttgttgttttatttgacatttttaatgaatttttgtttttgtttttttgtccgtattgtttattttatgttcctgaattctgaaattctggtatgattgatgtacaggataaattagatcagtagttggcttcgttatatacctttttgccccattttcaaactattttttttatgtaattcagtaaatgtttatatacattacctccattatgattatatcgaaaaaaagattagagatttttgtttatcaaaatctggggttttgaatctcgaatgtgatctgtctggtatgatcgttcaaatgatactattttttagcacttcagaagtcacgtgattaaattggaggagattacttgcaaatcattcatggtaataaaactatccacttgtaaatggttctgtccctctggagtataacggtttattcctaaagcatttgattgtttatattgtgttttgaataatccgctgtcaagatgcagagagagcaagtatgtatgattaagtattacactgtgattgtatttatattgatgataacaaaattataaatatttagaaatatgaacttgtaattctaaaatatttcttctgtgttgagtcattcttcaccttgttccattatttacaggg

SEQ ID NO: 22198 - DNA, 584 bp, Glycine max
  Intron number 1 from transcript Glyma06g18530.1 (locus Gly ma06g18530) derived from phytozome v7.0 (chr-ID Gm06; pos 14837118 to 14837701)
cgcgtttgggctgggacatcgctgaggtccccaaggtaaacaatctccatcctaaaatgtcagatctcgtgtttttttgaggttgttttatgtctcttgttgtagatctggtggattttgtgtattttaggtttgtttggttcaggtaaccttgcttcttttttgtctcttatgcagatacaggtttcaggttttttctaatcaatttttgtttaattaattgatctgttaggttattgattttttttttgttaattttttatccgttttttttctaacgatttttctgtaatttttgttcctggtgcagatttttttataattaataattaataatacctgtttatcccgataaagattttgctgttatattatggttatattttatattttatgcctggtgtgatgatttgatgtttggtttagtgtactagaattcttcttatcttagcccttgttatttttctgtgatgatttgtgattggggcaagtgcataggttattttccttttaactttaagtggtgcatgtatgggtgactgtgtgtaggctcaggtaggattgttttgtggacaagaggttga

SEQ ID NO: 22199 - DNA, 439 bp, Glycine max
  Intron number 2 from transcript Glyma07g31590.1 (locus Gly ma07g31590) derived from phytozome v7.0 (chr-ID Gm07; pos 36578265 to 36578703)
gacggtcagaagaagaacgaagagactatttccaggtacctgaaacgattgcgtttcgatcgtatctgaaacttttgttttactgtcgtttgaacttcgaaatattgcgcctggaacgatttgaacgagtgaaaggatttaccgattttgattctgatttttaattgttgctttacttctgtttccgtttagatcttcttttattcggtgaattgtgattcaaaaacatgcttattactgtggacttgtaaattttccagaaacatccatcgtaaaattgaattcaaatgaaattatttttttaaccaatggaactatagaatttgatacaattacaagcactgttgtattttattttcttattattgtttgcataatcattatttttagtgattggtgcttttttgtttgtgatagtgtgggttctgaggttaagtct

SEQ ID NO: 22200 - DNA, 1055 bp, Glycine max
  Intron number 1 from transcript Glyma07g35210.1 (locus Gly ma07g35210) derived from phytozome v7.0 (chr-ID Gm07; pos 40311397 to 40312451 reverse strand)
tcaccttcctctcgttcttcgccattgtcgctctggtacctgtccctcaatctcggcttcttttcccgcttctcgataaacgacaacaacgcctcagttcattgcaccttcgttatttcgtgtcgtttggtaacagatagtgtcgtagaactgcaatggcgttgcgctgaatctcattcgtgtatttaatcctttatcgattgattgattaatcacttgcctcagttttttgattgtgatgttttgtttaacttgtatcaatgtgtttggaatatttataaaatttttgttttgtcgttttttattttgtttgtgtcattgctaaaagtgtaacgagcattcatttcgtggattaatattaatgaaacaagcaaagtggagttgtacgtacttgtatcagttgttacgtgaaatgcgatattctaattcttttctttgatcaattttggataaattgattataggcctcatttgtaatgtgatcagtaatcacaaacattcgcttgcctgagataacctttttgtattagttatgaatttcacatacatgaggtgaatgcttggaatataagcatttaattatctgcttacactttttagattgagaaatggtggaaagttttaaattactgaagttaaaggataatgaataggtttggtttttaagggtttgtcatgtctcgaacctaaggccaataatatgataatgaatagggtattggtcttgattcgatgttgctttggcaataattcttgcttactactttttgtgacgatcagttcatagaataaaggtgttcttcttactattttcatctttgacttgattatcaatgttgattatgttggaaattatactgaagcaggctttccaaaaatttagttttttataatgatccatgtagctgaaccacatactgagataatgtttagttgttgtactagtgcttaccattggcaaatatttaaattgattcttctccaactttgaagcttaaaaacatgtgatatcatctacaggttttgcttccttcagcgtcaccatccttccaaaa

SEQ ID NO: 22201 - DNA, 735 bp, Glycine max
  Intron number 1 from transcript Glyma08g40250.1 (locus Gly ma08g40250) derived from phytozome v7.0 (chr-ID Gm08; pos 39936268 to 39937002)
ctaacattggcctcaatagaccctctctcgttcaggtccctttttttcgttttggtttgtttccacgttgccccttttgttaattcatgccccctttgcggttttcttggaaattgaatgaccccttttgttaaaaatttgttcttgtctacttgttgtgtttatgcttatgatgtcaaaaaaattagaagaaaagaatatccaaaacagggtgcaattaggaagctagaccaggggctgttgataactggtttctgttttcattttttaatcggacaaagttaaggggctgattgtgtaaacgtatacataagcacttgtaggagaagaaaataacaagttaaaatgaatttatcctctcttataagctaaaatcaacttatgcacttaactttttatagaagttttataatctaacctctccaaaagctgaagtgtgtaagttgattttagctaatgggaaaactcaattcatttgacctaagtgtttatccggataggttctagatgtagttctttaagtgcttttgatactatcatccaatcagatttatattaatggtcagttaggttaacaaggtaaaactgtgattctgattggagaataatataatatgaaaagtacaattctaagttctgtcccttttatgtttttggggtgctggggcttatgatttgtgcattattgatgtgtgttcaggcttcttctgtaccgtctgtgctgtcagggaagga

SEQ ID NO: 22202 - DNA, 172 bp, Glycine max
  Intron number 1 from transcript Glyma08g06440.1 (locus Gly ma08g06440) derived from phytozome v7.0 (chr-ID Gm08; pos 4610612 to 4610783)
ctggtatgtcatcaatttatatcttcatctttttgtataaaaaaggaacattattaaacacacacataaagtaagtttttgttttttcttgtacttgaactaaaatgaatggcttttgcttattttgaattgagtaggtttgcaaaggtgcggaaaaagctgtcggcttcgt

SEQ ID NO: 22203 - DNA, 1026 bp, Glycine max
  Intron number 1 from transcript Glyma06g03620.2 (locus Gly ma06g03620) derived from phytozome v7.0 (chr-ID Gm06; pos 2529030 to 2530055)
gacaactccggtttgtcctcacactccttttcttctctttcacttcctcaattcacagaatcacagttactccgtttcgcaactctcttttttttaatgtttaaaattcgaatctaaccccaaaacctcgctggtttcacctgttgtgagttctcgttccttacgcttccatttgtgcgtaatcgcatggattcgtcgtttttgtacgctgagcttactagtgccgcggcttgtttttgctttcgttttttatttttatttttttctccttctggattatgttatggccttagagaactaaccaatctttggcggttattaactcggtagctgtgtaaaatgagttttgagagggcttgggtatggagaatatacatgatccgcgagcttgttcgaaatttgactgtgtagtcatgtttgaaattgctttgttctgaaaataacttgaactgaattcgtgtgatgtgagtgaggagctgtgtgtatgacttctgtgagagatttgaaagttttgtctatgtgcaaccttgctccccccccctttcgattacttctctatttattttgatatggatcaggtgtgagttgaactgtacaaatcttatatcctgtttggaactgcaaccgcagtgccctaatgcgcgtccctgttaatgctagtaattttagcttttgaatcaaaggctgcaattgacgtatgtctataccctttggacgtatttccaaacgtgcattcaatgagtttcacataatgtatcttgtgtcaattggctagctgctgtgtttcacctggttcaatgagataattatagaaatagtctaaaagagacgcatagttgaaattttgtattattttgatcttttgatgaatgggtccagtggattatggggctgttctgtttttgaaaacaaaaaattgtggagtatacatttatctttaaatgagtctgtgctggggtgttacaatttaactggtcgatgcatctggcaggaaatcctcaagacgtggttgtgccacctgttgaa

SEQ ID NO: 22204 - DNA, 661 bp, Glycine max
  Intron number 2 from transcript Glyma05g25290.1 (locus Gly ma05g25290) derived from phytozome v7.0 (chr-ID Gm05; pos 31423107 to 31423767)
aaggcttcactgagtgagtttttttattttctatccttttttgtactttgctttttgattggtttgttgtttatttaatgacttagtaggtaaaacggttttactaaaacccttgcttctgaaatctgacttggtttgtagttattagggtagttaactaattgtacgtgttgttttggactaagttgctgcttcaaacaaggaaaccctgattaccttatttttgttagggttaccgactaacatgatttaaatagtataatcttgttcggatttcattcaatttccactgaatgcgtgctagtcagaaaatattatcttataattgctattgtctgcccctgcccccttccatgaatgtttttaaggatggttgtgcttaattgcttataagagctgtttattgtgtagacttattctgaggcatgtacttaggttgactgcttcagttagtgctctatacgaaaatggatttggagagtttctccttagtagagaattcgtgtcttacaagaaatgttatgtgtctaatacattgatctgcaagtttaccttgtttttacaggggtaagcttgcagatcgttgggagctccatgttttttagctttatagtttaccttgtttttacagggttgacatgcattttcttttcttgcagtg

SEQ ID NO: 22205 - DNA, 716 bp, Glycine max
  Intron number 2 from transcript Glyma06g04300.1 (locus Gly ma06g04300) derived from phytozome v7.0 (chr-ID Gm06; pos 2982940 to 2983655)
aagctccggtaatcttcctaaagcataatgtaagtatgctatctgtttagctcctgtatttcagctaaatatttatgtttctagcttctttatataagtacttttatgatattatttttcatacactactaggtaaagatttttaaataagaaatcattttatggcttataaaataattattataaaaatcaataaacttattatatataactatttgtgattggatgagaatataaacaacttttacattattttcaaactgtagttcatattccgatttatttgagtaaatagtatacatgatatgacagtgtaaatgatccatacattgctattcaatcacaaactatcatccatgataaatttattaactcttataataattattttaaaaatcataccaataaaggctattgattagttgacaatgcaaaattagttacactaaaagtcataaaaataaaactctttatttattgttagtttctatataaatataagggcttaaatattaagtctatcaggaacaacatcaatatgctcgtcctttctcctctattttgcaaagttctctttaagctgtggtgaagaaagtcatgatcaactaatatttactttatctctgcttctcaaactagaggttgtatttgattgctttatcatgtcaataaaaatttatctatagagactctaattacgctattgcttgcaggta

SEQ ID NO: 22206 - DNA, 526 bp, Glycine max
  Intron number 2 from transcript Glyma08g16260.1 (locus Gly ma08g16260) derived from phytozome v7.0 (chr-ID Gm08; pos 11878368 to 11878893 reverse strand)
ggactcaagtctcaagtatgataccttgcaattggatcctaacagcaacaaactctctagtgagaaaagcatatcaatggaaaataatctgattaacaaagaatatagaggaaaatcatactctgataaactattagagaagaattctcctaaataaatttattgaaaaataattttgttatagttcaatgctccaatgttgttttttgattcacgtggccagctctgcctagttacacaattcttgcttgttgttgcgtcaatgtatagcattcatttatgttgtgcaatgatgttttttaacttcagaatttcatttttatttgtaagccattattgttgttgttgttgtttttgtcactgtacatacgaggatattgtatttctattattctttttaatagttgatatgctgtggtgtaatgaaccattgagtataggcaattacaatgagatattaaaaatttcttatgatgaatttgactttattgagtaaactaactttagtttgtggaatgacaggatt

SEQ ID NO: 22207 - DNA, 687 bp, Glycine max
  Intron number 2 from transcript Glyma08g16900.1 (locus Gly ma08g16900) derived from phytozome v7.0 (chr-ID Gm08; pos 12397733 to 12398419)
ccaagaagtctaactctaaccccacttcgcttaacgtctgttactgttctctctttctaccttttttttttttttttaatgaccaacttacattactgtgttgtggggtgtttggagggaagggaagtaaacggaaagagagaaaaaaattgatttgatttcataagtatagaaaaaaataatttttttaattcaaatttaaatttttttaattcaaatttaaattttttcttcccttttccacctttctaacactgttccaacttccaaatggaccatgtagaatgtatggaaaatcaaaagagaaaaaaaattgaaattttaatagagaagatagttagaaaaaatgatttttttttctagaaactattttctttcttttgtttttcttttcaactaaataaaaaatgcattgttagattttttttttttttttgttttcacctttgataatccacctaatagatcatgcattaaaggttgatttaagttattaggtccatttctaacaggagaactgcatttttattttactctggtgaatgaaaggttttgccttttggctacccttttgctttttattttttatttttttcctgttaatttttctttgtggggaggtttgtttttattttttatttttacggaagagggttttatattagttgtttctttctttttaggggg

SEQ ID NO: 22208 - DNA, 1031 bp, Glycine max
  Intron number 3 from transcript Glyma06g07360.1 (locus Gly ma06g07360) derived from phytozome v7.0 (chr-ID Gm06; pos 5368205 to 5369235 reverse strand)
gctcaaggtacattgataacaatataacatgaacatcttatgcagtccatggtttaatgaggaatactatctttattagaattggaatacataaggagatttaattaagggaaaagtttttttctttttgagctggttggcaaatggaattacaagtttatattttgaaaaactgattgtactcacagcaataaactgccatgtattttctcaatgtctgtccttgtcaatttttgcatggttgaacagtttggaattggtgatgtttggaatttaatatttgtataggattattccttttttattggctaacttagttgagtggataccttctcctcatgcttgagaatatgccttcaatgaaatggtggtggtggatgtgttttcatttaataaatttaatggagggagtaagggaatgtcaatatcttgtcctatcttggtgatgtttttttattaaataagttcctagactccatatcctctttcggaagattcttgccaatttgatttggtgggatgacacaaaggtactgccaaccaaaaaagtactataaaattcattttatttcatcttctagcttgaaagtttgcagtaaaggtaaccttgactctaagtttttatatgccaaaaaatagaaaggggaccacgtcactagctatgttgttaccaaaacttaaaggaatgtaaatactaatcaccaaaggatacatatagacccaatgcttaagtaataaactcttgattttcataattttgaaatcaggttgattagtgcttatattcatatagtacaaattatgccatttattaatacgtggtcccaaaattagataggggtgatataattctaatgtgtatttaatctgtactagcaaaactcttggcccataaatagttctaatattttttttactttaacttgtttgtatagctagttgacaagttccagattagcctatggtgaataaaatggattttattttgttttgcagctggtcccaactcttggaaactcttcctcttccaa

SEQ ID NO: 22209 - DNA, 708 bp, Glycine max
  Intron number 1 from transcript Glyma06g47430.1 (locus Gly ma06g47430) derived from phytozome v7.0 (chr-ID Gm06; pos 49892449 to 49893156)
acacccctagttctggtaccctttattcttcttcggccatgtttttttttttttaaatggtttcactaataactctagactgtagtcaccccagaggccagagtaattcatcaaagtataattgaagttacatcaaagataaaataatatatttaatctcctaaaattattaaaagacagtcgttttactcttaaaattgcaaaaacaaagactaaaatgactatatttcataattttaaggactaaagtcacatttctgtagttttagaaactaaattgactcgcactctcttaatttcaataattcactttatttatttatttttaatttaaacaagatgaaacaaaatttagaattcataaagggaaagcaaaaacaaaaatagagtagatagtgtaagcactaacagtttaatgagtttttacattatcattcaatcacaaactgtcattttatggtaaatttgttgacttttacaataactaccttaaaaattgtatcaatgatggttcctgattggttcacaagttaaaatttgttacaagttaaaataatacatggaaattatactagaagtatttgttctgattccactacattttgcttttctgcataaatgtgagtatattgaacataatgtgttttgttctgcttagtgattattgatgataatttgaaattctttttttgttggtgggggtaggtg

SEQ ID NO: 22210 - DNA, 557 bp, Glycine max
  Intron number 1 from transcript Glyma06g12570.1 (locus Gly ma06g12570) derived from phytozome v7.0 (chr-ID Gm06; pos 9733051 to 9733607 reverse strand)
tcttctattctcattctgatttgccacacacgcaggtaacgtttctctaacctctctatacttaatctatgactgggttttgttgtctttgtcaacacttcacttggttccttcgatctctgcaatacaatccttaatctatttctttcgatttctcttctcttgcgtcatgtttccaacttagttctttgatttggcgtgattatgattttgccttttccctccttctgcacgattcagccttttacttccccatagggtttatttgacacttctggatttcgatcaacttgtagattgagtttctctgctgtcaattgctcaattttgatgctgattatgttgcattctttctttcttgagtctgtttttttgtttttattaaccacctattgaattgacggaatgaactgggctttttgaattctagatcactgatcagattagtgttaatgatatttggtacgatgcactctacgatttcgaaagggctttattgatattgttacattgggtttgcagaaaggttgaaaatagtgggacttgattcactggag

SEQ ID NO: 22211 - DNA, 609 bp, Glycine max
  Intron number 2 from transcript Glyma05g23710.2 (locus Gly ma05g23710) derived from phytozome v7.0 (chr-ID Gm05; pos 29438060 to 29438668 reverse strand)
aacaccaccagctccatatacaccaccagctagtatcatatctgcctttctctcttctctattgattgccaagaaatcttgccatcatctcattgctttacggttccaaaggggtctagcttagttggttgagcatgatgtgtgagttgttgcaaatcccttggtgtctatctttgattcttaagaatcaaaaagaatctcattgctttgtggtgatgaaatggttggagatttgaattcttggttctttttcatcatttggacaaaattctaaaactgaatgcaaagctgacatgactaaaaacaaaactaaacaattccactttctgattggctaaaaggagaaacggtgaattggagatggaagatttttgagtgagattcctttcagactctgatttgggtggagtgtggatttgagatagctggtgatatggttttgaaattgtccaatttctcatccggtctggcttaacatttgaaaattgaaccaatttttaagatattgaatgctagaacctttagcatgttatggccatttatttgatacttaaaattatttcatgactgctaggtgtacagagtcaacttgtctgttctgggtgcaga

SEQ ID NO: 22212 - DNA, 835 bp, Glycine max
  Intron number 3 from transcript Glyma06g48320.1 (locus Gly ma06g48320) derived from phytozome v7.0 (chr-ID Gm06; pos 50598066 to 50598900 reverse strand)
gtggattgaatcagcaacgcttgtcggtatgcctattgataaaaccaaagattttattcttactgatttatttatctgggattctcacatcatgttaagtacacatgaatggtgattccattccatgtaatgagggattcccattcaattctaggcctcgttatatagaaccatgaatgaagcatggaataccattacctcagagaaatagaattgagatttcatgctctatgaaatgagaaaactcattctattttacaaaatggctttgcacacttcattatttcttgttacaaatattgttttacacacttacctttttcctttcctcacaaagaataatgttgctcttcttttctgaacaatagtttgtttttgagttgtgaataaataaacctgaatgttccttgttttttatctttgtttgcatgtaccaaactgtactggaaaatggaaatggccatttcattccattttcatcagtcatcgtatggaatcaccattctgtatatgaaacatgtgattgggtgcacgggaatttgaatcatgtaggtaggagggattggaatggtgattttctacaacaatcatttgtttcgaaaatggatacctaatgagttaaatctagagggctttatgaggttggtgtatattttttcctcctggtgtttgtccttgtgccattttgctctgaatggatgtatggtgatagactgtcatgctcgcatgaataatgaaattagatggacattgatgctgcaaattgctatctagtatctactacatcacatatccttattgttttttcacttatcatactactctttgtgcagat

SEQ ID NO: 22213 - DNA, 622 bp, Glycine max
  Intron number 4 from transcript Glyma07g39180.1 (locus Gly ma07g39180) derived from phytozome v7.0 (chr-ID Gm07; pos 43734641 to 43735262 reverse strand)
gcacaagcttaaaatctaagataatctcagaggaggtcagttctagtttggttttaaaccagctaattctaagtcatgaatcatgattatcacgataacttctttaaagaatcagccttaagaagattgtaaattgttagagcttgtttgtgtaaaggatgggagttgattttctcccttctgtccaccagattcataaaggcaggcttgcctctatataaagaggctcgtgtctcaaggaacgtttgaatccttagcattatagaagcaaacagtaacagtagttataccactgatagttgttagttagcttattagtttgtttactcactttagttgtaattgaatggtaccatcttagctgtcagctctagttcctgttaattagatgtttccatgcttcctaaaatacacgttccccttttattattgatcatattaatcaatcaataacaatgagactttccacttctgtggaacagcctctctcctctatgaacagtatgatgtgtgatcacaccaagttagtatcacctgcatcatcatcaataacgtttactttattttgttggtcaattctgctagatgtcagttgctttgttctatgctgtcatgcaggttg

SEQ ID NO: 22214 - DNA, 938 bp, Glycine max
  Intron number 1 from transcript Glyma06g11880.1 (locus Gly ma06g11880) derived from phytozome v7.0 (chr-ID Gm06; pos 9187979 to 9188916 reverse strand)
tctgctacaggttctttctctctctttcattccgcttttctttccgtttttgctttttttaattgaaatatgattttgcttctttccaaatgaaataaccgacagtaccatttttggtgtttcagtgattgaaaaacagtggctagttgattctcctttcatatatagtccatcacatgcttttgggttaatatttgtttcctttgatgcccctatagttttctcaacttatttaattactgtgtaaagtttatgtgaaattggaatcgtatctactggatcatggcctttacctgtgctttgtatggtttggttagacccataagttgaagggtaacgcactcagatgctatctaattcccattgatggccctgttttcatggatttgggttgtttatattatatgttttagtgcccagggtattttgggttgagagtttgatactaatttctaacagatattcttccacatacatacacttgaagattgaactcttgaattcgtacttaagagacattgttattggacaactaaactatgttagttggattgtttattctgaatctctatatcatttgaacacaagtactattcaggggcttcattttaggtgccgtaaatgatataatctcttaaaaaagaagaaaattttgatgtaattcactatttggattttgaaaagataaccagtctcggtggacctgtttctaaaactgactaaatgaccttttattgtttttagaaaactatagtcaaattgccacaagtagttgtagtgtgtgcgctacaccttagtttagaaaaggaggacaggaggtagcttcctcttctgcttttctttctttctttttagtgttttgccaataggaagttctgtttttcttagttttcccattgcaacaattacaacatctctaatttatgcagttgtggtac

SEQ ID NO: 22215 - DNA, 341 bp, Glycine max
  Intron number 1 from transcript Glyma07g32530.1 (locus Gly ma07g32530) derived from phytozome v7.0 (chr-ID Gm07; pos 37419661 to 37420001)
caacaaggatccaaacagcattccgagcttataaggtatgtcaatttgaaagtttcacagagaagagacagaccaagtccaagcaaactttattgattctagcacatccttaacaaacgtgtttctttttcaatgtttcattattcaactatggatgtctgtgtgctattgtcttacatgcataccatttatgatattatttaagctgacagtgacatgtatgcatgtgttatttatcatagtacaaaccttctgtaatgtcttctgctgactttgttttatgatgctgacttttgaatccgccaggctagaaaatatttacaccgcttgagaggattcac

SEQ ID NO: 22216 - DNA, 563 bp, Glycine max
  Intron number 1 from transcript Glyma06g16840.1 (locus Gly ma06g16840) derived from phytozome v7.0 (chr-ID Gm06; pos 13240997 to 13241559 reverse strand)
gaagtttcaggaagtctagctctggtttgtattgatctcttcctttgtttgatctttctctagaattgggggtatttactaactttcccatgctttaacccctctcatacagtttataatgttggactattgacctattcatgtttaagaaactacgtgagggataatgatgcctaagtagttataaacttcaatgaaatatcaaagtgtatgtatggctgaagactcttagaaaatatgtatggagagaaaattttgatgatacacaagcttgacaatagttcacaccctcaaattcatctggtgctattagcttagtgtttttacacactgtaatgcatgttttttttttatcggcacactgtaatgcatgtaatgacagtaattagtatgattcaaatacttccttgaggcatggatgtatttttctggtttgtctctgcttttgtccttttatcatgtatcatgattttgtgctaatatacgattacttttttttagtataataacatggttgctatatggcagttatttctgctagtactgtctctgggacctcagga

SEQ ID NO: 22217 - DNA, 940 bp, Glycine max
  Intron number 1 from transcript Glyma07g09220.2 (locus Gly ma07g09220) derived from phytozome v7.0 (chr-ID Gm07; pos 7705723 to 7706662)
gccacataacaagtttccttactttgattttgccggtaacttatacaaccatgtgttgttcaattatattgtaatacgcttctacctaaatatatatcctttcttctacttgttttttttttatatcaacaaatgttaatggttgattttttgttagtagatgaatttgaacctacaatctcccctttcttcattaaccagtagatcaactttatatctctttttcttgttttagttgataattagtaaccatgaactgaaacaaatctgcattgattttgaatccttttagactctctgcaactccccccataatcattattgataattttgcatgaaaatagacacatcagccataaatcaacaatttcaaaatcattcgttgtagttgattcagcgtgaagttgtagatttgggaattaagctataggcactgcagctaaagtggctggctacgtgttcttgaccatataaattaactacagagcttttgcgcctcttattcatccaagtatactttctctacttcatattttgtccaagctaattctttagctttttttatggttaatgattattgcaaagttggctttttcttttttgataattgagtctgattgattgattttttctgcttatgatcgggaccttattgagagaaaaaggatagttattttttttattagtcaatattagttattagtttgttagtttcttttggtgtgaaggatttgaatccactgttgatcatttaaacatattcaactggagtagaatttgaaagagccttgatgatctctttagcactagagatcgaacatattcagccggagtagaattttgaagatttcatgcatgatctttctcatctcttttcatttggtaaacttcacaatacattgcaggaaaacactttcgcattggtgtattggaaaaaaag

SEQ ID NO: 22218 - DNA, 754 bp, Glycine max
  Intron number 3 from transcript Glyma08g28040.1 (locus Gly ma08g28040) derived from phytozome v7.0 (chr-ID Gm08; pos 22308051 to 22308804 reverse strand)
attctaaacaaggggagaaagaatttcaaacagaggtatatgctaataacctttttgttcattttttgggttatgaaaaagatctttgcaaatttaattactttaaatacaaggtttgtgggattcagaacttttcttttcttttcttttgaaacttcactagtgatttatataatattggaaaaggatttaatagatagacttttgttttccctcctatttcatttgtcttcttttgattgagagactcaaacagtttaattttgacaggcatcattcatacatggcttgatgcttgttgattaggcctaaatcataatgtcaaaaattcaaagaaaccatgcaatatacattagatagtctgatgttcaaatttaacccaactttaggcatttcctatagtatgctgtgtgccagttgatttgaactctgttttgaaacattcattcctaaaaatgacctgaaaattcatttgagtttatatttgcattgtgcatatggtcatcatcattggcacataaaatcctactgaggcataaattcctttatttgccagatgctatagttaaataaaacggtggggatggccacttatttccactgggtttcacttaaagtaatgatattggttcttattggagccactccaagtattactccgtgaatttaacattaatcactcttatctccactgtgtttttaatgagatgttgatccaggtgcttctgctaggaagactgcatcatcggaatct

SEQ ID NO: 22219 - DNA, 406 bp, Glycine max
  Intron number 1 from transcript Glyma08g28040.1 (locus Gly ma08g28040) derived from phytozome v7.0 (chr-ID Gm08; pos 22309648 to 22310053 reverse strand)
ttaccaaaagtgggggctgttttctgaatcacaaggttcttaatttctcgcctgattttgctgtctgagttgaaaagaaaagttttttttattgttgtttttgaattttggttggtgggttttgagttttatggatgatggggtttatttggtggacaattttatttccgttgtttatgagagtaaagtgacttattattggtatgttaatgattgttgaataattagatgtttcaatattgtgtattgattggtatttgtattttttgtttagattcatctttgaagttggtggtggatgaactgttgaattggtgtcagttctagcaggatagagtgttgaattagcttaaaaagttgaaattttgttacttttgtggcagtgaacctgtctagtgagagagtt

SEQ ID NO: 22220 - DNA, 753 bp, Glycine max
  Intron number 3 from transcript Glyma07g37720.4 (locus Gly ma07g37720) derived from phytozome v7.0 (chr-ID Gm07; pos 42690589 to 42691341)
tttgttgatcagcccaggcgaaaactcaactccaggtttaaatttttgcagaccatgaaattcttcaatcttttctcttcaatgtgtgattactacaccgtttataagaaaaattttaattctgcttctgtaaatctaattcttttttggttttttcatttgtgtagattgcattcagcaggacatttgcttgatatttgtttgccaagaataggattgggaaatttagagcctagcaaagcctaccattttcctgatgggtatatcattttcctgtttttgaatctttttatgcgcctaatctgaataggttgagtcttgaaagtgatctatttaatatccaagctgactggcagtgtggtatacatcaaatcattgctgatgtaggataatattaatcatgatcaaatgggtttgctagaagtctaacccttatcttcgtcacccaaagatttgcatggtgacacaggtcttgtaatgatttttttggtgatgtttacatctttgaggggacttgcatggtaaaaaaaatctatagaagactaatataatgaataatatgtggaagaccaatttaatcaggggtttactcagaaagatctaaccttcactaatcaatctcctgctgttgtactcccatgagtattccgttgaaatgtgttcagaagttctaaagtttgcttcatacttgctattgtattgtaactattgtttccaggccttgggttgaatacaaaggtacaatttcacaaa

SEQ ID NO: 22221 - DNA, 848 bp, Glycine max
  Intron number 2 from transcript Glyma07g08170.1 (locus Gly ma07g08170) derived from phytozome v7.0 (chr-ID Gm07; pos 6805489 to 6806336 reverse strand)
attgtcttggcgtggcaacgtgagttgaattcttctttaactttcacattttgcttgctttttcagtgaaatttcattggagatgggattgaattctagagaggagagtataggacaaaacctagatcaagtttcttatatctttaagtttgtcccctgcttctttgtcagtctcttaaattatttttattagattaaattagtccttttgacagttttttttacgctaccgatgctaattttggctgagatgataaacattcatatgatgtgatatcttttataatttgttacatgtcaccaaattgatcatgttaatgtggtaaattaatagaaggaccaacttagtttaacatgaatatttttttaaggaatcaaagtggatttttttaaatttacgggaccattgaaacaaaaaaaaaagatggagaattaagtgtattttaacctctctactattaaataacttttaccatatatcttctgtagaatttaaaaaaaaaaaaaaaacattttcatggcatcgtttggtggaagaactagagggtaaagatataagaaacttgttctaagttttatctaatgtaatctggtctaaattccgcatttctatatgtagcaaattttcttcctatctaatggctgtgactggtcttctatgatttttttttcaatttaagatttcattttgcattttcatatgagtgatatatattacatgagtactgagtaattgtttctgatacaaaaggtaaggttgcatttgcacttttggcatactaatattcattcatttctatcaacattctgcagcattcatctggatccagtgtttgaagcgggtagta

SEQ ID NO: 22222 - DNA, 630 bp, Glycine max
  Intron number 3 from transcript Glyma06g16340.1 (locus Gly ma06g16340) derived from phytozome v7.0 (chr-ID Gm06; pos 12828747 to 12829376 reverse strand)
cagttcaatccattctcggtaatataaattgatgatatatacgcattcattatgagtagttatagcatcatgtgaactttatatatatatatatataataaaattatatagaagacgtacgtaattttattccttactaatgcgacatcttcgtataagtattatattatattctgtttatttctttttaccgtcacatcatataacctgtttcacttatattactcactcttatatttttcctttgctcataacattttcttttgaatattacatcagcttactgattgcattcaaagtttcgaagtcacacgtctgtcgtggttgaatatgttgaaatgttttggtgtgaacggatatttctgtgtatacatataatgttttctaaattgttaattgactgattgtcttaatatgcatgattatcttaatatgcatgattatctttatcttttttatatatatacataaatctaaaacaatatgctttaaaagcaaaaggacaaatattgtgttgtacataattgacttttggttgttgaaagaatatttttcttttaaaatggaatcgcttgtgggttgtatgatagttagtaacatgtgctttaatggattttgcaggtgggtatt

SEQ ID NO: 22223 - DNA, 475 bp, Glycine max
  Intron number 1 from transcript Glyma06g01220.2 (locus Gly ma06g01220) derived from phytozome v7.0 (chr-ID Gm06; pos 762877 to 763351 reverse strand)
tcatttcgttttatttgtctcgcctgtgatttgaggttggtacgatatccgtgacgagtttcatcataataccatgcaagtttttcccctcttcctgctgattctactgattttgaattttttaggtgttcgtaactatctatattctgttggtttagatcgattaagaagtttatttttgtctttaagtgggtcactttagcgtccccttaaaattaaaaaaaaactgattgtacttgcccttttttcaatgctctaccttcattttggtcgtgttcatttttttgtggggtgttttgatttggatttttgaattttgtttagcttcaactagattactggttgagtaacagcgagttacatgttttggatcatgcttttgactgtcatgttattgatcgttgcaattgatggtgtgcctttttttgttactgttccaggcaaaagggttgtgttcacgagtgaacggtgttga

SEQ ID NO: 22224 - DNA, 297 bp, Glycine max
  Intron number 1 from transcript Glyma06g05980.1 (locus Gly ma06g05980) derived from phytozome v7.0 (chr-ID Gm06; pos 4287152 to 4287448 reverse strand)
tcttgcctgattttttacttcgggacttcttggatgtaagttctctctttctttagaaccttaatatgaattttaatatgcgcactagatattttaggttattgaggaaaaaggggaaaacatccattctagttttctaggaactaggaaggaaagacatcaaaagaaaaacaagaggaagagaaaaaatttgataagggatgtgatgagaaagaaacaaacaaacaaacaagaagaaaaaaataatatttctatatttctccttaatacattatttttatgatttgtagaaattat

SEQ ID NO: 22225 - DNA, 880 bp, Glycine max
  Intron number 1 from transcript Glyma07g06030.1 (locus Gly ma07g06030) derived from phytozome v7.0 (chr-ID Gm07; pos 4730630 to 4731509)
tggtaatcctgtaagtttattttacatattatgcaattaatctactataagttaatcgagttttgtatatgtacataaaaacaagtttgcttgaactacaacatatctaatgaattctcgtattgtcaaaacttcaaccatttactgaataaaatgtcttaagctctgtttatcttgtgctggttgatatggaaactgtgtagtgtgagcagggccacttctgtctttatgtgttcatagccttatatgtaggtgtggtaaatgattttctgctattgaagatggagaatttagcatcttattggactatcctttccttaagaaattctttttccagtatgtttcttaggccttttcacgtaactgtgtccacctgttgtcaatctaggaagatattgtggtgatgatttttatgcccatccaagtatccaaccatattaatgaaaagaattctgagaatttttaaagaattctatgatcctagcagagatattggacatgtgtcagtacaatgccaatatgtgatggatggcagatttggtggacctctcttctttagaattcttttttgtagaagggtaccccagcttagttatagatctatggttgcctaatatctgctttcaattgctaatattaggttaccatagctcaaagtagggttatcttgggatgtacattccacagtacctcttgtactgatatattttatttataatatatatatatatactacttttgctgataaaaataaaaacaatgctagtatgtgaaatatatatttgtgtgtgtactctacctatgttactggtcagtaatgatccataatgttttcttgtttcaagcttgaggcgttggagtatttctcgtcttcgcttag

SEQ ID NO: 22226 - DNA, 760 bp, Glycine max
  Intron number 2 from transcript Glyma08g16630.2 (locus Gly ma08g16630) derived from phytozome v7.0 (chr-ID Gm08; pos 12184507 to 12185266)
aagataaggacctcgctgacaaagggattgctcaggtattctttcatttctcaattgtaatgtatctttaaaattttgggttaaatatgtttctagtctcagtaaacagggcaaagattcacttttagttcctaattcaattgtctccttattatgtaaatgtgtcatgtgtgatccatatatttctatagatgagagactaaaaacgaaacaattttctatgaaggacaaagacaaccaaaaggagatgattactttttaaagggcaaaatgcaaaccttttcctatttgtaaggattaaaatcaatttaatcgtaattctttttttctggaagagctttatttaggaaatatatgtatcagtttgttgtgaactgttggatatgtggaagtttgtagaatttgtgcctttgattgtgaatgcacatatgacataacataaggatatgtaaaatattcttgctactgttggtatctattacacagcaacagtttaacagataatatatgaatacattttgatgttgaaatttagagtggcttttatgttgccacctattgtgttgctattagtggcatcaaaatggaatttgttgtttcatgttttgtcttataactgttgagagatttgttggctgtttgtatatgacaacccttctcaccttctttgcatcatttgttgattatttttttccatcttattgtccttgcaaaagtatttaaattagttctcctggtgtatttctatggcaggattcct

SEQ ID NO: 22227 - DNA, 951 bp, Glycine max
  Intron number 1 from transcript Glyma07g09580.1 (locus Gly ma07g09580) derived from phytozome v7.0 (chr-ID Gm07; pos 8014860 to 8015810)
aattagggcttttcttcttcactgttcctttgaaggtgcatttcttctcaattccagtagtaatcttttagttcaatttcagttgtgttttttacttgaagacgtgttcacaaattcactcgctggcacaaacactgtctttggttaaggagaagagtaaatactaatggtgtatatgcactaacatgttaaagatttttacagtataataagtttgtatattaacttatattacttaaaagttgtactaatgatgatttttaattggtttataatgtaaaaattatactgtctgtgcttataaattatagtctaagaagaaagaataatatggaatcaaatgtggttttatgatcctgcagggtatagggtgaatcataggttagaaaatgaaaaacaagttggataattcatggaacaagtaatattgtattctcctaaaaaatctaggagttggagacataaaacatttaaagctttctttatctagtaagtaatatgtttaacagaaacatattgttggggaattagaattattcttgaggtaaatcaggttagctacttgcatattctgtttcatgctatttagaatttccctatgactggattagttagatttggcatttaatttattcgaaagatgctttcggggttgaaggtgaaattttttctctgaatgtgttatttgtttgtgggtagctttgtctgtttactttagcattgcttaggagaaatggtggtaaaagtttattgttattattattactgctaccattatttttttactgaaaatgtaaagctcaaaatctcttatttgatgggtggaacttgtcatctggttgtgtatttactggaattgacatcattactttgaatgcttctgtctatttgataccttttatacctaaaatactgtatgctaaatccaggcaacagtgtcgtgcgaagtgt

SEQ ID NO: 22228 - DNA, 569 bp, Glycine max
  Intron number 1 from transcript Glyma06g11070.1 (locus Gly ma06g11070) derived from phytozome v7.0 (chr-ID Gm06; pos 8443547 to 8444115 reverse strand)
ctcgttttcctcactacgtctattatataaacctggtatattaatgtcattatattctctttcacatttgtcttgcttcttcgtttaactcttttctttgattacttgcatctggggtacgctgattccatttgttttcgtggtttttgacttaatacttgttgtaaaattaaaaaaaaaggaactttctcattatttttctatttacgtatcaaacttctatgtgggatttctcttgtttcgttgctatattccttttatagatctgctatctctttatttgaaatcatttttctaatttccctatggctatgatgatttagatagtgatgtaaggtagttttttttctttgttttttctggcattgaacattcttctaagcaagtaagtatccttttgttgcttccttgattcaaatatttgagggtacatcatgatactaaataaacctacatgttagctacatctcttgtgcaccacagcaaccaagcactgttgccctgttcctgaattgtcaactctaaagtggttttgtctttctcagctgtttgttttcaattttcagata

SEQ ID NO: 22229 - DNA, 478 bp, Glycine max
  Intron number 1 from transcript Glyma06g42630.1 (locus Gly ma06g42630) derived from phytozome v7.0 (chr-ID Gm06; pos 45919296 to 45919773 reverse strand)
tgctgtcactccaatcaaggaccaaggcaattgcggtatatgtatttttttttaatcaacaaataattttattagaaatattcaaatgtgtaacttttcctctcccttttccctttctcctaatcgtttaacttctagatcccatatatatatatatataatacaaccaaataatgtttcatactatatatatatatatatatatatctctctataatatataactatatatataaaccaataaataactataagatgcttctttccatgctttcataatatttgatgtgtttcattatttttttatctgaaaatattaatattaatcattaaaatgttaatttttttaataaagaagatcaaactcacaatctttcttcttcctttttcttttcattaaaaactctgctaataatgtcaacgtgttttgtttgtgaaaacaggcagttgctgggcattttcaactgtggcggcgatc

SEQ ID NO: 22230 - DNA, 969 bp, Glycine max
  Intron number 1 from transcript Glyma08g40550.1 (locus Gly ma08g40550) derived from phytozome v7.0 (chr-ID Gm08; pos 40307061 to 40308029)
gtctgatcgatcctttgccaaccccacttttcaaggttcattctttttcttttttttttgtttctgcatttctctgaattggttttgtttttgtccttgttttataattgcattttgtaattttgttatttgattgcatgcttttgttaggaaatgttgtaggtggaagccctgtagtttgtttgtatgcatgtattggaatggctatgccatatgaaaggctgagatttttgttgattgttttaacatgtatattggttgaatcactagagtagacagattttaataatgggtgcaaatttgcttcttatgcatataagtttgcagcaatcgtgttttgattttaatttttaagttctgatcatatctgaataatttactgggagactgtagtgggattagatcatattcttaaaattcaagttaaaaccataggaacgtaattctctccctgcctccatcgaaccacaaattggttcttgcataccaattttttgtggtacttttgtaaattggttctctccaattccttacaaatttgtaaacaagggcatgttcgtgcaaaagtcagggaagctgagggtgaaaagggtggacaccattgcatgcattttatgatgactgaaacatactgaatcattttcgttcacaaatcacaaccgaaatatgtcagcattggtgcttgtgctatggtagaaggcatagccaggcttgcaatatacaggattaaactaatatttttttcgcaatatcaagggtgttttgaaatttaattgtaaaataagcattggttggtggattagtcccttttcttcacagatagttcctctgaagaagtttaaatgaaaatttgtaaatgggaactgatttacttagtggatatctatttcaatgtgccaaaaactattttcagaaacctttattcctcaaatgttgttaatttatggcagcaggaactattgaggaggc

SEQ ID NO: 22231 - DNA, 659 bp, Glycine max
  Intron number 1 from transcript Glyma07g12130.1 (locus Gly ma07g12130) derived from phytozome v7.0 (chr-ID Gm07; pos 10398436 to 10399094)
atttccgaacaagaagctcatcgacgaccccagtgcgtgcgcctctcgtttccctctcctctcactctctcccccttcgctccgttcaattcctcgctctctgtcaaattccccagcaatcctcgccttctttgacttttgccatcgacaattgctgcgttctgaatgctttcgccgcagttccgtgcggaatcgccttctggattatttttttaactgtttgtgctctgtgcattttgttgactttttttttttcgttttataaaatctgtttgaaacttaaatgttttagcattaggctttgattgaatttgcactgtgctttaaatgacggaaatcgctgctactggtcgtaatattcgacgtgaaatgttgtagaattgattgtgatgatttcctgttaatctagctgttttagttcgaagattgtgattcaatgtgagagttagattccgatttagattttttattctgtttgtattccccttagtagcactgcagttctttattattctttttcttaagagattttgcaataattagataatttatatataaatgtatttaaacatttattatttatttatatatgtatgtatatatgtatataattgtcttgaaagttgaataattgcttttgtttttaaatttgattgcag

SEQ ID NO: 22232 - DNA, 1002 bp, Glycine max
  Intron number 3 from transcript Glyma06g47880.1 (locus Gly ma06g47880) derived from phytozome v7.0 (chr-ID Gm06; pos 50269628 to 50270629)
ttttagattctccagtgttccttgcaaattcactggtgagccctggtttattgctgtggcttgtttatttgtttatcgaatttgttatttactctcttaaaaatcaagaattgggggggggggggggggggggggggcaatagaaggaaatagatcctagaggtggctgtaagcatactacagtacaaagcacaaaccattattgctcctggagtccacggctgcgtatttaattcatttatgtaatgttaatgctgtagtttggagtttgcacatatgaggattcgtacgggttattttttcaatttgaataagcgttatattaggtgatctaaagttttcctatgaccttgtttgattcacttctggaattttcatgcttgcactttctttcttatgtttcttttctgtcttttcttaagctcctcaaatttcatcaggggcatgctgtttggttaatatgatagctcttttctgacatcatagttttgaagcatcctctagaacaggttaaaaaaatgtcatgtcttgttgtgactttttcttttcgatatactttttgtaacagtaagtggtgcactcagacatagagtatataattattatatgtaaattgtatgtttgtactttaactttgaaagacctggtaggaccctgttgtcttggtaatggtatgcaactgtgcttaaaatttgatttgattttcatcatgcagtgctactcacattatctatcttggaaactgtaaaccacttagattcttgctgctctgcatgccatgcaatgaggcactttttatgcctttaacacatggtgtcaaatgtagtttttacagtcctaagttatcactttcccttttagaggcaccaatagtattagtggtccatctgttgttgtaggaaactgatacctggttctgttgacattgttccgcctcctattgagctatgaatctgtctaatttcaggcacagccatctccaacaaccggaaagttcctgtt

SEQ ID NO: 22233 - DNA, 732 bp, Glycine max
  Intron number 1 from transcript Glyma07g06340.1 (locus Gly ma07g06340) derived from phytozome v7.0 (chr-ID Gm07; pos 5065533 to 5066264 reverse strand)
atcagaaccagacacaaatctccaagagtaagggaattttgctttcttgtggtgagtaaatttttgtttttttatgagatatgcatgaagtggcaagtcttgtttgagtttcaaagcagaaaaatttgtctatggacaaaatcatgaaaatgtaccaaccaaccatttctgctcctttcctctaattttagttgcttggaaccatttagattttctggctttacatggtttttctttcagttggtggggttgtcatggaatgtaccaaccatccaccaaggctttctgtttctacatttttgggaactgttgttcttcttcatcaagtcttctaatgagtgttaaaatgaaaattcaactaatttaacttgttgatactttccttcttggtaaggtttcgcaattttggccgtaatgtcaaggtttttggggttcatgtgacaatttatctgcaattttttcgcaataccgaggatcgcgacaaaaattacaactgcggctacaatttaaaaccttgtttcgtgggctacttgcttgaaattggaaaaggagtgggaatttaatttaaatgaaaagttttgatgctgccaaatcatataaaacaactagttctttttcttaacaaagaaagcacaatcttagataaattttgagtaatgtcaagtgcttatgttggtgtttagcttgtgatgtcaatggtaatgtgcattgtaaatgtataattgcagaaaa

SEQ ID NO: 22234 - DNA, 898 bp, Glycine max
  Intron number 2 from transcript Glyma07g04450.1 (locus Gly ma07g04450) derived from phytozome v7.0 (chr-ID Gm07; pos 3224120 to 3225017 reverse strand)
tgtttggcactggtgttgctgatttggttgaaggggtgaggaacttgtctgttgttgattgatgaatgtgtgttgtttaggatattggaaattgatgcttgtgatttgcacgttaatgattaacatttgaatgagcgtcaaatattgaagttattaactgacatttactgttcagatctagtgttagatgctatggccaagtgtaatttggctgctggaactttttcaaaatttaatgagcattgaccttggagaaaatatagttctgcatgtgtgtgcgtgtgcctttgtcgttgaatgttttggatggggttagatgtacaaagtagttttgattgacacttgcttgggttcaactcaccataatggtctcaggtcataatgtacaaagcagttttgttgatgtagttagaatgttgtcttataagtgacagcataataataacttaataaaactcattctttgcatagacataagttggagggtgagttcttttcttttattgctaaagcataccacaattgcctgtggttgctatgtttaagtgtaaaatgcaagaaatggatcttgtaagaatctgcttcctggagctgtaggctattcatcatatgtttattgttattaacatatggaagcaatgacaatactaattcaatagatttgtgctgtaatttatatttacttagttttctataatgctttattatctcttgtgctttggttgctgaaatttgatttccatttttataggaatctactataatacccattgatgtctttacatacacatttctgattttttgaattagttttgccctttgtcccttccaatattctaactaatggttgtatggcattttaggtttctaaactgagtcacttaagcaagctggctcg

SEQ ID NO: 22235 - DNA, 842 bp, Glycine max
  Intron number 2 from transcript Glyma06g41510.1 (locus Gly ma06g41510) derived from phytozome v7.0 (chr-ID Gm06; pos 44794102 to 44794943)
catacaagtaagagtttgtttcttatatgaagttgctttcatttgcctttcttatacaagtatactttggactagtggttctgtttggataaatttctttataaacacttatagatgaagaaaataagaaagtaaaatgaagtgagcttctcctataagctacaataaactaatgcgcttaacttttatagaagctatctcatcttagttctctaaaagctaaggtacatataaaatgattttagcttatgatagaagttcaatgcattttacctttttatttttcttttcctataagtactcatggagaaagttatccaaagaggaccaaacaatcagaattttctgtttattttctaaatgtgtaatgtgaaatggtccattaaacttgcattgcatgcttcttgaatcatgatccgtatattttgatgagaaatactttcaagttattaggttgaaacatttgaaaatcagacattgaagcaaaggaaaagatggcttcagaaccttggttttattacaaatatgcattatacttgttaaaatagattcttgatttgttttaggaatgtgcctttttgactcatgcttgatatgcctcggctacataaatgcatatgcaaatatcaagttttaactcatcgtatctgtctttctagatacatccaaaactaaatatttagtttgaaaatgtttaaaatttagtgaacacaaattgttactaagagtggaattcaaaatgtttgaactctatgaaccgactgcatttttcattctttctattgaatgttttaatttatgcttcagggatttgcagaaggcaacacataacttcaccacag

SEQ ID NO: 22236 - DNA, 356 bp, Glycine max
  Intron number 2 from transcript Glyma08g26180.1 (locus Gly ma08g26180) derived from phytozome v7.0 (chr-ID Gm08; pos 20533595 to 20533950 reverse strand)
gaagaaaaaggtttatattgttttttataaataaatttcaattgtcatctaattgtggtccttttttaaattttagattttccaatatttcctgcagtttgttttgttttgtgaatattgatttataattatagtttcaagaactttatgtatttttctaaccctgttatccttataatctaatggtgtggagtttgaggacagatattactgttttccttatgcttgagtttacaaaatctatgttacctcgtgctcagtcttgttcattaattatacttgtcatttcttttcccccttttcttttttcaaaacatgttgcagtgagaagagaaatcaaaattttaagattattc

SEQ ID NO: 22237 - DNA, 881 bp, Glycine max
  Intron number 1 from transcript Glyma07g01020.1 (locus Gly ma07g01020) derived from phytozome v7.0 (chr-ID Gm07; pos 592578 to 593458 reverse strand)
gaaccaaagcctaaagactcgccttcaggtatcgtcgttcaaaaactctcatcttttcatatttctcgttaacaaaattctaatacttggcgttgtgctatcacggggtttgatctttcatctgttaccatttctaattttgtgaccatagtttcaaaaaattgcttgatctatcaaacgttcatgttgagattgattaaaatttcaatttggtaataccctttgagttctccaattagaacgtatctggagggaactgtgagaatagaggaaattagtttttgtctctgtatatcactgcccttgtttttatatcaaaagctgtgtaactacttaacttacccataacataagaatccatttatgacccttgttttttttttaattcttatgggtttcttctgcatgcctattgctgaaatttctttgccttttggttatgtacttgaagggaagatgggggaggtttttgatttcttatgttggaattttgggttccagagtaaattataatgacacctctttgagacttttttcagattgtatacatacttttccttttttctattcctacactaactccatcgtttgaaaaatattaccctgagatccctttatacattacacatttcatgagtacatgagtatccatacaagggaggttgttgtaaacattaaaaaagcccgggattacatgctatctgaaaaaacctcaaggttgttggtgtaatttactcttggttcaaagttcttggtatatatgtggacaaatttcatgatatgacagtttttttttctcttcaaaaaattaaagattgaagtcctttgtattttgtttcttgaaagaaaaaaaagtgaaaactccaaacatttttgagcga

SEQ ID NO: 22238 - DNA, 684 bp, Glycine max
  Intron number 1 from transcript Glyma06g42500.1 (locus Gly ma06g42500) derived from phytozome v7.0 (chr-ID Gm06; pos 45828028 to 45828711 reverse strand)
cggtattcctcttctcattttatttatcgcttatggaatatttttgtttcaaaatatttgtcgctttagaatatgaaaaaaatattttttttcttctgatacaattagacttaaattattttttttattctgatatatgaccaattcttgtatggttttcaataaactttttaaactttttttttcctgataaaatttaattagataacactttgggaagtaatttgggtagctcttgagggattataaacaaaacaaaactttatccaagattaaggatataaaacaaaattgttgaaaccaaaattgatcatttagaaatacaaaatatatttaagtcatgcttttcataaataaattcactagtatgttctgtcaaaaaacattcactagtatgtgtataatgtaattaattatttagttagataaggttatattatcacaaaacttaatataattatttattttctcaagatgtgtgcattactttaaataacaaataaaatgagagggaaatggagggtaaaccaaatatctcattatgacaataacattgtgattcttctttccatgctcaataatattccattgtttcattagaatctaactatgctaaaatatcaactctcttttttgtttgtgaaaacaggtagttgttgggcattttcagccgtggctgcgacc

SEQ ID NO: 22239 - DNA, 600 bp, Glycine max
  Intron number 4 from transcript Glyma06g02770.1 (locus Gly ma06g02770) derived from phytozome v7.0 (chr-ID Gm06; pos 1871610 to 1872209 reverse strand)
catttattgcactgccaggtttctgtttcttattctttcccccatcaatatcatatcatattctctcctctttctcttttttataaattctctcttctccaacttgtatttgtatgcgtccgtatgtggataaccagatattattgctttccaaacagtaacattcttaactaacgtcacctctcaaattatttcactcaccccctttcaattatttctattcccatgtaaattttgtataccaataatttaacaaatactacatcaattatacaatgaaaacctttcaaacaattttttttggcattgtgcttgtgaaaaaacaaaaacaaaaaaaaaagtcgtgcgtatataaatatatgcgcccatcttcaattttcatccttttccgacattcttttacaaatcaaaagcgtttccctagatatctgtttctgtaactgtcaaccgtatgttgtatggagtaattctctgattcttcgggcggtgactccgatgaaaattcctatttaagtttttttttttttaatgtgccactatattgtattgtcatggcagtaacaataactcgttgctaatttatattccaaataggtggat

SEQ ID NO: 22240 - DNA, 431 bp, Glycine max
  Intron number 2 from transcript Glyma06g20380.1 (locus Gly ma06g20380) derived from phytozome v7.0 (chr-ID Gm06; pos 16800544 to 16800974)
acattgagcaatacaaggtatgatcaaagttcaattgttttgtgattcaatcaactaattagttccaacaaaaaaacaaaaaagacaaataaagggtttctttgatttattcttcccgcaactctttctcttataattaactttagttttatcttttagattcggtatgttatgtttgtttattctgaattggtggctagcgttagagcaacccaaatattatttgacgaagaaaccaaagtattgaccaaatttattaattaatccaaaattgtcttcttttttttcatcatacgtctacaaatgatttattgaataaaatgataccgagctgacaatttttttcctttatatggtggcgtgtataaggaatatataataacaatctagctaataaaccaataatttctcatcttgaaactttttgcaga

SEQ ID NO: 22241 - DNA, 1051 bp, Glycine max
  Intron number 4 from transcript Glyma07g03200.1 (locus Gly ma07g03200) derived from phytozome v7.0 (chr-ID Gm07; pos 2254817 to 2255867 reverse strand)
ccaaatttcagatcgtggactagagtgtatcagtggtattctttcttttcttgtatttgtgttgttgttatgccatcacactaaatgcatgtgcagttattaatttatttcccatatttgcacttgggtgttagtcctttggcatcttatatattttattcatcttaaaaaaaaagaataaaaatatcctaattatatatcttggttaaactgtgtctattcattagtgtggaaacgggttacatattgccttatttttaattctgtgtgataacttgttaaaagttagccttgcatactcataattacccatagttatatcttttcatagttacctttgttcttggaaaaaattcaataaggaaattcttgataaatgatttactcaataattatatttgaatatcataaacctcttgctgttgataattccccaaattggattaccaagaatccccttgtagttttctacttttctctattttttttggcaaatttatttcctattggcacacctatttctaatttgctcgatttaatattgaaaaatatgcaaatggaaatcttatactgatcatcggcatgctatgacatttaaatttgttctatttttaatgtagtattatgtattttaatatataatgttcaaagaatgaaatcttacaaagggcaattgacatgattattttccctccatagagatttcttgcaaataatggaaatgtttttaacacccacctatcagttaatccaatttgatataatgaattctgcatagtgaggttgaagtggtttttatgcatttcacgtgtaatatattatttattatttatcagtatttctgtttacctctgccatctgccttagcatttttgttacataacattttcctactttcgctcatatagtttcttccatacagtgttgatattcatgtgaaattacttatgtgtagaacctttgtccatacgatgcttttactgaaggtttacaacaactgtaataaaatattccaggtctgtcaaacttgacaagtttgagtttcagaaga

SEQ ID NO: 22242 - DNA, 496 bp, Glycine max
  Intron number 1 from transcript Glyma06g09020.2 (locus Gly ma06g09020) derived from phytozome v7.0 (chr-ID Gm06; pos 6626678 to 6627173)
tccgacgcgcgctgctcaggatttccgctggccaggtcgttaacactcttcccttaatccactcctcacgtttttcgcacgcgctgcaatgcatgttgcgagtgacgcttgatctcgctctgctaactttttttctttgagttttacttgtttatagcttttcgctgaggttctaaattcgaggtttcgtcacaatccttgatattgcaagaaattgcggataaacgcggctgcaattgatgcggtcgctgagagttcaaattcctttgatctgctattggtttatctcaatttcgcacgtgattgttactttgatctaaatataactaacacgtgtttaaataacaaaactccacgaagtgctcgttaacttgctgttaattgttgcgtgtgtgtgaattgctctaatatatgaatggatattgtgtcgttgaagtttaattgagtgtttatttttgcaggttggaagaaggattgagtctgtggtagttccgct

SEQ ID NO: 22243 - DNA, 706 bp, Glycine max
  Intron number 1 from transcript Glyma05g27470.1 (locus Gly ma05g27470) derived from phytozome v7.0 (chr-ID Gm05; pos 33388590 to 33389295)
ggcgtggtgtgtgtgctcacttttctattctcatttcattaatctatattctataccttttttttgtttatagtattaatgcaaaactttatgccacttcagatttaaattatattgttactttcatctttttcaaatattatggcatattttacgatagaggatatgatatatttaatttaactatcacgggttttggacgtactttcttaggatcaggtattatacttctaatctctcgatcttggttgtataaatgtgataaatgtgtagagaaatgttgatatggaagggatagagaagactataggtgagccgaaaaattagatacgaaatattaagattgatcttctctttatgaattaatattaagattgatcttctctttctttacaagttacgatttacgattgtaagctgtgtgattcctaatttaatcttgttgacttttaaatatgagaaagaagaaaataaagaatttaaatgaaatatcaaagtcaatatcatgaccaacaagtgtttaatattttcataaagtttataattaatgcatgtgttaactgctcaagagacacatgcacacgttaattcacattaaaaaaaagtataatgcattttttatttagccatgacatgaataccgtgtagtctcacctgatattttctggtgtttaccgtttttcagataaatcgaaatttatcaatc

SEQ ID NO: 22244 - DNA, 696 bp, Glycine max
  Intron number 1 from transcript Glyma08g02480.1 (locus Gly ma08g02480) derived from phytozome v7.0 (chr-ID Gm08; pos 1705198 to 1705893 reverse strand)
atccgcatcccctgcacctgcacctactagcgacggtattcctcttcccagatctaacacaactctttatattcttcacttccatattccagttccttgctttgaaaaaccagaatgcaaataataaaaactaaacttttatttatcattatactataaatgtaatttcaagtatcaccaagcgtggaagtcaattgtttttttttttttttggtagggtgtaaatcaattagttagtgtgttattttttcaacataatcattagtcaataattcaagttgtatccagagaattttttttaatgctcataaatcataatagtcttgttcaaattacgcaggatgttctctaattgaagtccctgtagggacaaatatgatttcatgtatatttctttaatttaatcagccttgttaagaggcttttttggaaacccataacaattctgtacttgcattatttatttatttctgatgaattgtcatatctcaaataaatttatactaagtgaatctaactcaattgataaaacagaatgaattaattgttgtaaactctgttatttgtctttgattcttactaataaaatttttaaatcaaataaatgttaatgaaataattctgccttatttaatttttacattgtttttgtgctgtgttgtaattcagggacctcccttgatcaagggatagcat

SEQ ID NO: 22245 - DNA, 672 bp, Glycine max
  Intron number 1 from transcript Glyma08g17000.1 (locus Gly ma08g17000) derived from phytozome v7.0 (chr-ID Gm08; pos 12470373 to 12471044)
gaacgctacgtcttcaagcgccgcaccggtctctgctccattctcaatttttcctttttattgattttatttttgaaagaatgatttcctttgcattgttcatagtgttttattttttacaatggaataatatgtgtgtgtaatgtaactaagttttactctgatacaccaacactatgttctagttaaattattctaaatatataattactcaaatgtagaattctggatacctcagaagcgctgtcatagtggccatgggcttgttgtaatatctatgtgtgttttacgagtggtctaaattttgaaaacttttcgagagatcagatatctcagctttttgataattgtacgaattttcaatattcaattctgaagaaatatgttttcttttccgtgtatgatcagttgtttctcagttttttttttggtaattggatgtgaactttgcatgaccatgataaaggtgttaggtgctattaagaagtgattcaaagggttcgtttaactactgattagaatttctataatggtagtctttgggtttttttttttgtaccgctgttatgaagatttcctcttgctactgaaatagagacattttggagtttttgttgaatttttgtggtttatgtttttttcaggtatttacataattaaccttggaaagac

SEQ ID NO: 22246 - DNA, 676 bp, Glycine max
  Intron number 1 from transcript Glyma08g02690.2 (locus Gly ma08g02690) derived from phytozome v7.0 (chr-ID Gm08; pos 1849655 to 1850330)
ccggagaattagcaaataacctttccttttgcaaggtttgccgcttcaaccgttttctcataaaaaataatcaagaaaaactttgtttttgattggttgcacggccctcaaaattggttgattttgtgtttttttattgtttgatttgggtttaagaactgttttttcgattttcggtgcttcggatttgtgtagtaatactatattttacggggcttattccgccttgtaaattgtggtgggccccaccgacaggtaaaagcagcaaaagtgttgcgcttcgctttattccatagtttttaaacagacggtgacaggttcgaatcatgtgtgtttcataatcatatgaagctctgccggtttcacaattaacccgacaagtacataatgtactttttgatgtgatgtgagtttaagatccaaatccaatattgtttagttgctttccatgatgtctagtttcgtttccaattagaattgtatttgtatgttttttttttctccttctcaagtccaattgatgcttctgttctgtttagttgcggactctggtttagattatttatacaagtactgcactttagctacaatcactttattgtggtgatgattaactcttcattatatttttcttgctgcagcttgacttgcgggacagagctgccctcgagaaaat

SEQ ID NO: 22247 - DNA, 478 bp, Glycine max
  Intron number 2 from transcript Glyma08g20710.1 (locus Gly ma08g20710) derived from phytozome v7.0 (chr-ID Gm08; pos 15720884 to 15721361 reverse strand)
gttctggtaattgcaatgtcatttcttattgtctttttagataggaatgggtcctcttgtgctaaattttaacatgactttttaacttataccggccaacgaaggttggtccagttgtaagaataagactcataccatcgtgaattccaattccacagcggaataagaacctcattggtgggtaattataagtacttctataagagttttttgagttttgaggccttaatgattctttgacacctaacttatctaaactttttattcacccaaaaaaaacttagcatggccaaatcatgtttaaattttgtgtctagctgataggtaaggcttatttaatatttacgaagagagagacacaaaatttgaacatgacattatgtgcattaggatccactcccctttcacattgatattcatttttttagaagcaaatatgctccttggcaggttagagatcctcacacagaaatcccac

SEQ ID NO: 22248 - DNA, 376 bp, Glycine max
  Intron number 1 from transcript Glyma08g20710.1 (locus Gly ma08g20710) derived from phytozome v7.0 (chr-ID Gm08; pos 15721918 to 15722293 reverse strand)
ccacaccttactcacctttgtttcccttcaatgtaagctccactatcacacgcacatgctatgttagtcatgtgtatgtcatatttatatgtgtgttgtgtgtgcatacagctatgctgaaaattctgcaatgctgtagttccttagtgcttttgatatttttcttcgatcagaattggagtttcaccacagtaacttatgttgatcttagtgcaaacttttattatgcagcttaccaaggtaagactaaaattttgattgaagaatatcaccaaaaatacttaaggaactacatctaagttttgtcctttcgtaaactcattccatgcattaatttttctttgttttttcagcgtttttcttgttttcagtgcat

SEQ ID NO: 22249 - DNA, 850 bp, Glycine max
  Intron number 3 from transcript Glyma08g23760.1 (locus Gly ma08g23760) derived from phytozome v7.0 (chr-ID Gm08; pos 18107319 to 18108168)
agaacgcatcgcacgacacgcttcgccgttggagagtaatcattctatcctaatttctctctattgcatttgtatttgtatgtatgcattttcacctctattccattctgcatcccgcgcttccacattgttcaacttctatcgcgcgcattccttgtcaacataatatttctcattttatttattaagtgtttataagtaattggaattttaatttaaaaataaaaatcactatcaggtggttgttgggaatgtagagacgccttcgtttgtggctgaagaaaaattagtggattggccttaaacgtggtttctaatggaaatataaactcgttgggactcatctcaaatcaaactcgttattgcaatgcgtgttttgttttaaatttaaaataagcaaaaatattccaatgaatgtgcgagttgtgactattaacagcctgcaaatgcatgcttgtaccgggcatagaaatagaagctcagacctattaaaaaatggaaagaatgaaaattctaagatgcttctgtggtgcgggctgaagggattagttctcagatattcgtattcaaaactactgattcatgtcttctttaagctgattatgaacagcaacaaactcttctcttgtttaaatgaacgtaaagtttgcatttcttgttaccgaacagtacttatggagaatccactaataggtgctagtttcaccattattttaatatatctggattcttgattgtggtttaattcagtgtaattttggcgaggtgcatttgtgtagaagtatgtctgctttttggaaggcatctaactgaagtttcacccatgtacagcaagcagcactcgtgctca

SEQ ID NO: 22250 - DNA, 705 bp, Glycine max
  Intron number 1 from transcript Glyma06g47380.1 (locus Gly ma06g47380) derived from phytozome v7.0 (chr-ID Gm06; pos 49854500 to 49855204 reverse strand)
caacgattacgagtattacgtccattacaccgagtgtaagacccttcttcgtccttcgaatcttcttcaatttggatgaattggtgaacggctagggttttggtttcaagggttgcttggttggggtatgtgttgatttagggtttgtttggatgcaatatgaattgattttttcatatggtgctttgttttgggttaatggtggataggtgaccttgaattagggttcactgtgagtctgttgttgtaagaacactgccaagaactttgattgttgtaaattattatttatgaatttactagggacgtgtggattatggtttaggttttgttacagagaaaggaatcaattgggttggggttgcgggtgttttcaccatcagggtagggcagggcagccataactgctttcgtggaaataaaagacatgaaaaaataaaatttaaatttcaggggttgtgtggttgtgtagttttttagaattttgaatctttgattttattggtaaataatttcatatttaaatgaacaagatgaaatcattgtgtttcgatatcaatgtatgtggttgatgctaagatgttagcaactatttctgttatgttgttctgtagcttctgtttactataggtaggcagggatgcttagatgctgactgcgtagttatttttttactctttatttttgcagtcaataggaggcttg

SEQ ID NO: 22251 - DNA, 786 bp, Glycine max
  Intron number 3 from transcript Glyma06g36290.1 (locus Gly ma06g36290) derived from phytozome v7.0 (chr-ID Gm06; pos 38419577 to 38420362)
tcaggtatctatccctggataaatcttctctttatgccggccacgtcagtatgcatcacaagataaatcttctctttattatttacaattgaattgatgtgaaatttaattcttttgattaaattaaattaaaggcgttaagaaatatgcatattttatatgaaggtttaaaacaatttagtgactattttaaacgtacttttaatctagttttgactgcaagactaaattaaattggatgagaactgagaattaaattgaatataaaaaataagtgcagggtttgttttttaaaataaatataaaattaatttttttaagaaaacacaatttaaaaaaatataaagacttatttcaataaataaatttaaacaaacttattgattatctttattttaaatatattatccttaggaggctatgtttaggttaaaatttactaagataaaatagtcattttgtaatttgaatgctttgttccttcaagtgcactccaaatatgaggaataaaattatggttaatcattggaatggatcatgatccatcttcttatattatgtttcattcatataattttacaaaccaaacaatgaaacaatttactcttcaattccaaacatctccgttccaccctctaccgtcaattcatatatagccaaatcagttatcagattataggaatttgtataacttataattatataaattattgatggataagaatttatataacttaccattatataaattgaagaagttaacttcatttttatcaggtgatagga

SEQ ID NO: 22252 - DNA, 552 bp, Glycine max
  Intron number 2 from transcript Glyma08g36030.1 (locus Gly ma08g36030) derived from phytozome v7.0 (chr-ID Gm08; pos 33514199 to 33514750 reverse strand)
tgtcaactgtaccttcaaccacaccatcatcagtgagaacctaaaacacactgatacttttatttgcttcacatattcgtatttcttttatactttatcgtttatgtatctgtgaagtactcaaacccataaaaaaggttatgaaaatctaatataacatatatattatagaaatataaaatcatttttgatgaaaataaaaaataaaaactcttctttttgtacaatatcttatcatccgttaattcttaattaatataagataccggtaatagaattatatagaccaataaaaataagtaagtttattgagtgtttttttttaaaaaaaatttactaatgtaataattttatccttgttaataatcattaacttattataagtgatttgaaagcattaaagtctaagagaattatgtatcactatcaataaagaacacaatacatagagtaattgtattgttgtatcagatatcaaatacatagtgtatttaatactcatattatatatatgcatgataggtgacaacaacggtggcaagttggtgctct

SEQ ID NO: 22253 - DNA, 620 bp, Glycine max
  Intron number 1 from transcript Glyma07g34610.1 (locus Gly ma07g34610) derived from phytozome v7.0 (chr-ID Gm07; pos 39649765 to 39650384)
tctgacccctctgccactgactccgacaacaacaggtgcgtttcttcaactttttttaaaaggaaaacctagttttttttaatgggtttttatcgatttcaactgggcatttggttttttcaaatgggtcgccatcgatttcaatcgggtatttggttatttcaaatgggtcgtcatcgatttcaactgggtatttgtttttttgaaacggctcttctttgttttcaactgagtatttggttttctcgaatgggtattctttgtcttcaactcggtatttgcttttttgaaatgggttttttttttatcgatttcaatcgggtattaggttttttgaaatgggtcgtcatcgatttcaattgcgtatttggttatttcaaatgggtcttcatgatttcaactgggttttttgccttctcgaatgggtattcttagttttcaactgggtatttggctttttgaaatgggtcttcttcgttttgaattgggtatttgtttttttttcttctaatgggtgttctttgttttcaattgggtatttggttttttcttatgggtgttcttggttttcaactgtgtactcagggggattatcattgtgaagttgcggcgcggacaag

SEQ ID NO: 22254 - DNA, 567 bp, Glycine max
  Intron number 2 from transcript Glyma07g01330.2 (locus Gly ma07g01330) derived from phytozome v7.0 (chr-ID Gm07; pos 840670 to 841236)
gcagcgttgcacgccttgaatgtgagtaccgttagagttaggaatttagtcattgataactcaattttatgattttgatttttgttccttagaattatcattttggactaagggtctgtttgcacacacttctcaataggcacttgagaagaaaataagaagctaaaatgaatttaagtttctcctaacataaaattaacttacgtataagttaatttctacaaactctcatttagcttttccaaaaattgattttaacttccgcgtgagctaattttagctcatgagagaagtttaagtcgttttatcttcttattttcttctcctaaaagtgtatattgagaaatttatccaaatgaaagtgaaaattgcactggccttgcgcagatactaaaaaaaaaatctagagttagtgggctttatgatagagtgtcaaaagaaattgttgatcatattttactgacaagatgtttgcagtttatagaaattggtcttctatctaattccttttttcatttttgatcattatcagggtgtgaaatttgatcctcaaactggatctgtttt

SEQ ID NO: 22255 - DNA, 375 bp, Glycine max
  Intron number 1 from transcript Glyma08g30150.1 (locus Gly ma08g30150) derived from phytozome v7.0 (chr-ID Gm08; pos 25157934 to 25158308 reverse strand)
tctatttgatcaaagacccacatcttatcaaacaggtttatttattttctttttggttgctcattttctgttttcccctgtctttgtttctcattcatcataatcccgtttttttttcctaccaaaacatggtactttatatccaccggctttactgacttacccccgtccggaactaactgaccacctttaatgagattcttcccttccaatcaggtttttttcatcacaaggctggaaccgagatagtccaataccacttggaataatcccgtgtcttgttttgcatgtatgggtgatgatgaatatttattggatttgatttgtttgtttgttttaggttcacttggaatacttggaggctggtgctgatat

SEQ ID NO: 22256 - DNA, 762 bp, Glycine max
  Intron number 1 from transcript Glyma05g22380.1 (locus Gly ma05g22380) derived from phytozome v7.0 (chr-ID Gm05; pos 27484632 to 27485393 reverse strand)
taaaattttatctccataaggtaagattcaatctgacgttgaggtgatatggtaatctgacacatatgaactgctaatttttcttgtgtattagggctttcttgatccctttcttagaaagaaaagtctgtaaatcaatcctgccattataaagttcagattatggatatgaaggatagccatcttcatatgccaaagtcaatactctaattaaaagggggaatgtggagtcaaacaatgttctaaattagtgtaatccgttctttcctcttttaaaacatgaaaattttgattcttaatgacaaagactagttcaggtagcctggtagggtcagagtatgtatgtcagtatgtgctcttaaccattcaggtgacaaggttggttaaattttttacattttacaaattgttctggtagctggacacttggatagcgaataacagtccgtgaagaacagttaattggatttcataacagctttacctactttttacaacccggaaataataggtgattggtttgtgtaaatacatccatgcttgcatgttatctgttttagagtttagagaaagaatgtttttttcaaaaggcctgtaaggaagttggcaaacaaaagaaaagtgattatttcctcaaaataatctcatccaaacaagctagtctgattgtggactttataatcttctctacttttgatcatgaccttaagctgctttatatatgcagtttcctcttttgtcaagaagcacgtgcttccaaaa

SEQ ID NO: 22257 - DNA, 734 bp, Glycine max
  Intron number 4 from transcript Glyma07g23500.1 (locus Gly ma07g23500) derived from phytozome v7.0 (chr-ID Gm07; pos 25545197 to 25545930 reverse strand)
tcctatatttcaggttctttttcttaaattaatgaaataatttctgcctattgaatgttttagactgaggtttaatacagagaggatgaagactcttgaataaaactcttttaatttactttcaagagatctgtacctctagaaacacagtaagtcatgtatagaaagcccaattcttcttggcaaattccctgagcataagtttcattgttgttaaaccataaatccaagtcatatcatcatccatgattaatataactgggagtgctattacaaaactcttctgaacattttattattggcttatcccatgtgtatcccactaaataaggttgatctactctatactaggggggctgtgagcatggatttccttaataatagtatttggaagtgtcaaagaatgttttgctacttgctagcatttccattaatataattaacaaaaatgtttggactttatttttcatcatgatgtatgtagtagatcctggacttatataaaggatattgagcttgtaaggaggcttgttgtatgacttggctagcttattatgcactactattctagtaaatagcattatgggggcttcattcacaatcactaattttttattcttttctataaagtatttgaaattgttgcatttcagcttatctagttactttgaatataacatggcttgtgaaatttttcagtgataagggaacagtatactcagctcgtgcctaca

SEQ ID NO: 22258 - DNA, 784 bp, Glycine max
  Intron number 1 from transcript Glyma08g13160.1 (locus Gly ma08g13160) derived from phytozome v7.0 (chr-ID Gm08; pos 9597875 to 9598658)
ttggggataaagtaattgccaccaggtctgctattggtggttttgtttttatctctctttcagcaagtttctttatttggagagttagatagaagatttatagatgtggtataactttgagattagtggttggctagcatatcatgctcaagagagtttactggaggtcttgtacacttatttattcttggttggtttatggttgtggattttgatgagtttaacttttatacaccgttagtgtaaaactttttacaatgttactaatcagaaatcatgctaagtatgaattttatgataaaagtcaacaaacttattatatatgtcagtttgtgattgtatgatccttttcaatgtgactttattagtaacaacaacaacaaaagtctaatcccattaggtgagtgatccatgattggatgacccttttcaatattttttacattggcttccaagggcctaacgcaaccttcttccttttcttggtcttgggacttgttatgaaaccattggcgttgtttcagtataactttggtccttaaaaataatttagacatgtcatagaattaaggtttctgaatggtcaataaattatcctatgtatattatattggggtggggggttggttgtctttctatatgtatgaaatgaacttcaaaatccttttgagaagtaaacttgtatactttatgtttgattcataatgtccgagtggttgagatatgaccaatatctttaatatctgcagcgcagtttttgggaccgaaatttggccagctgctg

SEQ ID NO: 22259 - DNA, 1046 bp, Glycine max
  Intron number 2 from transcript Glyma07g30990.2 (locus Gly ma07g30990) derived from phytozome v7.0 (chr-ID Gm07; pos 35963038 to 35964083 reverse strand)
tttgctcgtcactggagcctattctacgcagagttgtaagaaaattcagttcattgtggtattaattctaatatgttaatctgataattttgtgaaatttttagttgatttattggtcaatagtacctgaagttatcacttacatattctattgctcacctaatcagccacataaactacaacctctggctaaaatttactgtacttcaagcttgtagtccttgacttgatctgaggcttaaatagaatagggtaggaaattagtgatctcggattcaaaactgtagaagtttatgcatttcttttcttttttctcatttacccaactatgaaaggaaatgtcctctcacatcctaaaaacagctttctgtgcttgtgggggtaaggctgcttatacccatcccaagcctcattaggtgggagccttatgcactaggtcacccattttactcatccatcagaggctttctggaataagttgtcctgcagtgtaggtttgagtgttatcaaatataatataatgaaaaatagctttataaataaattgaatgcatgctacttttacatgaataatgtttgatcaaggacatgtcttatttcttatttttattcttgctgctcaacaggttagtgaagaagttgagcgtgctttggcaaaactaggccctgccaagcttaatactggcaggtgtttttttgttccctcttgttaaagaaaatgtttatttcagatgaatgtgcatcacactttattctcctgctcttttgctgctaatggtttcatagcaattagcaagattatatcctgctataagcctataacttgctttgctagagtttggaatgatgaattagacagatgatctatgttaatggagatactgttacattttaaagtctaaaatttagtgacccatatctattctgtgcttagtgttaggttcagctgatattatttatcgccatgagtttataatatctataattggtctctctaatactcaatgtaaaatttaggtcttccccaaagcggatagaaggccccg

SEQ ID NO: 22260 - DNA, 464 bp, Glycine max
  Intron number 1 from transcript Glyma08g08180.2 (locus Gly ma08g08180) derived from phytozome v7.0 (chr-ID Gm08; pos 5841058 to 5841521)
ttcttctctcggttctacacttctcaacttcagaggtacttcctttattctctatatttctttaagctttcttacaagatgttcctgcaccttttgttttaattgttttattcaagtggtgatgaagttctaagaaacccgacaagtttttaaggttgtttgagcatatgggtatctatgttagagatcaaggtttaaattttatttgagttttgctagtttttgaatttgaaggtgatgagggtcatgttattgaaagttgggatcttttgtgatttgggtttcttcgatttcagtattgggatttggttgatctgtttactcagattgatgttttgatagtcgtaaggttttcaattgggtgggtatggggtgttaattaatttatgttggactgttgagggtgttttaaattccttggattcagttacttaaaggaagcaaaactgaaacagggaaattca

SEQ ID NO: 22261 - DNA, 812 bp, Glycine max
  Intron number 1 from transcript Glyma05g34320.1 (locus Gly ma05g34320) derived from phytozome v7.0 (chr-ID Gm05; pos 38701211 to 38702022 reverse strand)
ttctggccagagatctccactagtctcccaaagatgtgcgcattctccttatccctttcgatctctgtgtttttgcctctttggatttgggttttgcgtgtggttttatatttctttgttcagatgaaagtaacatggtttcaattgctgtgcccttttagtttatctgagtatgttagctaagaatgatgaaaaaagaactatttaattgcagttattgggttgtatttttttttttaattacggtttagtagttaaattttatttgctgggggtccgttgagttcgtgtagtaacccactttccgcatatacatttagtgataaaaatttcacgattcaatgtgatgtggtcttgaaagcatgacttctcaattaagggaaatagttttaaatgaatattctttgtacaacatatcacttcccaaatcactcagactttgttattgacgcttgtgatccttattttgcttcatgctctgattttgcccctcgtttatttgcttaacttaatctttgatgggaatgtcgaggattgaacctgtgtgttttgatttatgtgttaaacagagagtttgcacgaggtttcaacctttgttttgaaagcatggcttctcaatctagggaattagttttagctaaatcttctttgtgctgcaatttgtagactttgttattgacgcttttggtcttatagttggcttgatgatcttatgtttggctggggtggttgtttggtgaattaaatctttggtgtgtgctgaggattgaacctgtgtgttttgatatatgtgttgaacagagagagtttgc

SEQ ID NO: 22262 - DNA, 379 bp, Glycine max
  Intron number 6 from transcript Glyma07g39620.2 (locus Gly ma07g39620) derived from phytozome v7.0 (chr-ID Gm07; pos 44041069 to 44041447)
aggtgagaatctttccttttgcatgactgggtgacccccaaactattccaaattccctgacgttttaattatttttggttaccatgcaaattcagattgtttgtgaaagcggtcaattgatttattctcttcttttatcaacattattttcagtgaccttgagtatttgtaatggtttgttgaggactacatacagacattgaagtaattaatttaggactatgacagtctataatttaattttctattagcaatattggtatgaagacgtggattgttttgatttattttcctcccttgcttatcttagtatgcaaactgaaattttagattgccatgtgtagcttttcactggaattcgtgggaaaggtgcttttct

SEQ ID NO: 22263 - DNA, 787 bp, Glycine max
  Intron number 1 from transcript Glyma07g38800.1 (locus Gly ma07g38800) derived from phytozome v7.0 (chr-ID Gm07; pos 43468766 to 43469552 reverse strand)
accctgccaccgtatgatccaccgcaactttttttttcctcactcattacatcaaattgttctattgtcactttgtgcatctgggtttgtccgaaagttacaaacttgcatgaatgatcccgttccctgggcttattggttctgcatttttttaattttcatcagatggaactgagtcataggtttgcttcgtgcgatttttttttggggggttttaaacatgatctggttttaggtttgtgtgtctgatgggttactaatctgtaggtttaaaagattggtatggttgggaatttcatatatatttactttacttaacattttatatagtgggtcctttttctttaataaaatgtgtgtttttattttattttactcttttgagattcatatgtgatatgtggatctgttttgccatgccatggtgcttattaacccagcataaggaatgataaatgttgaagaaacaagaaatgaatttacaaacaatgtgcatatttgcagtgtgttattttatctcattcttgcaccaattagtttaacttcctgatctagttgggagtttgaggattaagtttgttgtttaaacctgtgattgagtgtttaacctttttaaatctaggagatgccttttgttttcatgtgttgaacttcgtaagcactcatcccatgtctaagtctgtagaatgccaaaaggaagtttttgtagtctttaggtagtagtataaacatctgaagataaacattgacatgtttctttttcaactccagattaccagttgcaaac

SEQ ID NO: 22264 - DNA, 641 bp, Glycine max
  Intron number 1 from transcript Glyma06g38540.1 (locus Gly ma06g38540) derived from phytozome v7.0 (chr-ID Gm06; pos 41500028 to 41500668)
ggttggtacaatcctcatctttaattttttgtctggtgagtgtttttattatattttttaagagtttaatctgtgctattatcaaaagttgttggtgtagtggttgatacttgaaccttttaatcaaggtccaagattccattcttgtttggaaaataaaattgtaattaagaaatatcactgacttgaaaatagatggagcctatatagaaagaagattagttaagtattaaataaaagtcttaaatacttatgggttacaacaaaagaatctaccattcaatataattttttatattgttaattagtcaatcaaattataggcaatataattttcaaaataattattataaaaaacaataaatttatagtacataaaaattcatgattttccattaaaaaaataattcatgatttataattagatattaatataaaaatactttacatgttcataacataaactattcaatctatttacaattatattaatttttgttatatatatatatatatatatatatctatatatatatatatatatatatatatatatatatatatatatatcatatacaagcttcttgttttgtttaataatctaatcattcttttcttactttttgggaaattaatcttag

SEQ ID NO: 22265 - DNA, 679 bp, Glycine max
  Intron number 1 from transcript Glyma08g36270.1 (locus Gly ma08g36270) derived from phytozome v7.0 (chr-ID Gm08; pos 34052738 to 34053416)
aagaaggtattgaagactggcaccggaaaaaacaggtgctatattttctgcttacctatttgtcctgttttgagtttcttcttataataatgccatttttcttaacctttttgcccttgtgtttagtttcttggtaatatttggaagggatggaatgcacttactaagttgtttgttcgtacaatttctagtttttgctaaaggatttgaatcctctaaatttatagtttaaattggaagtgataataagttaataacctccataaaatatttgaggaggtctgttcaaaccaacccaggtgctttcttgtgatatatcaactctaaagtgttatttttaatcaacggttccaacattgaactgtattctctgatgtgtttgcatatttgcaaaataatatctcccactaagtgctataacaatgtttatctctatcaatttccttttattccccctaaaatgtatttcctttctactctaatatttgcttggaattaaaataatagaccaaagttctaaagcaacaatagtttagtgctgtatatatgataaccaaagaggaggaaagggaagataaaggttggtttttgtgacaagttatgacgtcagtgtatataatttttcaagttgaatacttctgcaggatattgaggtgaacaatagaagagttaaagtgca

SEQ ID NO: 22266 - DNA, 248 bp, Glycine max
  Intron number 3 from transcript Glyma06g08650.1 (locus Gly ma06g08650) derived from phytozome v7.0 (chr-ID Gm06; pos 6318933 to 6319180)
gagaaattcagctacactcaaggtctccgaaggttagtttactaagctcaggttctttttgttttttggtgattgagagatgaattcgtcataaatgaacttatttgctgtttagttgtcactcaaatgtttatttttgtatgttcataggttaaatgaagaatgattaattatatcctgggtttttccttcttttttatttgtatgtttcagggaaaaaagttggcaggaaaactgaacttccaaag

SEQ ID NO: 22267 - DNA, 372 bp, Glycine max; identical to SEQ ID NO: 21933
  Intron number 1 from transcript Glyma06g13100.3 (locus Gly ma06g13100) derived from phytozome v7.0 (chr-ID Gm06; pos 10236054 to 10236425)

SEQ ID NO: 22268 - DNA, 534 bp, Glycine max
  Intron number 1 from transcript Glyma06g43050.1 (locus Gly ma06g43050) derived from phytozome v7.0 (chr-ID Gm06; pos 46403230 to 46403763)
atattagagaaacggttagtttcatgccttcaccacaccactcttttctttgttttttgttgttatgtttaggtttgtggggttatgaaaaagatcatttttttttttgcttagtagtgatggatttctgatgcccccacttggaattttatggaatggtaaaatgtaaagatggtagctttggctaactttgatggattcctgaaacccctcttttggtatttgttaaatggtaacgtttttggtattggaacattgtcatttggtggaaagagggtcaaaatttgtctggggtatgtatgcactctggaatgggtgttttgaattatttttttatgggcttatgggtcctgaattgtttgttctgcgtttcttatcattttgatcattcgaattttgagttaaaagttcaatatttggtgaaatactgtttcatgatttagtagatcaaatcaattctccctctttattgcacaatggattgtgtggcttattagttttggtaatttgatgttgactaggttcaagactgtt

SEQ ID NO: 22269 - DNA, 986 bp, Glycine max
  Intron number 2 from transcript Glyma05g08220.1 (locus Gly ma05g08220) derived from phytozome v7.0 (chr-ID Gm05; pos 8180940 to 8181925)
ttgtcgaatttgcctcgaaagcgattccgacccaggtgaaaattcccgcaaaagatttcaaatttgcgccgaattttttcattttcgggtggaattattaaattgcgaaatatgggcatttccctgtaaaattatataaagacttaataaggtagtggttttggagagtgcaattagagtccttaaaatatgaaccagtgtatctttgtcagcatcgaaattagtcacattgtgatcagatactgttgttttggtcttcactccctcccccttgtgaatcttatttgaagaattgtagtgtcttaaattggtccttgtagtgcttttgttccttcctaacaatagaaagccaatgttgtgccactccaaattcccattttatttttcctgctgtcaaactagatgattgtattttgatattgtttgttcaacacaccttggctgacaatggaagctgagattggaaaatttagttcttctaagggtgtatttttataacgtgattcttgaaatcattaacatttgaattgtttttggttaatgaaagggaacatttggtgttaaaataaactgtgctaaggaaagcaggaaaccattgtcatttatttaaaattttctgtttaatgcatgcatggcgcagcacttacctcccattcccatatgctttattttttcaacatcttgttgattaaacttaattgacaactcaacattttatatgttgaagtttctcattttcagcactaaatcaataatgtgattagaagaagccagatgatcttattcgttgggcaaaaagttggtaaaagataaactgatgatcaagatttttataattgaaacttgggcatttcctgtacccatgatacttaacccattaactcatcagataaatgctacatgatgttagcaaacaacaatatggatgttattctttgggttgtcgtagtcttcataaagctaattgttgtttgattttgtagagg

SEQ ID NO: 22270 - DNA, 497 bp, Glycine max
  Intron number 2 from transcript Glyma07g11490.1 (locus Gly ma07g11490) derived from phytozome v7.0 (chr-ID Gm07; pos 9670080 to 9670576)
caatacacattcaaataacatttcaaggatttctggtaattttccataacaattttggcttaatggattaacattagctaaagtggaattttttatcatgaaaaaaaacatatgtgaactaaatttgttacctaattactttgtatatttttcttttgattcaatatgagcgtagggcagtgtttatgcaatgccatttagttcttttcccgccccctcattttacttcaagagtctatcttaatatctgaaaatactttttggtattgaagaatcaggtattgtagtggttaaccaaagtgatttactagtatctatgtctaggatattatgtttctagaatttaattggtttttctttaatatgcacttcatgtatttgttttgagacttgtaataattattttcaggagtttcactgccaataactttgaccaagtgaaagttgtgttttatgtatcaggccagaagagcactacaagctttgaaaggagtggt

SEQ ID NO: 22271 - DNA, 281 bp, Glycine max
  Intron number 1 from transcript Glyma07g36330.1 (locus Gly ma07g36330) derived from phytozome v7.0 (chr-ID Gm07; pos 41683202 to 41683482)
ttttgactgctttgtcattcttaataacagtagaggtgaccattttcttctcaaaatctttcatttcaatgcacttcataaattgaccttctgagttcttgcctgaatgcttgtgtggcctcacttttctgttttgaatttatcctggcaatgcactaaaaaactggctgcttataatacctgaaaacatagtctcaaattgaagaggcaagagtggtgttatctggtaaattttgttaccaatttagattgattgatttcacattattcctcagtgcaat

SEQ ID NO: 22272 - DNA, 878 bp, Glycine max
  Intron number 2 from transcript Glyma08g22220.1 (locus Gly ma08g22220) derived from phytozome v7.0 (chr-ID Gm08; pos 16926222 to 16927099)
catttttcctaactgtgagtaaagtaatcgatcatcttattcttaccctttatatttatatatacgatataaattaaaaagaaaagtgccttcattatatactatatccattctctaccttgaagaatgaaagaatggatgtagattaaaggagaaagttaggacataagttatactttatataaaaatttcttctcttacaaatcaatcaaactcaagtaaatagttagaatttaccacaaacttgggtaaatagtagaagaataatctatttaatgaaatagtttattcgattttttatatatgtaaatttttctaaaccaacaacaatcgtgtactgctaacgagatttactgaatgagttaaaaaacattcttcatctttgactaaaaaaaatagttagaatttacatttgagttttgaaaagaggtttttgaaactttatttatttaaacaggataaatttgaaatttgagtttaatttgatcaatcaatatataaaacatgattttttttgtgtgtttggtttcataaaacgattgtttcttgtttcttgttggttgaactggcctctgaataactttttttattaatttagtatctaaaatacacttatatgctagaagtggagtaacataatattaaaacacaattttatattcataataaaaatgatttaagatacacgggtgattttctttaaatgaaggatttgaattcaaagtgttgtgtatgaaagccttgttgaaacttgaaagactagttaacttctaccaatgtaatttatgtaacgaaattaaaaagtttccattgattcaaacaaaaagatggtgaactttggatgaaaggtgcaggtactgttaatttaaattgtggta

SEQ ID NO: 22273 - DNA, 536 bp, Glycine max
  Intron number 1 from transcript Glyma05g30760.1 (locus Gly ma05g30760) derived from phytozome v7.0 (chr-ID Gm05; pos 36037008 to 36037543 reverse strand)
atttcgctgaaaagcgcgaattctttggtaattccttacgaaaactacttgtcagcctttcattttcagtaaagtagccttaaaaatgtaaacttggttatgtagaggagtttatgtcaactgagctgatgagggtcttccatttccattcagtttgttgccaaattttgaaaagtaaaaacaaacaaaaggattttttttttccgaatttaattagaatacattacactgagtgaacaaacttataaggatttctaataataaacagtcgtataatgtaatattgttaaatttaaaaggagttcaatttctatataaattaatgtaagtatgaatataattattggaaaaacgaacaaacttatcatataatataatgttgtttgtatttgtgattagttgccagtttcaaaaatgtttcacgtgaaaatcttttacgacatcagtgtaaattcacaatgtaaaaatctttgcgataatagaatattaaaactattatttgtttcctcttttttattgttcttcaggccttccta

SEQ ID NO: 22274 - DNA, 729 bp, Glycine max
  Intron number 1 from transcript Glyma08g29090.1 (locus Gly ma08g29090) derived from phytozome v7.0 (chr-ID Gm08; pos 23488773 to 23489501 reverse strand)
cgccttcttcggacacgtcggcagcaagacctcttgtgagtagtagtactctccatcgataatttgttgatttagttttctgaacttcgttttgagattgcgcgcgtgtgtgagaatctgtttaggttgagctagcggttttgagattgtgagatctgtgtgtgttgtgatgtttgagattttgaatgatttggattttgttcttgtgttgcctaatttgattgctatgctgtaaaccttggtttgtttggaactggtgtcggtgcggtcgatttttcatgcgttcacatagtcgtcatcacatttctaagtggctgttggatgacgattggacgactcgggttttgaatgtgtgttttaagtctgatttatcaaaataaaactcgagctgttcgatcttcatatgacagttatgagttgttgaatgtgtgaatgtgaatgcatggaaaattggatgcagggaattcggatcagaggttggtttggcatgaattgtcttaagatgttttgatttgtgattgacatggtgtctgtctgcctgatgtgtttaaccgcattttgtgaagttgaaagatgttttgtgagagttgatttgtcggagacatctgatttggattaattgtttatgttgtgggaatgttaggtgtagtgcagtggttgatttagttttgctttaatttggacaactgtgtggtgttattgttcttataatgttggtgccaggtggtt

SEQ ID NO: 22275 - DNA, 634 bp, Glycine max
  Intron number 2 from transcript Glyma07g31840.1 (locus Gly ma07g31840) derived from phytozome v7.0 (chr-ID Gm07; pos 36807687 to 36808320)
acgacctgaagctgtaatcatttcactctctcttcaattttcatttgtatcactcttctgatcgcgtgtcttgtgttgtgcttagaagaaaaatcgttactttaaagcggggatgctcagaaacgaagatttacttcaatgttgttttgtgctctgtgtttgggactcctattgattacgatttcgaatttgcaaaagggattttgagtttaattgttgctttcttatggttggctttttttcctattaaaatttgttagctttatgtagtgcaagcatgttatctgcttctccatagatttgaggaaatgcatgcataatgaacattttgtctttgttgacttgatattcgtgggaatttgaatttcactattactctgtgtagttactatgggaagtttgtttctttgttagtttcttatgggggatttttaagtgacttgttagtctgttatggtttttttatcggtaaatgctagttgttagtattgttagtttttttagcggggaaatttgaacccgcgatctctccccccttcccttctcccttcaccactggaccaacctctgttattgtattcttatgctatatattgcagtcgagcattttgggacaagaggatctcccaggagg

SEQ ID NO: 22276 - DNA, 760 bp, Glycine max
  Intron number 1 from transcript Glyma07g32020.3 (locus Gly ma07g32020) derived from phytozome v7.0 (chr-ID Gm07; pos 36958036 to 36958795)
cgcagagaaagaaaaccctagctcaccgtttcaaggtatccttcgctcctcttctccttctgattaagattcgattattagggtttgtgttagtttttcaccgatcgtcgtatctgtgagtgtgaagcctttgattttgatttggggattttcgtgtctgctaattttttgttgaatctactcgtcgtacatcattgattttaccctcttgataatcatacatgctgagatatttttgaaactttttcttgtataattggctagattgtttctatttaattatgttgattgaaagcaatctcgagatctgttgtaaatatgattaatttgtcaaaccgttgggcacgtattgttgtgtattgtataatttgtaaaatcttttgttatataaattagtcagaggctgtttttctcgtcttattttgatatcgatgtgatttatttaatcattggaattgtgttatcaaggttgtctattttcttttgttttgtttgcttttttgtatgggctttgatttctatacaactatacatgtaatttttgtatgtgactgtttcctcagtatgttgattgtttgagaagactaagactttgatgaacacgttttttaatttgtgttgctgtgaatagaattgattttatgtgctagtattgcttttagtcctttgttttgtgacgtctttcctttctctatattcattcactttagttttcataatgaagaattggtgattaattttatcgtatcttgttttatag

SEQ ID NO: 22277 - DNA, 881 bp, Glycine max
  Intron number 2 from transcript Glyma07g07250.1 (locus Gly ma07g07250) derived from phytozome v7.0 (chr-ID Gm07; pos 5962664 to 5963544)
accaaggttgctgttaagaaccttttgaataacaagtacgtttctataaaaattcaattttttttttatgcttcggtttcatgtagtaattttaattcaactttaagtgaggtggctacatggatcacgcatcacaagatgttgttggactcggttaaagattaaatttttagacaaaatgataattgagtttgttttatttatttattttggggattaattggggtggctgaagaataaatgaagcttctgtgatcgggggtgtctacgtgaattgttttctttttcttttttaatttgattgtctatgtggttctttggtattttgaatctggcattggaaaaagggaaatgatttattttattttatttttttggttttggggttttgcaaaacaaaatggtaaaaaaattgctgggattgagctaagtgaatggttgtgttagtttttggaatgcggctttgcgtgccttaagtaaaatgatgtttatggtgaacagtgcaaaaaattgtgtttttcttctgttttactcttgctgctactgttttgtacttttttaacctgatttcttttttgagtgtgttatccttgtcttctgatgctgggtgttgtgttgtaaaaagtcacttacttatgtgaaggaaagaatcgttttcctttttggctccttgtttttcactactgagctgataatgtggttgtcactttcagtagtttttgtactgtcatatgttgttgggtttttccattactttctttctttgattacttactgttgctgtatagtgagaatgatgtgatcttgtgattgtctttctctgcttaatatttaactcattttcaggggccaagctgagagagaatttaaagttgaggtag

SEQ ID NO: 22278 - DNA, 689 bp, Glycine max
  Intron number 1 from transcript Glyma06g20870.1 (locus Gly ma06g20870) derived from phytozome v7.0 (chr-ID Gm06; pos 17268218 to 17268906)
ttaacaaggtatccccaataaccccttttcttttttcttccgtttttttgatagcaactagcaaggtgcatttttgtcatttgagtgccaaacatgatattaattgaattgcccttatctaacgtggactgattgatatttgattttctatgattgtgatttcataaaccccctatctcatgtgggttgattggtatttgattttctatgattatgatttcatattaaaagtatataactttggtgccttcttgttgtgagcagaacaattgttgccatcttaggtgcaatttatctacatattatatcaaatatcaatttatgtagtttccttgcaaaagttttcataactacattagaattagttgcttcaattcgtgggtttttgaatcactttccattgccaccagtgttttgaatcactttccattgccaccatagtgttttattgataacacactttcactgaatatttgcatgtccctattgaagtattaaactgtatgaaaaaattcattgccaaaatttttactaaatgtttaaattggtatttgacatggttctgtgttagtatgctgttctcatatctctgtaatctgtgattctgttttgatgttgcaatagctgcaactagaatttacttgttactgtgaaatgtgaatcaatattaagttgttttgtgtggcagt

SEQ ID NO: 22279 - DNA, 570 bp, Glycine max
  Intron number 1 from transcript Glyma06g43880.1 (locus Gly ma06g43880) derived from phytozome v7.0 (chr-ID Gm06; pos 46884886 to 46885455)
gaacccccagaagggtatcttaccaaataccgatactttaatttactttgcgtatccatatatccatatccgatatgtatgtgataccaatactcttgaatatttcacagatatgtgaagtatctggcctttaaatatatatatatatttttttatgaaaattcaatgtagctacatgaaacatagcaacattatcctttgatgaaccaaaaatgaaaattttcgtctttatatatgaatgatttcaagaaagaagtgagatccttgtaagtaataggaaataatttatgatgatagtaatttagtattgcaagaagtatgattttaatttagatttgtagaattgtaatcgtatatttattatgttggataaaatatgtcaacagtctttacacttcagtgaaacttgatgattcaaactttaatttttgatcaatttgattgaagttaaattacgaagactagtaccaaattttatcgcatcctatatatacttttagactgatcatatatatcgtgtctatgcatctcataggtaccctgactcatcaatcaagctccaaactcacg

SEQ ID NO: 22280 - DNA, 974 bp, Glycine max
  Intron number 1 from transcript Glyma06g16450.1 (locus Gly ma06g16450) derived from phytozome v7.0 (chr-ID Gm06; pos 12915244 to 12916217 reverse strand)
tttacccagttgggtacgtgtaaaaggaccttcctttctcttaatctttctttttgttcttcagttaaattcactttatgcttttctttctccactctcgttttgttcatcccttttcctgcttgggccctctttaaattttaagtcccacgtaaattagagaggtaaaattaagataaaatatataaataaaagataatcctcatcttttaatctaattttttatgttaagttaaacctaaatttacattttaaaattttaagataatattttttattctaggaaagaacactaataatcatgatccactgtattggataactaacttggcttaacatcttaagcatataaccaacttccttaattatttggtcaaatatttgattttcaacttcttaaaccaatgtcaaatgtatatgtatatatgaaaaaatatctcatgatgggttaaaaaacaataaactagaataaataaaaacaccttcatggattttcttcccatttttattttattttttctttggtcctgattgcctctggtcagggaatacattatacatgccttcatggaatcagttatcaaaattgtttgatgaagatcaaataattcattcattattttggtaaattcgacttaaatataaactattaattttcatccaaaggttgaaactcataaaagtctcaattagtaaataaatttttttgattctgggttaaagagcacaagtgcctcccaattactaaatcacagtctaatccaaatctcacttctgatatattagtttaacttttttcacacgatgaaaatcaaatattatttaatttgagttaaattaataaatacatttatgtccattcatgtatgatatgtaggcaattttttttttttttaacttgacacatcttgaaatatatatatatacgcctctaacataagtcaccattactttcaacgttcacaggttttata

SEQ ID NO: 22281 - DNA, 792 bp, Glycine max
  Intron number 1 from transcript Glyma05g25900.1 (locus Gly ma05g25900) derived from phytozome v7.0 (chr-ID Gm05; pos 31963171 to 31963962)
tctgcttcttctgcctctgcatcttcttcgtccgagtacccgtttctcttcactttctctttctttctcaatctccattccttactctgttctgtttcattttctctgtgctcccctatggaacccagaaaaggaatggtcaaataacagaataaagttttgattttttgtatatttttcaaaaattttgctatgaccatctgatttctctcatttgggtcaatgtgtttttcataagtttagttacttgaatttttattgtcactatactttggatgaattttgctccctttgctattcaaagtgtagttattaagggggtaaattcctttgaagaaagagacaattgttattctgtcgtcgttttttctgttttgcattttttaagtgtttgtattgtttcaaatgctgggaaactgaagttggtcgtttgagaatactctttatttcttttgatcgagttttgcatcccctgagagattggaattcaacatttaattgttcaagagttgaggaaagaaagggtaaatagatgataaaagttgggtgggattctgctttgatatttatgttatggattcagactttataccagaaactgaatacaatgatggcattttgaagttttaatgggtttataggtttactcttctggcttcaggtgttttatttttgagaagggcctgctggattgataattacagataaatatgttattctgaaatagtttccgtaactaaatgctatgttacaacggatttttcagcaaactagtgctgaggattaaatcaa

SEQ ID NO: 22282 - DNA, 858 bp, Glycine max
  Intron number 2 from transcript Glyma06g06760.1 (locus Gly ma06g06760) derived from phytozome v7.0 (chr-ID Gm06; pos 4842000 to 4842857)
aatccctcgttgggtcaaccggcttgctcgacttggtaagggaatagatggatcatagtattctcgtcgttaattaacttttttttgtcttttatagtttgttttcgttggtttttcgcctgtcaccactggaaactccaatggttatcaattttgtggctatcattttgttgaatgctgtgtttggaattatctgtttcttctgatacctgttgcttgctaggttctaaattaattaggcttcacattttttttttttaattttcaactttgttagatttaataaagcttgtaattatattttcttaaggacaaaaagacaaaacttagacgccgttctatacgtgcttatgatgtttttcatttagaattgaagtttcacttcgaaaacttgtttaattagactttacatgtttttcttttttcttttttcttttttgactttgttgatataataataaaagcttgtaatgatatttttttaaggacaaaacttcttatgcagttctatatgtgcttttagcgttgttttctaattataaatggagtttcaccttggtggtttgtgtaatagaggttttcatctactgatataccctttgcacaaagtgacaagaggaatgctcttgaagcatctactgatatatttaaattttgattaggcaacaattttctttccacatttaatatgtacctgttatgtaaactgatgttcctaacttcctatggtgcaccttgcaaacaagatttttgggccctcccagtccaaattaactattaaatattcctcctaactctttaagttgtgtccctttacatgaaggtcttctgtgcaactgtgttctcccacctggccta

SEQ ID NO: 22283 - DNA, 804 bp, Glycine max
  Intron number 1 from transcript Glyma06g05000.1 (locus Gly ma06g05000) derived from phytozome v7.0 (chr-ID Gm06; pos 3535677 to 3536480)
gacgtaagtacttatttttcttcattcgagtacaaatttccttcattatctgatgaacttgatgcccttttaatatcatatttttccacttgaggtgccttttttagttttgaaaaattcttgtattgtaagagtgtgaattaaattaatgttacttcttctattttatatatgttgtccatatttgagcttatttttgtttattttttctactggccataatagtcttctttctaacaagtcctattaagatatcctacaagataacgtatttttatcacacagcagaattaaccacaggtgggagaaataaaagagtagtaggtacttatgtttaagagctttcttctattgttgtgaacagtgttcaataacaaataatgaaaagatctacttttctgaacttctaatttcatttgtgtttacctgacaacaatattttgattctagttttccaaactggccaaaacttaaatggtgtattttagttgcttgtgttattttctaattacaattgaaatttcatcttagtaacttacattaaatgttaaacattaaaggatagcatagattagtgagatgaaactccaactttaattgcaaaacagcaccacaatcacttgagctgcagcttgaatattttatcttgacatatgatgatggcatatgtcgcttacttttatgtcactatataagaaacaacatcaaaggtgcgtagttaactgtctaaattacatttcattacttgacgttaatggcattatttcaggcatttgattgggttcttcctttttctctttctca

SEQ ID NO: 22284 - DNA, 893 bp, Glycine max
  Intron number 1 from transcript Glyma05g08810.4 (locus Gly ma05g08810) derived from phytozome v7.0 (chr-ID Gm05; pos 8691265 to 8692157 reverse strand)
ctctcagtagaatcaccactttctgccaccgtcaggttcgttctgtttttctcttccttctatgttttggatgataaaattccccgttgtctaatgctgcgttcatgttttctccttcaatttaataatgaaaagtcattgagataataatcgagttccatacttagtggaaacaaattttttttcagttcgaaaattcgaatttgttaggtctctttacatattaagaagccaaaaactaaattaacaaatcaccgcacatgtgactagaaaccttatcagcattgatacttgatccacaccttactaaaaacaggtcagaaacccacaaaaccaaaaataagactttattcagtgttcacaaagtttttcctttctccttgcataccaactgtttgattcacgtcttgtaagcacttgtcatcacttaatccaccctgaaagaggatatttcaacccactccttccttatattgtttcgttgccaggaataaagacttgagaatcaaactctttatctctccacagacaaataaaccatcaaaaccttcatctttctgcttcttggaaacatgaagctgtttaattagaatctaacgggacaggtcgggagcgggtttagctccctctatctccatccttgcaaaagatgggacaggtttggggtcgggtttacaagacacgaggataaaaaatttaaactctacccttgggatcctgcctcatagttggcttcttaatatgtgaagttttcttggttttctattctttttttttttttttgcagctagtttcataaatcttggtgcattaacaatttagcttaagctttgtgaatactgaatagagtctttttttggttttgtaggtttctgacttggttttagtaaggt

SEQ ID NO: 22285 - DNA, 641 bp, Glycine max
  Intron number 3 from transcript Glyma06g12630.1 (locus Gly ma06g12630) derived from phytozome v7.0 (chr-ID Gm06; pos 9796273 to 9796913)
attgtacactgattaaggtataatttctcaaaataatacattatgactttttcttttttccccacaatctccttgtgagttgtggtttgtgtttttgcattgagtttcttagcaagcccagcttatgtggtgttttaagttttttcaacttagagctttgatttttaattattttcaaattatattagatttcattaggcctcagagatcaatctaaagtcaaaagttcagtcaaacttgatcacactttaggatcatgatcaatccaccaaggatcataccactttctggatagcctgtggtttgtctcattgacagcctttccagaaacctctttttaagttcacgaggagaagtacttacaaattcaatgtgaaaactaaacagataaaactgttgttaaaattttatccactttatgctaaaaggtttctttgttccttgcaagtgttgtgcaccatagggataccgacttcattgtcatcatatcatcatttttaatagttcttgaaagaatcatttagttggagactagtaaatgcaatatgtaactgtaatgttatcctctactaatgaatttatatcgtgaccccccaaaaattacagattgatagtgttaacaaacctggaattctgctgga

SEQ ID NO: 22286 - DNA, 657 bp, Glycine max
  Intron number 1 from transcript Glyma07g23240.1 (locus Gly ma07g23240) derived from phytozome v7.0 (chr-ID Gm07; pos 25041146 to 25041802 reverse strand)
tcaaaacggggggggggatcaaaagagagctagatgtattataacaacatagaatttaacaatgaacagtataaatattaatctcaactactctcatacaaattatatcaggcttggggctaaatcttgatgcttcttgtgaccagaaaagtggtattgatccacgcatttgcacaactgaactcatctttcccttgcaagagcctgattcttcatcaaggacaatctgctctgtctcaacatcattagcaaccctcccccgatcattcacaccccttttcaagtacctgcagaaacaattcatgacaaagaaaaataatccaaccattactattttagccagatagacacaatgtaaaaccaaatatcattgcaaattgcaaaatacagataattcttgatatcaaagaatattgcttgctatgcaacttgcagatacaatggtagcagcaatattacgataagaacaaggccagaatgacaaataatacttgaatcagataataatgtgaagaacgttaccttttttcagagtccaatgcatcatcaatatcaccaaccaacacagatgcagatcccacatgagcatggctgatggctcctgcatgtatcatcaatatcaccggaggtgcattttcgtggagtgagaaagaggcc

SEQ ID NO: 22287 - DNA, 558 bp, Glycine max
  Intron number 5 from transcript Glyma06g45650.1 (locus Gly ma06g45650) derived from phytozome v7.0 (chr-ID Gm06; pos 48394776 to 48395333 reverse strand)
tgaaacttcaattctcaatatatattctgctgcatgttttgtgcaagagtaatgttcaatttattttcgtcacttatgaataatcagcactttgactctttgtctgatatgttgtaaatcttttgaaaagtttaaaagccactcatctgtccataaaataatgcatacatatcatgcatgcatatgagaaattaataagctattgcattgtgccagaaagaaaaaaaatgtccctcttcttttgttttttttttcttttcaaaatgcaatagttacaactttcaactcatcatatcacataatacattgagttttagattctaataataccactctagatataccaccaagaagctagtgttataaatgtcctttataccaataaaattttaattgtggtattgcacgtcagctcaatgcattttgcattttagataatataaattttcaatgcatttaatttaatagacatattaaacacttaattaagtcagagaacatgaaagatttgttaatttttttttattgtacaatgattttgaacttaattaagatctc

SEQ ID NO: 22288 - DNA, 608 bp, Glycine max
  Intron number 1 from transcript Glyma07g34360.1 (locus Gly ma07g34360) derived from phytozome v7.0 (chr-ID Gm07; pos 39255786 to 39256393 reverse strand)
ctggtctcaccattgctagtttggccatcccccaggttagtcatcaacaaggttttaaattacatttgtccagttttgttgccatgtaggtttaaatatgttttcgatcctttgaagttggttctatccttttttagttgtgacaattttttactgcaagaggaactaaaaaaaatatttcacaaatttgaagaactaaaacatgcataatttaatttgaagactaaaaatcacatatttttaaagttgagggactaaaaacatatttaagttttaaaaaaattacatacaagttgtgatgcaatcgcatcaacctcaaaaagatgtttgacattgctgccacaattatggttacaagttgcggtttgattgcaattcttgatgttaaggaatactgtagaaaaatgtgactaatgcaactgcagttgtgattgcaacataattatggaatcctacaaactgacattgtgacattaattgtggttgtgtactcctttttaaaatcttgcctcaggttcaatttgtttcttagacaagaaaaattattaatgtcctctccacttggttttcttcttcaattatgtgtcttgtcattcagggaatcagtt

SEQ ID NO: 22289 - DNA, 667 bp, Glycine max
  Intron number 3 from transcript Glyma07g10780.1 (locus Gly ma07g10780) derived from phytozome v7.0 (chr-ID Gm07; pos 9003695 to 9004361)
tcttacataccatacactccatacacccttggctggtaatcatgaaactttaaccctttgtttgatcggaagtggcattgtggttctagcttatcatgattcatcaattgaatgggctcatttttgttagatgcactcatgcattttaatgtcaagattctgcactcatttggagtaaatagtattaaatgtattaattcattttaaaacttatttcctcttttcctgtttaccatatctcaagaacataaaattctccagtaaatattctttttttggtaatcaaatatgaaagatggtcatctaccatagcatatcaatccagatggcagcgcatagcagccagtctaaaaaatgttatagtggtatagtgcatagatcggtcatatactgaaatttagatataggttaaacaatatatgctgcacgtataaatgctaaaaacaataaaaattaaatacaaatgcataagtaataatcaatagtcatatatatgagtaaagtgaaggaatcaaataagtttaagcctacaaggaatgagaagcaagaagaaaacagaactgtgaatagctagagacaaaaaagaaaaagacttcgcagctactaaagagcacagaaacttacgaaacaagggtgaagacttaaagaagagatgcttggcaggaaa

SEQ ID NO: 22290 - DNA, 519 bp, Glycine max
  Intron number 1 from transcript Glyma07g15520.1 (locus Gly ma07g15520) derived from phytozome v7.0 (chr-ID Gm07; pos 15313188 to 15313706 reverse strand)
ttgcgtactgaactgcactcctccttattcccaaggtttctctattctgttcatttgtttatcttctctcatctatgattttcattgttcatttgtcttgcagctcttttgtgtgttagtggtttgttctttgttctcttcaatcggtttgttctcacaggtctgttggattgttatgtattgtatttgtctatctggatcttattccttattatgattatgatttttcaatttaagtttgtttaatgatgtgactaagaggttatcttctttatctatgctgtttttttaatgcatattactatatataagtataatttttgcattttaggtaggaatgtaggatctttttatatttcccgagttatgagttttcaccccccccccccccccccccccccctcctaattctataaaatttcaagtttaacaacgttgctgccaacaatcctgataactgttttttgattttggtccccgctgtcaattggttgatattttaaattacagccttgatca

SEQ ID NO: 22291 - DNA, 962 bp, Glycine max
  Intron number 2 from transcript Glyma08g02360.1 (locus Gly ma08g02360) derived from phytozome v7.0 (chr-ID Gm08; pos 1641011 to 1641972)
gaaaataaagttatctgtgggaggaagtcccacatgttggtctttttatttgtcgttttgatctttacattggttgttgttgacttggtttagcttgtcttctctttgttctatgaccatgccgagttggtatgtgttgtttttgtggtaggatcctcatgtctacccatttgtcgacgtaaaaaggacataagttcatgatgcatctcattatatatgtgggcaagtatgagatatcctcccacaaataattttatttttcacatatttgtaatatatttcatgttaatttttattacatttctatgattaattttctatttttttatattattactattttttaaaaatcattaatatttcaacaaatgaaaaaagtactcattaaataatcatcacatatataaaataatatacaattatatgtataatatatttcaaatacacaacaccaatacctattacataaaaaacaaacaacactttcatatttcaaatgaaaaaaaagactaacatcatgatttaacaaatgactatatttttttaataaaaagaaaaaaatactaaagttgtgactgtaatcatgactttataattttttaaaaagaaaataatacttgaagtcatgttttaaaacacgatttcagtattttttttttaaatatgactttctaaagttgtgttctaaaacacgactttctcaatacttttttttatatgaaatcgtattttaaaacatgactgacccgtaatattttaaaaatctattcattcctgtaatttttttaaaaaatttacccatttgtataaaaaagcccaacaaagcattgtaactctctagttttatttatcgagtgtagtgtgcttaagaaatgttaccacatcaccatccggtgacaaaattttgatcatttgtattctacacaaaacatcaaaaaatgtttaatttcacagtggccgtc

SEQ ID NO: 22292 - DNA, 535 bp, Glycine max
  Intron number 1 from transcript Glyma07g38670.1 (locus Gly ma07g38670) derived from phytozome v7.0 (chr-ID Gm07; pos 43378765 to 43379299)
gcaggtaatcccacttctctctctctcttcctaagtattttagatgtttcctacgttatttatttaatgtcttgttctggggtgtctgttaaccgtgtagtcagagtcccgtgtcattcaaaatagtgtcgatttacttcatgcgtgtataattcattcttttattttagttagctcattggcaatttacttacctatgcatcattctgtacaacaacattcacaattataattgtgtatgctttgattatgacaagtttctttttaaagtatcaaaaacaatgttgcattgtctgacttaaactaacaaattcacatgccaatgaaagaactgtttgaaaccacaatgtatggtttagagttgcaatctgtttgattgattattttaaattgattgctctgaagaaactatgtttgaagatggaatgaatatcaaatgtatatgatgtaagattttcggcttgtttaacctttatactcctttcttttgtaacgggcagcattacaattttctacttggccaaagaagaagaaa

SEQ ID NO: 22293 - DNA, 978 bp, Glycine max
  Intron number 1 from transcript Glyma07g07960.1 (locus Gly ma07g07960) derived from phytozome v7.0 (chr-ID Gm07; pos 6612063 to 6613040)
gaagttggcgttctctccctaagttagcaggttttcatgcccttttgttttgtgttttttctcttgttagcttgaccttgaggtccttgttttagtggttatgttttgaaattctacttcaaaaatcactttttttcacttggaaacaaaagctcccccctctttttgttacacccagaaagcaatgaaaaatgctacttttgaagctatctttccattgatatgaagcatatgttccttaaatttagcttcttcttttttttttaaattgctggtaagtctgcactttgcacctttaggtagagaagcttttatatgaaatcggctttaatacactcttgcaaaaaatggatagaaataacaaaattgtgttcggctccttccttatttaacatattttgtaatttttaatgaattttgattaattaaaaagaacataatattaaaacttctcattttagagtattaatatgtggacattacatcatccaaacatgcattctattagcatcaacttttttttctctttttatattacatcatattatctatcatatctgtaattttcttttctttttttctttctatctcgatgtatgaactagagtttaagtgtttactcaacgttttcttaaattttaatacaaatatttttacgcattgaatatatttgaaatatgtactcaagttaagtttagttgtagattttacattaataaccattttgtttctaaatatcaggtcatgtttttgtgttgattatctcttgttctttttgtgttttcaacggaaaacttggccttcatttttattgggtttgttacacataagctaacaaagtgccaattcactcgtccatttgtagatttttaattttttcacatgaacagttttgtttttttatacttgctttacataacttgcatttaaccctccctttcaggtcttcttcgttgtggcaagagttgccggctaaga

SEQ ID NO: 22294 - DNA, 958 bp, Glycine max
  Intron number 4 from transcript Glyma08g24630.1 (locus Gly ma08g24630) derived from phytozome v7.0 (chr-ID Gm08; pos 18800844 to 18801801 reverse strand)
acgaatacgactgcgacttcgagaatcaacaggttttttcttttctctcctttttttttttttgaattttatagtagctttttaatttgtttagatatttgggtttggtggaaatgattttttttttttgtttagacatttttttttttggcaaatgttagtctcttaattgatagttttctatgaacgagctatcgagtccatgatctttcccacttcccttctccattaaccacctagcccatcttatatctcctttgtttggatattttatgtctggtttgtgtggttatgtttgatacgttttagttgcatatattgtagtgaaatataatgatgactagtagaattgagtggattactgaagttttattggcaacgcaacaggttaaagattttttagtacctatttttgaaattttgggttatcagaatgttttgctttcaagaacaagcagttttttttttttcttcaaatgatttatgtttatgtttttgaagtggggtttgtgatgatgtttgttctttaatttttttagttgtttgaattaaactgaaatccagttgaaaaaaattcaatggggagaagcaacacattctctaacacgtctcctcctaacaaattgtctactcttttgtctactatagtattgattaagatttattggaaactacaaaatcatgagattcgtaaaataagaagtgagaccccacataaatttgtaattttcaataactttgggcccatagcatggaatgtgttcgaaagagggggttaaagagtgtatgcttagactcttgaattgaatatggaattagatttacgcctaatttgggtaaacttaaatctattgttctgtgctcagtagcttctgaaaaccatgatcagctctggtatagagggctactatttctaagaaaatgtaatggttattgtaggcatcgtctacagtggcta

SEQ ID NO: 22295 - DNA, 744 bp, Glycine max
  Intron number 1 from transcript Glyma05g32790.1 (locus Gly ma05g32790) derived from phytozome v7.0 (chr-ID Gm05; pos 37602109 to 37602852)
atcggctggtgccagccacagtgtggcacttctgagtaagcatcaatcagttctcacttatctttttgtttagtatatatatatatatatatattgattgttgttattgtgctgctgaatgaatattgagttttctgaaaagggtgatgaatttatgttgcaagtctttggaattttgttgttttatatgctttctctgcctcaatctgaaggtccccacttaatccatcaatttgtttctggcgtcaggattttgttctctgtggtcctaatctatagacagttttttttatgtggtttatgtttgaccctttttttatttatttatttggtttatgtatgctgcgtgtctgcatgtacatgatcaaatgtttgatattggcattgtcttgaactactggaatgtggctaaatgaggtgttcataagtatcactttatgatatttgcatctaggtctcattcacatccaatagattggctttttaatttccttgtaagctgtaagaagttcttcattaaataaatgcaaatttagctcatacttcaaatcgatcttctctttattcttcttcgtatccatgtccatggtaaacttattaactttattcatttgtcttgttaaactttttgtggcttccatagaatagtttgttgcagaatcatattcatgttatctcaatctgtgcctaggtgctacttctgtcatttttttcttcttaattttgattctttaacaggtggaa

SEQ ID NO: 22296 - DNA, 991 bp, Glycine max
  Intron number 3 from transcript Glyma08g07230.1 (locus Gly ma08g07230) derived from phytozome v7.0 (chr-ID Gm08; pos 5196864 to 5197854)
ctgcagatcttgtacgtgttcctttcgattttctctaaattatgatgcttacttccactacgttctaatttaacttatctgttaaatcatgcgatctcataatcacatgataaaaaatgttaatagtgcgttcctagcatatggataaaaaaatgtaccttattaagtgcgtgtttggatgagtttcgacaaaattgattttgaatggagttgattttggttaaaattgattttggaataatgtgatttatgtttaaatttttattataaaataaagttaaaggtaaatctcaatatgaaatttaggaggaaatatggcctctatctaaggcagagagagtttctgagctcaaagagaatgcattcacatttaccttatccaaggaaacaagtaggggttcaaatgatttttcagatgccagccctatcttgctcacgcaaccaactccttgggggttattaaatacttttccttacttaactaaatacacactactaatattgtgtttggatagctaccagaatcaatttcggcacctaaaacaatggtgaaaaattgaaaaagtggaagcaagtaacaactatttgtttctttgactggagaaatggaattgaaattgattgtgtgaaaattgaatctaatctaaacacatcataaatgtctcttttttctttccttaactggagcccttggtcaatgcttagcaaaactgcaaaatcagttttaatgttagatgtttagttgtaaagttcaaacagaaatagtgttagctacttagtttaattgcatgtcgtagggtatagggtaagggaagcaatgaccactaggaaatgctcgtagtgcgttgttaattgggattgggaactagtatttagaataaaacgaaatgttgtaagtaaactatttagtatggtttttgttttcttcatgatgcataaactttgttgtttgatttctgaatggtggttttgtttgtgcagtgctgcagtc

SEQ ID NO: 22297 - DNA, 462 bp, Glycine max
  Intron number 1 from transcript Glyma05g28770.1 (locus Gly ma05g28770) derived from phytozome v7.0 (chr-ID Gm05; pos 34541372 to 34541833 reverse strand)
ccgtttcagggttttaccttcccaacacgacacaggtgcatccatcgctcttctctctctctctctgcaatctgcatgcccttattattattactatcattctttcttcgttgcttcggctatggtttttttttttttttttttttttttttttttacgttttggttgttttcgtgcttgtctttcaaagacattgtgtttggttcgccattatgcttatgctatagccttttgagatttcgaggagaatgaacttcgttttatgcttccattgttttgttcttctcgtttgtttagtttgtgattttgcatttttgagactttgtcgattgtatttgatgtgttctgctaatcggcttctgctttatgtgatatcgtgatgtaaacatgtttgcaacggttattgatcggaattcgtgctttgcagggctggttctgagcaattttgttcgttttgaagag

SEQ ID NO: 22298 - DNA, 380 bp, Glycine max
  Intron number 1 from transcript Glyma06g12850.1 (locus Gly ma06g12850) derived from phytozome v7.0 (chr-ID Gm06; pos 10028676 to 10029055 reverse strand)
ttcccttgttcctttttaacacaccaagaggacaggtctctctcttcctcttttcctttttgctaatgattctagctatagcttactgcgtgaagttttttgaatggaggatttgttttggttctgatcttcaattttctcttttttgcacagaaaggagaggccatcttttactttctctttgttcatgcgattcttgttcctcggttttatagggtatatatttatatatgtaatactctatgatatttgctctccctacttagggctttgaataattgaatttaaattttattcgtttttaattttttgtgctgaagagagtttgctcaaaagtagtattattcttattcatattagtgacattctattacattttg

SEQ ID NO: 22299 - DNA, 777 bp, Glycine max
  Intron number 1 from transcript Glyma08g17590.1 (locus Gly ma08g17590) derived from phytozome v7.0 (chr-ID Gm08; pos 13084533 to 13085309)
ttattaccaagcactttcattcagagatagatcctgtaagtcttcctttagtttatgtattttatcatattatctctttgttttgtttttcatgtcccaaataaggttgactgatatatactattttcattataataaaaatatggggttagaggtttcggatcgatgttactttctctttccttccaaccaaggacaacaagaaactataaatatgtaatccccaacgtagtagtttgctccatcaatgcaaatcttttttttaagaaaattaacatgaatgatattaattttcacccaagccaatttaactcttgatcgttgtctttttattcattgaattctttttttagcagtagagcatttgaatttctgtatttttcatctctcaattctgttccaaaaataatatatatagtctaggaattgttgaggttgatatcaaatattgaaaacataaataggtagctaagtactcaatcttacctagctgagaagggggatgaaagaagaatgtgctataagtttaaatgtagtctgttatgaagtattattacaagatcatatggaacagcttcacattgttattctctgatagaattttaagttccattgagataagtactatagggacaaggtcaagagcaaatagattttattccatgatgaagggtgcgactagcacacaaataatgcgatcataactcaaaactatcttctgtttagactcttacaaatttgcattacttttacgattaaaattaattgctgcaggac

SEQ ID NO: 22300 - DNA, 397 bp, Glycine max; identical to SEQ ID NO: 22088
  Intron number 1 from transcript Glyma05g22440.3 (locus Gly ma05g22440) derived from phytozome v7.0 (chr-ID Gm05; pos 27607715 to 27608111)

SEQ ID NO: 22301 - DNA, 745 bp, Glycine max
  Intron number 1 from transcript Glyma07g11890.1 (locus Gly ma07g11890) derived from phytozome v7.0 (chr-ID Gm07; pos 10159362 to 10160106 reverse strand)
aaggttggggtgctgtgattgcaaaaactgtaagctttttttactttcatttactcccccacctttttctgcattagctagtttgtctctttacagtgtttggtttgttggtaagaatgagtttgtgttatgataaatacaaatacctgaaactttttgttgtgaattgggaattaaggctgaaaactggagagcttggagttttgtggtctaaaaggccaatcttttgaactgtttttgacttttgatctgtttctgtggattatgtcatcgtgttaagctatttagttacgagtttctgttggttgtccttgtcctgttatcaagttattataggcgggatcttcaattcttcatggtttagtgtagttgacacttggatgttcctagtagatcatcaattttgcatttttgcctcttaaatcttgaattgttgttgatcctgtttgcaaaatgtagattctacctggttccagaaagaatccttggatcttattttggtgcagttgatacttttgttttcaaatgaaattaaaccaatgtataaacagattctcaatgaaggcaatgccttgtttctgtaacaaaacaacactgtacccgtgtagtaggaatatacttaaataatattccctttagaccctattttgtttatgaatgttcttgcataccatgctactgattgttttgtgttttgaaaggttactgtgggatttgatctttttatcttgctaggtatcacttg

SEQ ID NO: 22302 - DNA, 1023 bp, Glycine max
  Intron number 1 from transcript Glyma08g40760.1 (locus Gly ma08g40760) derived from phytozome v7.0 (chr-ID Gm08; pos 40580457 to 40581479)
acgaagggtggatcaccattccttacagtatgtattgcaacactaacacgaacttgtctctgtgctttgttttagtttagacagtgtttgtttggttagtttaatgaaacaggaaatggggttagagagtggtagtagtgttttagttctactaaaaggagtgagatcaaggagagtatggcatagaattgaactgttttggtcccaatcaactagtgatatggtcttagtacaaagtagtgtatcaaaatcaaattctaagatggtatcaagagtctatcctaatgattgttcattggccaattgggatgttatgggaccacccgcaaatgactagtgttatggacttcacacttgaggtctccagtcctcctcggtgaggtggtgtgttggagatcccacattaattagtgatatgaccaaagtagtggatataactaggagcaatcctctccttacaagccgaagcaggttttgtattgttgagttagacctaaactcgaattctaagaaactgtttaggccctgtttggataaatttatgcataagtagttacaagagaagaaaataagaattaaaaatgaattgagttttctcataaattaaaattaacttgtgcattacggattcaatggaaactctctcatttagcttatgtaaaagttgattctaacatatgtataagctaattttaactaatgagagaagtttaattcattctaccttatttttcttttcccatctacgagtgcttatagaaaaatttatccaaagagggcttattctgatttgcctatctgttaattggtaagtgacaactgagatttggacatgagtgaaattacaaccaagatgatttttgttagcattcaatttaaagttttagggtttagtgttatgagggcacaatatttttgtctatacttgatgatgttatgggtgagattgttttgctgatgtgatgtgatgcatctgattctaaatttttgtttttatagaggaaattcctgagaactggaatc

SEQ ID NO: 22303 - DNA, 980 bp, Glycine max
  Intron number 3 from transcript Glyma08g40760.1 (locus Gly ma08g40760) derived from phytozome v7.0 (chr-ID Gm08; pos 40582195 to 40583174)
gagacatagtggtatgtgccataaaatttcagtaactacgaatatgatcattcattttcatgtgtctgatggagtactactttttacttaaatttgggactgagccttataagttttcttcttcccctttggtcgcttcaattttccacttccccagcatgcaacacagataatctatttggcatctaactcatttgttcatcctgtttacaaaattcatggaaattttttagcaaaaatgtataaaactttattgcatctggatgatgttgtgctatgagtttattgtctaccatccaattcatttgttcatcctgttttgttgataaggacttggatccgcctaagtcccacactgagtagtgtgggatgcttggtggactatttaagtaagtggcttggttctctccccttagcagctagcttttatgggaggtttccccaagtgcttgggtgcttatcatttgtaaaactcattgaaaatcatttagtagaacggtataaaatcttactttatcttggtgatattgtgctttgagtttattgcaagctctgctagtctgctttgattcttcttgtaactgcattatcaatgtttacactattttatatttctctggggcatttggagccaaatatttccttgtggtacttgggctgttgttgtggagtatattgacctgtgtattattgtcataatttagatttctggaacataccttttgtgatgtaggcattgcttcactttagtctttcacttgctgaaaaccttggtctcttatctacattttacttaagcttttgttaaatttcaaatatattttaatggcatatgccttgcctctataatacctcagagatctttatgaaaattttgtcctgtgatatcctcctaattatgcctggccattctcattactcagattactgatctgattctattttcctgtttggaaggatccaggttcttttacaggtga

SEQ ID NO: 22304 - DNA, 638 bp, Glycine max
  Intron number 5 from transcript Glyma07g11610.1 (locus Gly ma07g11610) derived from phytozome v7.0 (chr-ID Gm07; pos 9817798 to 9818435 reverse strand)
atcatcaaattctgaacacttttgttgaggagttggtaagatcaatagagatctgaggcagttatatatttcactgcatttgggcttgttaaatggttatatcaaaacagaagtagtatgccattgtttgattaattatacttttattgtagaaaccacagttgtggacttataaaatattttcttatgacctcacaaagaggaaaatttcaaatggaaacaatcttttcagatggtttcttctggctaaaattgcttttatttgcctcaccagaggaaaattttcaaatggaaactatccattcagattttttcatctggttaaattctgtttcctttcaattcaactgatatcatgttgattgtagtctttgcatgttctcatgtcaatcctttaaacacaatgtagtccttatcagtcggaagttgtttatttgttttttgttggaaaagagtcgatatttattaacatgattcttgttttcaaaattgacatttttcttgcatcatagcaactttgtgcgtgtgtgcacataaagcactgctattcttgttgttttcattttcgtttattttattctttttcaaacactataatgatgatggaatttgctttgttcaaggaaatcattttgaat

SEQ ID NO: 22305 - DNA, 950 bp, Glycine max
  Intron number 1 from transcript Glyma08g07950.1 (locus Gly ma08g07950) derived from phytozome v7.0 (chr-ID Gm08; pos 5701029 to 5701978)
ctttcaacacttcgttgtttgaagtcattggaagggtgaggcttctcttgttgttgttgttgttcttgtgtggctatttatttctttactaaacatatgtggaagctctttgattctgtttgatgtttttttctattgcattcacatttcacaatgcagtttgttagtgattcaatgaagccagaataaaagagtaatgatcttttaacacaccaatttttttcataacacttttgcagtactcttcatttttctcttcctatcatatcacttatcattcctaagttttttttttttctcttttatctgtgtcaactagcattttgagtgtataaaattcatttttgcaaataaaaagggacaaaagttagatacagttcattaaatgttttttgctttattctccaatttgaattggagtttatcaaaagcactcttatgaatgacatcttttgtacaaaacaaaaacaaacaaatcagtaaatgcataattttgtatgacattttttcttatgcaatgatgctgcaactaatgattattggttaagataagaaggtgggatagctaaaggcattattgattaatgcttttggttggaaatcttttgggtacaaatttttgtagttgaataataataaaatcaaacaaaaaagcaggtgagttcttggagggaatctgcagaatttcaaagcagacattctgaggttcttgctaatgttttgaagcgaaagtatataaaagagagtgctttatgttaattaattaccagtggcaaaatttaaaaattaatcaaactctcaattctcagatggcgtgcatttagattgaattaaaatgtagagttcatgatatttgaaaacatcaagcaccatagcataaaaaaaagagtctaaactttgaagtggtgttgaggctattttcgcaggtggtgtcaacggaagcaagagca

SEQ ID NO: 22306 - DNA, 503 bp, Glycine max
  Intron number 1 from transcript Glyma07g10890.1 (locus Gly ma07g10890) derived from phytozome v7.0 (chr-ID Gm07; pos 9098548 to 9099050)
ttattcatacccaagtgataaagtgttatgaacagagatgcttcaatgagaggcagcatagacacaacagcaaacacaggaggtgaacacacaaacacaggggtgcagaaagaagcaatactcaaaagaaaggtcaaaaagcccacctatttgaaggacttcgtctgaaggaatctaatgggatattgccggctcacatgatcttccaaaatccttctgctgatgctgcgtatctgaggaaaagcatccataacagaattagttatattcctaggattataccaattctagaaggaaattattcctttctaaggatctataaatactatgtaaataacagaaggattaataagaaaaagctggaatttttccttatctctgaaacttctctaaattcccttctattctctggaggagctgaacctctaaatcagctaagtccttaacataaagtttggatttttgaaggatatttatattggcaattctttgatcagcttgta

SEQ ID NO: 22307 - DNA, 533 bp, Glycine max
  Intron number 2 from transcript Glyma08g16470.1 (locus Gly ma08g16470) derived from phytozome v7.0 (chr-ID Gm08; pos 12086952 to 12087484 reverse strand)
ccaacgtgccggggcaaaaggaaaacaaagttaaggtaatataatacatgtaataatacattggtcttgaattggactttcttgcatgtgattcatagaagaaaataagatgtatggaaaactgtgcattcgattcaataaaagtataaaactgcaatgactaaattcgatatgtttttggttaaatagtttgttagttggagtggttatatttagcagaaggggttagttgccccagtcacaccgtgacgaattaagattcaggtcctcgctagaagaggtgttcatatttaatgtttgacggcacttcgaattagatttatctccgaaggaggatacctatggggaaccaaaagaatattattttttcaccgtatagtgtatttctgttagggctaattgaatgtttataaatagttttttctcccctgctttgattgttgttatagatgggttgatctggtttttctttgtcttgtttttttcgttgctttttaggtccctctggctttgtttggaggttcaggaaacta

SEQ ID NO: 22308 - DNA, 749 bp, Glycine max
  Intron number 1 from transcript Glyma07g00950.1 (locus Gly ma07g00950) derived from phytozome v7.0 (chr-ID Gm07; pos 544999 to 545747)
ttctctttccttattctatttcaaacttccaccaggtatgtctcgttttttccttttcaatttcgtaaatcactgattctatttctcttctatgaatctgggcttgatctaaattttttccatatcaaatcgacccagaagtttttgattcgttattcggtggtatgtttagtttcccgttaaaagatcgtatttttagatttaatggattgttgtgtattgcttatttgatagattgatttgcttttggatacagtgatatgttatgctcaacataagcttaagttttcaatgatcactttgtttttgtgttttagtttcactttgattttggcactgtttaactgaatcttggaggagtgggcaaagtgggtatttgacactgaaagatttgttttttggtatggcatgtatcctttttgcccttttgaatgtcttctgatcttctccatacatcaaagagaaacagaagtttaatgcttgcacttctcttcctgtgtggattgcaagtttggctcttctgtgacatctctagtggaggatgtcttgttcttttaatacatggttgagataatgagtagtatctctcccaaaccactgatgtgctgaagtataaacttatagtggatgcattattgatttggttatttgtgtgttgtttctgaacgattcctttgttatctttttcaattttgccagagtacttgaatgtatggtctcttttaacggaagttttgctttttgcagtg

SEQ ID NO: 22309 - DNA, 825 bp, Glycine max
  Intron number 2 from transcript Glyma05g28860.1 (locus Gly ma05g28860) derived from phytozome v7.0 (chr-ID Gm05; pos 34595738 to 34596562 reverse strand)
gtttcgtcttctttcacgaatcgctctctttccaggtataccttctctgatcataatgttgttatgactatcgcttccaattaatacaccccctcaactttggttcatttttatacttttaacttatctggaggttactccatttgcatctcacattttttttttattagcaaatgttagaatgttagtttttgttagcagaggagatccaatccgtgacctttttcccctttccttctctcttaaccattcaacccacatgatcattttaaaccatctccaaaactgtatgttttattatcgattcttgttaatgattttagactcttcaatttcaacatttttgaattattatttctgtcgtttgatcttggaaaccaaacactcttcccatcaactggaattgcgtttggattataagaagtaatcaggttaacttcccaagtgcttcagagttttttaattgtggggatagtcatttggtgtcaccttaaattgagctgaaggaatccgggatgagtttttttttttttttgatacaattttgcacatcaagcttatctttgggttttcattttcaaggggcgccaaactgatgacccttaatgttgttctgcttttgtagcactaacagagtagaggaccacttggtttttctgtctgttactgatgcttacagtgctaatgctaaatgaccaaaccgccaaagaactcatagccctggttatttgcctcttatgcattcaacttcttgattcatgcattttctgatgcataaactgttccacagtggtttgcaggtgccatacttataataattggtgt

SEQ ID NO: 22310 - DNA, 723 bp, Glycine max
  Intron number 1 from transcript Glyma08g24210.3 (locus Gly ma08g24210) derived from phytozome v7.0 (chr-ID Gm08; pos 18411056 to 18411778 reverse strand)
aacccaaccaccgcagggtccggatcgtaccaccggtaccgttcaactcctttcttctgtttgttattgttattattattattattattattattattattattatttcatccaattttgaccttcccaattttctctctcgacgaagtcaatgattaattttaccattcaatattaaaaaaataaatcttgttttgtttgtcgttgatgttcgatgtccgttactttcttaaaccttgcatctgggtaagacaagaattggtggtgtgatctggttatttggattttctgtgtaatgaatgattatgacaccatccctgatgggatggatcatcgtggtctcaagcgtttatagtgtgtgtgggtggtggtttaagtcaagcttccccgttttttgatttcataattatggcttaaattatcatcctgaagggtaattcattttatttttgtatgtgggatctattacacttcattttatgcttccagcaatactgttttactgcgcccttgcccgctttccatttcaaagtatattcacgttctttcttttaatcatgtgtgcatttgtttgcacgtctggatttgctatctccaaatttagctttggttgctcaataatttgtactgctactgcctgtttttcgaagatcatactgtcaattgagcttattgatcatgcatgcagaagagataccggccgaaccagataacttgaaggag

SEQ ID NO: 22311 - DNA, 263 bp, Glycine max
  Intron number 1 from transcript Glyma06g47340.1 (locus Gly ma06g47340) derived from phytozome v7.0 (chr-ID Gm06; pos 49824746 to 49825008 reverse strand)
aggtgtgtcgcgccgctgtcgtgtcgtacgaactggtaagtacccattcttgtactagttttgagtgtttgaaaatttgtatgttcttattctatatttgcttcggtggtaggtaggggcttttgttttgactgtgtaatgaatgtcattgtcattttgattgtatttgctttatcttctcaccatcatttgtttttgcctttatcgattttcaacccacggacgaagggcagcttggttgcggcttcagtatcggcttacca

SEQ ID NO: 22312 - DNA, 1025 bp, Glycine max
  Intron number 3 from transcript Glyma06g41640.3 (locus Gly ma06g41640) derived from phytozome v7.0 (chr-ID Gm06; pos 44935446 to 44936470 reverse strand)
tggaattagatcaattatttgcttttattgctgaggtgattgctgattctatgttctccaattagtttagattgattatttgcttgtattgagcatccatctgttaagaagggataagcatttttgttagatatgagtgtgtcataatattatgggctaaatattggttgagagatttcttttttttttttttttttgcctgttgagctgttagaagttagaaaaatatccttttgccagatgtacggccaacccatttgtgggattcatggtcaccattaaataggattttgagaaagttgaataacaaacacagctaaccaaatttattgcaccttgtaatgaattatatctctattaattttattgcccgagtgcaacattgtttttgctcctaaaagttagtttgactagaagctgaaaattatatatgatacctgtgctccagcaatgacaaattgtagtatgtcattgctgtaagagtttagctcctctgttgtgcatcaaccatcaaatattggacatatgttgtgactcaacaccttgtactgcgctgttctgcatgtgatgtccctgaacatgcatcaaatgcacccatgaattgattgaatttttaatgtaacagtttctgaagtcagaacaaagctggactttttggtagtatttatataatgaatataatgttcctatgcaattgattatttaaccaaagattcttatcgttttggaactatagggccttttggtttttagctttagtataaatgatagtgcttattctcatatttcttattttgttccttgtgttaaatagatgttggttcaggatgtatgtatggcatttactatttttgttcttccctttcatgcttctagatctgatttatttttgcttctttacataatgaatattgaaaatttggtactcttttttttttttatcttgttaggactgaggtaacacttttcagttcttcctaatttgtataggttatttgggctgggtttgacacattagagggcgg

SEQ ID NO: 22313 - DNA, 883 bp, Glycine max
  Intron number 1 from transcript Glyma05g29070.1 (locus Gly ma05g29070) derived from phytozome v7.0 (chr-ID Gm05; pos 34746480 to 34747362)
tttttgttcctctggagttgacaagagatctgagtaggtagaactttccatcatctgaaaggctacattgttttttctccttttgcgtcagacactgtgctcaagaatgttgcattactagtgtttgaccttgatgctttttgtctcttgttcgactataatgttctcaagatgacataatcttcagactcgctgttaaatggtgaaatgatcataggataatgaagtcttccaacagttattgagcatagtcttaggatgatcttcatgatctttcaatcagacagattgccaatttttaatccctgtatgcttagagagaacatgttagcacataatattcttattcatcaatttgctttgtatgttatccattaaaactatagggccagatcatcttttcctcaacaagattcatacatatgccgcctcaaggctccataatgttgggaagccttttgcattgggcaacattttttacaattatttcctccttggcttgctttctccatcctctttctttgtcactcttttatctattttctttttgtagttttctaggtaaaagaccattgttggaataaggttttggtagggaagagagaaaagagagaaagatggttgtgcatatttgtttactgaatgactataagtttgatagatgtgataaagtactacaacctaatactcctataaacctactaatgattacggcaagtactagtactagtctaagcctacaaacactaagactaataatcccaatattctaaccacagtattaatattggtgcaaatatatgttaaagttttaatttccattaaggctggtagatgaatttttgcaggtacaaacagtggacagagacaccagggccttaga

SEQ ID NO: 22314 - DNA, 863 bp, Glycine max
  Intron number 3 from transcript Glyma05g29070.1 (locus Gly ma05g29070) derived from phytozome v7.0 (chr-ID Gm05; pos 34747937 to 34748799)
gaaaaggcgccttggaaaaaactttttaatttgttagtgcttctttttaactagtggttctctatgttatattgcataatgctcctctaggtctataaattgagcttgtttgtaaagtgtacaagggtgtatccacccttaaattttagagggttaaagtagttcaaattagtttagtgtgttaagattgtgatgtagttgaaattaaatcaatggtggatacacccttgtttgtgtattttacatacttacatacaagctcactttagaagagctttctatgtaatgtttgattgttgaaccagagtgttcttagtttctttaaattaaatcgttacttttgggatgtttgattgagaaaatatttgaatatctcatttcttttatttgaatatgatgtcttgtctgtgtgtgttgtgcacaaaaatggaattggtcaaagcatgagaacaattgtgaaaaattttcaatgatctatggaggcaactgactgagataccttaaccaactcaaacataatctgctttactggtttaagtaaacatgcaaaatttaactctcactcttgtgctgaacagccttaactgttcttttcactttctttcaagttaatgctggaaaaagtctatttgtatcatttggaaagaagtaagcttaagctgcctaagatatatatatatatatatatatatatatatatatatatatatatatatatatatatatgctgtgaaaactttcttgggtattgcatgagtgcctcatccgtgaataatgtaaaattatttgtctagctgaagtccttaacaattattttgttgtttgcagtaagttcatcaaatacatacactaagacattttct

SEQ ID NO: 22315 - DNA, 820 bp, Glycine max
  Intron number 1 from transcript Glyma06g14720.1 (locus Gly ma06g14720) derived from phytozome v7.0 (chr-ID Gm06; pos 11533851 to 11534670)
ggatcaaaggatcggagagggtcctataaaagaaggttcttttttttttccttttccttctccgatctaaactgattttatcttatgataaactaatttcagtttgcgacaaatttttctctcttaagaatagttatagagaaacttatctaaatggggttatattatttggatgttgtttgttatcttacttcctcagtcaacaaaggattgtggtgaccgcttctatataaaaagaaaaggccgcttgtgttttgtcagggatttggggtggtggtgagaaggatttggtgaattgggatgtgtacggacactgttctatagttatagtcatattgtacgtatgagtaaagataatctttcttgaataaaaaaaaaagaacattgaaactttgaggttaagttaattagacttttgaaatattttaatactgagaattattgtagtgagttctcttccgttgattttgatagtgctaggagttttcaagagttttgcctcaagtgggttcctttattttagcttggagtggcgtgccttgatatatgatcatatggaacaataatgcagtaatttcacatcattttatttaatttattctttccttcatatttatattgaaaaatattttttttcgatctctatctcctttttgtttttatcatgtgttacataatttgattttttttagaaaaaaagcaatgaggaacaattatttttctttatttacatactctgagtctccaacaatggtgtattattacacgaaataacatgcatggtatatcttaaattgctgcgcaggaagactgaacagac

SEQ ID NO: 22316 - DNA, 894 bp, Glycine max
  Intron number 1 from transcript Glyma08g17180.1 (locus Gly ma08g17180) derived from phytozome v7.0 (chr-ID Gm08; pos 12644849 to 12645742)
ggtggtggagtgcgcaggataagcggcaaagtaaggtgaaggttaggggagagaaagaaagaatcaaatcaaccaaacaaaagaaccccatttaagaaaatatatagaaagaaaaaaaaattgattaaaagattgttctttttattaacaacaacccgtcatagttttaaggccatttaattggttcttattgtgcttgtgtgtgtgctataaatccttcgtggtttttggtgaccctttgggttctatagttagtctaaggtaacccactttgagaattctcataaagttgcatgcttttggattggaaggttgttgcaatggggaaggttgtgttgttgtttctttgcatggtattggtggtggtgcctttggcttgtactgattcaattcagaagcttgaggttcagaagcacttgaagaacttgaataggcctcctgttaggtccatcaaggtagaaagagagatagagagtgcgtgtgtgtgcgtttctttctttctttatttctgctatgacttttatttctctttagcttttttatgccgtttatgatatctctttcttttgcctcttccactttttcactgatggctaaactgttttttctaattggtgtttgcaacaatggacctttttcggggtgaaaggaactttaatcctggatgctcatgttgtctcacttgggggactttcttttagtttctttcaattgttcttgaatttagagcagaatcttcttattgtgctttttagtggtgccttttctgggttttgctttgaattacagtgttattggtttggttctttggatttttgacggcatacatgagcatagttcttttttttgcaagtttctaatttgcatttgtgttgttgtgagagcagagtcctg

SEQ ID NO: 22317 - DNA, 665 bp, Glycine max
  Intron number 1 from transcript Glyma08g03560.1 (locus Gly ma08g03560) derived from phytozome v7.0 (chr-ID Gm08; pos 2515418 to 2516082 reverse strand)
acaaccaggtaattaaaccttctccaatctcaactttccctttccaaatatacctctctttttaatataattttttttacactattaactaattacaaataatataacttttgaggcaatcaaattttattatatatgacaaatatatgatcagatggcggtataattctttttttctcagtctgttctaattaaattctttttcttttttttttagattttgaatgtttgcacctaattcaaaagtagtatgcaaagatcacctggtgtaggttaactactgggcttacttttcaaagaggcacgttgtacaagtatattaaactttccagagaaatggtttattggttattagtatttgttatatcttcatgcatagtgcctaaggggataatgaataaaataaaaaaaacaagtgatggattaaaataatactgaaaagatgataaagtatgcgtgcactcttaaactttattgtaatcacacaagaattgctccgttacgttatccatttctatcacgagactttgttgtcagtttatcccagttgaggcatcttgatgttgttgttgatcactgataataattgatttacatagttgtagctgatgcatttttcgttatggacagtgttcatttgttgagcaccgcaactacgggattgt

SEQ ID NO: 22318 - DNA, 451 bp, Glycine max
  Intron number 2 from transcript Glyma08g20800.1 (locus Gly ma08g20800) derived from phytozome v7.0 (chr-ID Gm08; pos 15789510 to 15789960 reverse strand)
actgtccctgctattgaggcagcttattctcttgggtaatctctgtttctctttcactcttctttattacatgtaaattgtacctactaagagaaaaaaagagaatattttctgtgttcacttttaattataaaacaattacctagagaaaacaaaaaattgttttgactgtttggagaatgaatatatttgaaaataaaaaacaaattaaaaataaagtaacggttttgtaattaaaagtaacagcaaaaaatatactttttcaaagtaatctagtagcccttaagtttcttttattttttctcctaatgaacacacccctgtgatcaaatagctagtaaaacgtgtgttaccattaatttttcttttgttggttggatgaagattctaattaatggctatggaaatgtattcaggtgtcacctgaagattgtgagtgacgcaaacattt

SEQ ID NO: 22319 - DNA, 356 bp, Glycine max; identical to SEQ ID NO: 18488
  Intron number 2 from transcript Glyma06g01850.1 (locus Gly ma06g01850) derived from phytozome v7.0 (chr-ID Gm06; pos 1170209 to 1170564)

SEQ ID NO: 22320 - DNA, 510 bp, Glycine max
  Intron number 1 from transcript Glyma08g24810.1 (locus Gly ma08g24810) derived from phytozome v7.0 (chr-ID Gm08; pos 18971607 to 18972116 reverse strand)
ggtgtgttgttatcacttctcatttagtaatgttcagatgatatttgttactacataatacattgaatttctcccatgtttaaatagaaaaaaaaatgattttttaacaactcaaagaaaattaattggtggttatgctgagctaggaaagttgattacttggaatttgtgtgatgttgttcgtttcttgtaacattatggtgcaggttaatagaggtccaaggccaaacttaccttaaggtttgaactgacagactacaatacactcttcacttatacaatccatgattgtgttacacccttgtgcactccttccttcttgcactaccattacatgcttcaaacctttttcccataacaatcgctttgtgccatcttcaatggttccgcggctagccctgagctatgccagaacaaggacattctcatgtagtgctagaaatcgactgaaggatttgaatggtagggacttcagtatagacattgttaacgaaaatctggagcttgagg

SEQ ID NO: 22321 - DNA, 931 bp, Glycine max
  Intron number 2 from transcript Glyma07g02200.1 (locus Gly ma07g02200) derived from phytozome v7.0 (chr-ID Gm07; pos 1528178 to 1529108 reverse strand)
aaaatttaggtaccttgtttttgttttcttattcatatatatcaaggttttaaaaaatggtctgcaaccgcaatttcagcctcaacttcaaggattttgggctctcgcagagtgccacgtttgtttgcaatttcctgcgaagtcaaggattgcaacaaaaccacaacagtgactgcaaccacagtttaaaatcttattgtatatacttattttattagtattacactattacgattaaactaagtagttaagttttattatttaagttttgtatttgattgtttatttatcaaagatacaaaatatactaaaggaattatatatagaagctgagactgaactcaactcttcaggaaaaaaaaatggaaattgctaccttaaatcgatttatacctcataagaattcagctatagtatctccattctccattacataaatcatgtgttttgatgtgcctttcttgaaaagggaagtgagggaatatattgtgatgagcattgatttctgcagcatgggcttaaaaattgagtacacgtttttattttggtaaagggcagtgagggtatatgttgtgatgagtattgatttttgtagcatatgcttaaaaattgagtacacatttagcttacgaaatttggtttgacattgagagaaattgtacatgtacatatagactgatacacatcacacagcatgatcaatcatgccttgtctaattaagaaagttaaaatgtcaacaaacgacaagcttctgtctcattttctatatgcaatttcagattcttatttttctttctgaagggagagaaaagacaaagaagtgtttttttaatttctctttaatatttttatataccaattgaagaaattggtttgtaatgatatgactgagaataattttgttcctcatagcttcagttcgtataccaa

SEQ ID NO: 22322 - DNA, 772 bp, Glycine max
  Intron number 2 from transcript Glyma06g06660.2 (locus Gly ma06g06660) derived from phytozome v7.0 (chr-ID Gm06; pos 4757201 to 4757972)
gtttccccagtgttgacgattccaatagttattgggtattttcattattcatattgttttttcttatttgaattgttttctgtgaatgaaaaaaatccaaggacgtgagagccaagtttgcagcattatctatgtttacggcttaaagaattttacactatcaactaattagaaattgactttttaagtaattattaaaacaatcaacaaaatgttcaattatatatgacaatttatgattagataactctgtaaatcatcgtgttcttattaaatttttagggtgtgtttggtttgcattttcattttctgttttcatttccaattttcattttcaattttgaaaacatgtttgatttgacttcttgttttctgttttcatgaaataaaaatactgaaaatttatgatatattgacttcttgtctttttgtatttttagatttgcttaaaattacattcattgccaccccaatttccttttacctgaaatgaagtttctgttctcaactgaaaacactaaaaaacgagaatttatttttttcattttctgattatttcctgttttcattttcactgaaaatgtttttagaaatctaaccaaacacattttcatcaccgttttctgttttcagtgaaaatgaaaacagaaaataaccaaaccaaacacccccttataaattttgctctgccgcatttggtttttgtcttgaccttagatacgtgcattgttttgtagattgtaagacctgagccaggaacttctgctaaaca

SEQ ID NO: 22323 - DNA, 264 bp, Glycine max
  Intron number 1 from transcript Glyma06g11400.1 (locus Gly ma06g11400) derived from phytozome v7.0 (chr-ID Gm06; pos 8748625 to 8748888 reverse strand)
ggcccaccattttgcagctcaatctaatcacaccggtattttcacttccctgaactgtatacatctttttaatgccttagtttaatcaattcaaaacattatctacttttaagtagaagaaaatgctgttccctttttgcaatctatttaagaaacactttttttggcttataagtttatgataggtttatctccttaaaataggggaatggaatcataattcattagttaacaatttctatcattgttgtgtagattcttcta

SEQ ID NO: 22324 - DNA, 630 bp, Glycine max
  Intron number 3 from transcript Glyma07g05120.1 (locus Gly ma07g05120) derived from phytozome v7.0 (chr-ID Gm07; pos 3794608 to 3795237)
gcgttaaagacattgtactaaaaggtgggatatcacagacttaacttcaaaatttgactttatccccctcctttttccttgcctttattttttttccaatttacccttttagccatcgttgtcttcctgtttcttttcccttttgtcttttttatattcttttttatattgtgggtcggttgaatattaaaatttcttacagtttcattgtattctgagctgatgagcatgatggtagcttgtgcggatactgtttgcagcttctgacataacctaggatcatatatctcatgtatccaaattaaaagctgagtgctagcaacatactggttaaattagaagtgagacttactaaattttgtaaatttcagtaaatttcagtcaatattgtatagagtgtgttcagaagattttgttagagagtaacatttctcaaattgagaaacaaatttcctcatcctattggggtgcatttgaaattgtacggaacataatacaaataatggactacacaattttactaatgtagtgaattgcaatgcagataaattcacagacagcatagagccagttttgccaaatttgagatatttagaacctgctaaagaagggttcttgtttaggaaccaa

SEQ ID NO: 22325 - DNA, 689 bp, Glycine max
  Intron number 1 from transcript Glyma07g10300.1 (locus Gly ma07g10300) derived from phytozome v7.0 (chr-ID Gm07; pos 8601737 to 8602425 reverse strand)
atttgccaaagttgagatttttacgcacttaagaggtaggtcacttgggttttgttcggtgctgtttgttggggtcatctgtgattcagcgattgtctaattcattcctttttatgaatttgggatcatggtgatcgttgatgggtttttgcaagtggaattgtaattgtgtgtttttgtgtgtatgcttttagagattgaaatagttaaacactctttttgttgcgcaccctcttgggtttatttgtcctcaatttgcatgtttgctttgtgggttaatggcacattgtcactggtgcttagatcttagaatttgcaggattatgaaaagtttcataattcaacttatgttcttcaacttttataaaaaaaaaaaaaaagctctctcgttctacttctccaaaagctgagatgtataaattaattttatctgatggaagaagtttagttcatttttcttcttcttccataagtgcttattaacaagtttatttaccattgtaagaattgtttttagcttattagttatatgtctgatcactcggttccaactgtaatacctatatgtcatgcagatgggagtggataggttgagcctttttggttggtacctggtaatttgattttatagttttgaggattcaatttggtgtgactgacttttttgggaaccttttatgtttcagtaa

SEQ ID NO: 22326 - DNA, 757 bp, Glycine max
  Intron number 1 from transcript Glyma06g48240.1 (locus Gly ma06g48240) derived from phytozome v7.0 (chr-ID Gm06; pos 50504586 to 50505342)
ccttaggtacaattctataccatttctttgtatatgatatcttcattgcatgcttaagctagtgatgaataatatcaatacttggccactggccagcgtttaatcatcatgctgaatagcacttgagttattactaataagaaatatgttgatattcaagttacataatattagctctcttgatgtcacactcactagggggacaagattttaaattgctatcagggtcgcagtttcgtcacatttcttgatattgtaggaaattgcagacaaatgcagccaatgtacatggccacataacgtgatcgcaagcactaaaaaaaccttgacgttataggtttatacctcatttcaccgttttacgaatagaaaagaaaaaatctctttgatgttacatagctaaaatttttattaatagtacaaagaaaatgttccatacttgtctgatatgcttacccccaccatatggatttattttgtagttaacaactaccgaacagcaataacatgccaagtttttcttataacgtgtttatttctgagttatatttcatttgactagcgttgcagcaaaaactacaatagtaacttctgtattatttgcaccattttacgtagttttacccttgttgaaagacgtacgtatcacttaccaataagagcctacatgtacatagcttagctattattacttaagactactaaaatgtcgacaattgcagctcagcttctgggtttcccaacatatattgctccg

SEQ ID NO: 22327 - DNA, 807 bp, Glycine max
  Intron number 1 from transcript Glyma08g42140.1 (locus Gly ma08g42140) derived from phytozome v7.0 (chr-ID Gm08; pos 42073780 to 42074586)
ggcgcatttggcatcttacacgcaagaagaaacaggttcttcttttttctttctttctttctttaagttagtttggttgaagaatgaatggaaaagaattcatttgtaattatatatgatttgtaaactaaatgaattttgaggttgatatgatttggaagaagtttcatgaaggaatccattttttaaatccaatgatgtgctttgtttttgagattctaactttcatggcttgattgaatcattgctgatataaaatcaaatgcatgatatcagtctgcataggaagaagtgtttgtttttatcttgactgatattttgatatttttaaaggatgttttttaatttctctttgtgatttgattgattcttctttctttctttctttttcttttttctattaaggggggattggtgtgactgaagctaggataacctgtaattctcagatactattaaatagatttcaagtaatttcaattgaaagaagaccatttagtcatatgtatatataagtgtacactgtacattaaagttaacattgcccatttgtttggagattcagtccaatatatttattttagctttgtcaccattgtgaaaattaccaatggttattgttttttgttttgaaattcaagacagagaagggaattttcttgctaggatagaatacactgtttatttaagtgttcaattcgctatgcttggcccttcctatgaaaaatttgtgggaactatcatttggcatggagttacttatgtaagactatgatatgctacacttgtgtggcttgtgtagttgga

SEQ ID NO: 22328 - DNA, 628 bp, Glycine max
  Intron number 2 from transcript Glyma08g10850.1 (locus Gly ma08g10850) derived from phytozome v7.0 (chr-ID Gm08; pos 7892280 to 7892907 reverse strand)
ttgggaaacatctattggggaggtattgtatttttgtatgtataattatgtcatttttcatcatctcattctcaaaccccatggcatatatatgctctttcttcttgtcccctccttgctttagataagagtttcttgaaagtatatgaatggactccatgttcttttagtcattctgaactagaaaatagttgaatgaaccattttaaacgggagacaagttcttccagaggttcaacatctcttgaatgctgttcaggtatttgtcccactatggcaatgtagctatgatctaccaataaaagcactcaaactaatggctttgtagacattattacataagtcattagttcagttactaatgacaatctttctttttgcagctgtaattcaaactacatatttttttttattatagaaaatgttaatatatttcatcattatttaatctctgtattgtggattttaaactttcaatggataagtgtatctcaaagtttgtcctaatttatcttaggactctcctctcatccctctcactgacatagtgattagcaaattttgtaatcattattaattattattacctgtatttatattttaatataggttgaagctacctttcctg

SEQ ID NO: 22329 - DNA, 1040 bp, Glycine max
  Intron number 2 from transcript Glyma08g25070.1 (locus Gly ma08g25070) derived from phytozome v7.0 (chr-ID Gm08; pos 19313259 to 19314298 reverse strand)
caacctaacaagcatttcactgaagaagctacacggttagttactttagagtttgtttcaattcaatgacaagagtacttaaacacacacatatacattggacttgaatttcaccaaagtggtatatatgtaggttgaaatgtatgctacaatagttattatacatgattatattttactatgtttaaatataaatcattaaacatagtagttttattatttcattaatatgaaataagttgccaaataaattcagtgaaataaatgcaatttacttgttctaatagttatcctctttaaatcaaggatgaaagattataacactagttaaagatttttatctacctttttgggtagaaattatatattacattctttaattttttttttatgtgtttctacatactttaacaaccaaaaggtattgaaaatttctttcttcttggttatgcatttttttcttctattgtgaaattatatcattgttttgtcttaagactatgcatatagttttcatagaaatactagcccgtatgcattaactaattcatcaaactaatagtgcattgacattatttctattatttgcaatctcaatgcttaaaatttctatgaaaattgaaaacaatgggactatcatgcattactaataatcattaggctacttcaaaagaaagtaaatttaataaacctttaaacatgagaataaatcttgtttgaatgttctatgttttacttctccaaataatgcaattacaactagatagttcattatgaatgcaataagattttagaaaaaagacatgttgattaagcatgttcatccttacatttgtgtaattgaatgaagccattgatattttttgtttatcttcataagaggtaaaaaaaacattaaaagcctctaatcatcttaattgtgtaataataactatttgatagaacatttgtgttgtgaattttcatgacaaatctaagaatttgatgtcttattttctatgataggttttattgttcagagattttgttagctttagaat

SEQ ID NO: 22330 - DNA, 556 bp, Glycine max
  Intron number 1 from transcript Glyma06g32470.1 (locus Gly ma06g32470) derived from phytozome v7.0 (chr-ID Gm06; pos 33227311 to 33227866)
tctttggttggagctacaagatctggcttcaaaaggtgatttcccttcttttgtattaagcaaatttatatcaaattttgattttttttatcatgttttgagtaatgcattaataaatctgggtattttaaggattgtattaaaactaatagcatgtgtcttctaaatttacaatgtatgttacattatacgcttatataatgggatgtcaaagttttatcaattcacacgaaattgaattaacaaaatgaaaagaaactctattgtaatcgattgaagaaagaggaggagaaacaataataaaaggttgtatacttacaccttttcttcacccataaaattttagaattcctcaagtagatgagcataatcttaagttataattttaaatatcaactttaatatttatcactgcattttttaatttatcttttctcttctttttattaaacttcattacattatttatcatatattttttttcattccttaactaagtttacacactaacaaagtgttatattatttttgtttttcagactatttagttatattt

SEQ ID NO: 22331 - DNA, 725 bp, Glycine max
  Intron number 1 from transcript Glyma06g44330.1 (locus Gly ma06g44330) derived from phytozome v7.0 (chr-ID Gm06; pos 47267279 to 47268003)
gtaataataatcctcaagggaagagaaaagtcaaggtagctaaaaagtttatactttgaaattatcttctattgtgttttttttttttttcctttctaattagtgagttagctagtttcagtgaagctagcaatggttcatgtcatgagacatatgagtcatgtgccactgagctaactcttaaggttctgtcactgtctcaattatgggtcttgacaaggttttccttagtgtcaaaagaacactcacgggcaccctagggtgtagagagagagagagattgaagggaaaaagtagcagaagtgttaattataaaagaaaaaaaacttagattaattctataaagtacttttgaaatattttcccatcataattagtattttatctggataatttgtatttacttgcaaatttccattacatagatagacatatagactatcaaaataaaacttcaattcaaatttttttaaaaaagtaatactaaaagtactaaaataactgcatctaaattctgtcaaataaaaatcttgacccttagattatttaggggttttgatttgaagtatagatagtcatggggctgtttttttttttttggtctaactgaaaattcttatttgagacctaactcgagtattaatatgtgagtatttatgttttttcttttcttatctgggttgtgtgtaggtggattggaccccagaattgcacagacgattcgt

SEQ ID NO: 22332 - DNA, 871 bp, Glycine max
  Intron number 1 from transcript Glyma08g23560.2 (locus Gly ma08g23560) derived from phytozome v7.0 (chr-ID Gm08; pos 17958319 to 17959189)
tgcgtgtaattccactagtttgtcttgtggtgagtaaatgaattagtgacatatattattggtttaattagtcattgctcttatatctcccccaactttttattttcatctttgtactttaaattttgtttattatgtgacagttttacaccacaataaaccaacaataaagactagaatattaaaaaaattactaatataaattttttaaatacgagaatcaaaacaaaagtttggcacagatataatatttaattcaacttttttttttaagttgccagtacatgtataataaaagaaattatgatatgtaaattactttttcagtaactcatttttttaatctctctttttctgtggtattataagctttatcatactttttttttttgtcaaagtgttgaataacaaattaaatatttatcaaatattttctctcttagaaataatacatttaaaataagtataatatgagagttaagaaaatataatttattttacttcatccttttgtttaaaggatagacttattttttttaattctattataacatatttaaaaaaaattattttattataattcattccatcctattatattttaatttattctttgtcccaaaagaatattttaatttattccattccattctccaatataaagctttttctttctttatttaataaaactgacatgccttgaatgataattattatttatgtatacagattattaagatgagacctcacttgtaattggaaacagtaccaaataaaaagcgttacagaagatcgatctgcaccataacataaaatttgacttattttgattttttatgattgatactagtgtgagcagttgataagagag

SEQ ID NO: 22333 - DNA, 655 bp, Glycine max
  Intron number 1 from transcript Glyma06g42400.1 (locus Gly ma06g42400) derived from phytozome v7.0 (chr-ID Gm06; pos 45756921 to 45757575 reverse strand)
tcaaagtcttgtgcctctttgtttttttctcttgggtattattcagccttgatccaaagttctcttattaactatcattgttccttgtcatctgaacatagtgaaatcgtaatagacaatttaacatgctaaaaattggctaaaatataatttttagtacattttattttttggttttaatttggtcttttatgtttaaaaagtttcactttagtttcttaaagtactaaagtgactctattggaccaaattgatcctttggttagagtaaattgacagaaaaatcaacttggtttcttattatttatctaacttagtaaattgagccttaaccacaattagctaaaattaaacattttttatgttaattttagttaacttgtcaaggctcatttgatgtgatatctcttagagtttgtcatgtgttatcaagttgactaagttattatagtaaattgagagaagagccaacttagtctaatagagacattttaatagagtaaaatgaaacttttaaaacttatcagaacaaattgaaccaaattataagatgaggaactagagttatagaaaattgatcagaattattttagcctaaaagtttttttgaaaaatggacagttgtagaaaatttctggaaatgtttttcaggttg

SEQ ID NO: 22334 - DNA, 728 bp, Glycine max
  Intron number 1 from transcript Glyma07g20430.1 (locus Gly ma07g20430) derived from phytozome v7.0 (chr-ID Gm07; pos 20664865 to 20665592 reverse strand)
gcttaactattaacaatatcaaggctataatcctagtgagtataacaacatcttctaaatcctttcttttatcaatataatctcactcctttctatagaacttagacaaatgtttaatagttacaccagaatatatctcacacatgagctcttcaaaattttgctgtatgtgataatttccgtagtgtattactggatgccttcggcttataatatttgaatttaactccttcaaagtgagaggttccttttagaggattagtttctatgttataactattaatgtaaaaagcatttgttgatatagtttagagtttattatctctttaatccttaaattttttacgaattctatttctaaaccttgatctttatatatttatttttaatcttttaatttttttatcattcttatttttaattccttaattttttttctgaccttaaaggactaatagcaaggatagaaaaaattaagaaactaaaatacaaatagaaaatttagggaatagaaataagtttagggactaaaaagataataaatattatattttaataacttcataatttgttatgtgttaaaaatttatcccaatctgtaccattgatcattcaatcaacagttcactttatactctaaattacacttctcacataactatctcttaggatatcctgataattacttttcaggacgtctttgctgctggaggtgagacatctgcaac

SEQ ID NO: 22335 - DNA, 763 bp, Glycine max
  Intron number 2 from transcript Glyma08g02060.1 (locus Gly ma08g02060) derived from phytozome v7.0 (chr-ID Gm08; pos 1404661 to 1405423 reverse strand)
ataatgtaagtgctcacctctatgtacccctgcaaagtgaggacatggtttttcaaatagtataatattttccaagtaatcatgatgcaattgtttttataaattcgtatgatattattaatctcttatatattgagtgcatatgttccttctgagctatcacagctgaaattaatggcctcaataagtacttaagattttcctcgccagcagtactgggggtcgagtgagaatttttttagtgttctatatatttcaatttctcctaataatatcagagtactctgcctataaaattaaataaaaagatatcaaactattctatgggaatgccgtcaatggaatgttaaacatattttagaactgacaaaccctgaagctaatttccttgtaatacaattttttttttttcaaaaactgttattggcaagaaagatagtatcaaatatagatatgaacggcaagagatgatttgtcttttttcgtatcctcttcgacaagcatcttgtaagaaaactattttatacatacatacgtgtgtgtagatagatggataacgtagatgtaaatatagacagataaatatgtagtgtgtgagagagaatttatctaattcaatttaatttgatctcctattgtccgtttgtctacatttctgaagcttgttctccatttacaattacctttttgtttttttaattacttaaaattgctatcatctttcacagattattgccatcaaggatatcatacgaccccccaa

SEQ ID NO: 22336 - DNA, 978 bp, Glycine max
  Intron number 1 from transcript Glyma08g15840.1 (locus Gly ma08g15840) derived from phytozome v7.0 (chr-ID Gm08; pos 11525027 to 11526004)
gcaaggaagataacagtgtggtaagcatgttaatttcctttgtcaacatccccccttcacttttcttttacaatttgattttgaataatgctatttctacctacatttttgacaattttaaatctcaattcaagtatgtttgataaatatttttagttaatttttaacttttttgttagttgcaaagtttatttaaccatgttagcagtgcttgataaaatttttgtaataacctgcaacatttttgagacatcatttcaagtagtattttagtttctaacttcttacgtttttttttagcttttaaaaatatttgttaactttatcttctacccctttagataatataggattttattaccatacggataaatataataaatcatcctacttaagtttatgtgtttttttattttattttaaacttggttgagactgggagtattttaagatataatataaaattaattgtagaatgcacaatatgaaaaaaaagtataataattgaaactgaaccaaataattaaaatgattgatctttaaataaacaattataagagtttaaaatcaattaaaaaagtaaaattataattacccacaaatatattttatccataaattttattttattttttataaaatatcatataaacatttatatatccaacatttataaagtgatttcagtcaacaacttttagcggtcaactaactttttaattttttagttttaaggtagtattttagattattttttttaagtcaaacatggcctacaagaatagagatatgaaaaagtgatagaaagataagagagaaaagtgaagataaaataagtgatgtattaacgattaaaaaaagggacatggaaaaagtgtggtgagaaattattgcgagaataacattattctttagtttatcgagctatctaaaaatgtgttgctcttttgtgaaaggcatttttgaaagcgtggagtg

SEQ ID NO: 22337 - DNA, 509 bp, Glycine max
  Intron number 2 from transcript Glyma05g34950.1 (locus Gly ma05g34950) derived from phytozome v7.0 (chr-ID Gm05; pos 39120715 to 39121223 reverse strand)
cttgctcagaagtctttccacttggaaatttacaggtactgtttattgtttattgccttcattctaagcaatgctctctgcctttcagcattgttgtgatacattagtaatttattttgatgatttggctgtttacatgttcggtttccattaagtttgagtttgtcaatgttttatgctttactcttctgtgataaaaagttttctagtgaaccaaaagggataatgaggcttttcagcctgtgtgctaaatgccacttaccattgttaaaagtggaaaagttttggctcataggtaagaatgtattttaattgtgtaatgttttaactattgtagtttaaccaataagcaaaattctttgtttggaatctggttagtgtgactgtaaacgatgataaacaaatgtagagttgagggacactttttttgcaattatatttccatggatatctatcatcattgttaaggataaattgtgttagcagtgacttgtatatttgagcagata

SEQ ID NO: 22338 - DNA, 729 bp, Glycine max
  Intron number 1 from transcript Glyma08g05700.2 (locus Gly ma08g05700) derived from phytozome v7.0 (chr-ID Gm08; pos 4063189 to 4063917 reverse strand)
gatcatcacaaaaaggttcttctttttctttttctttttcttctcatcgccccatctccgctttgctttttaatgcgatctgcctccactatcttttcttttatcctttcgcttattggctactgctcaagtttcgtttttttccacacccacatccttatcttttttgtttgattattttatcgtttactgggtccatttggttgtatccttctctctctctaagacaagacgccaaagcattcagcaattacctgatgcaaaggagatgaggcgtagtctggcatgattttgattaattcctttcctaggcacttttcttaaagtactaacttgttggtttctactaacaaaggttgattaatcctccttcatatcgttaggaatcaaggtttgaatttaggcagaggtgtccatatttaatgtctcataatgtcattgcctttgaaggaggaaacctgtgacaaaccaaaaaaaaaaagctctattgtgtgtgttctcatatgacatatggcatgttgtgagataaagtaccaaatttaatgtcattgccagtttatgcaaatttgatacattttgttttctttcttgatggattttatgctgaatagagattgtagtaggtcaaaagaagagatccaattaagttatagtcttctaattatttttctaatggtttctggtgatcaagcagggtgcacaagagacagagttttttaccgagtacgg

SEQ ID NO: 22339 - DNA, 1010 bp, Glycine max
  Intron number 1 from transcript Glyma08g26230.1 (locus Gly ma08g26230) derived from phytozome v7.0 (chr-ID Gm08; pos 20592677 to 20593686 reverse strand)
ggtttcttaactcccctggcttcttttcccctcaggtgattcatttgaccagtaatagcgcttcctgaactaaaaagaacaaattttgtgaattaatttcaaaaggggtgtggtgatttttttgatagaggggggtgggatcgattgatggggatgtgggattgaagtttggtgattttggggtatatcagtgtttttattttaatctgatagtagcatggtgctctcaacaattcagatttgatctgaattttagtacaattgtacagtgacatgtgttgtgtttttagtggactgattcaggagtgtctgaggatttctgggtatttgaaattttgaatcgcctatgtgcagacgaggagttgatctttggtgcattcaatatgtgaattaatgaagtctttggtattattggagggattgatggagtggtaggaataggatttttagatcacacttttacaaaaaatttggaggtactgtgtgtcgtggtaaaatgattgttggaaataatctaagtcccacatatgctaaaaataatcccacattagaatatataagtgaggggcaaccctcatcccttgagttagcttttggagttgagttaggctttttacatttctgatcctaggaccacacttctgctagtcctcgctttgaggtgacaaacacccaccatttgttcacgccccgagcgcccaggaagtgattggatttatttgtcttctaagaacgaatgtttgtaccttttctactcgttcatgacttgactgcatgttaaatttcataaatgttattaaagatccgtcttcccctagtaaaaaaatagtttctttttctgggtaattgttcagggtttgcattatattacatcatttgttggtcgcgctgctgggtctttttctctcgttattattatcaatgtgatctttttgccttggggatggtggatatactcttttgaggttttcactatcgcttcaattcaatgtatacagagcccctttggg

SEQ ID NO: 22340 - DNA, 449 bp, Glycine max
  Intron number 2 from transcript Glyma08g40680.1 (locus Gly ma08g40680) derived from phytozome v7.0 (chr-ID Gm08; pos 40412261 to 40412709 reverse strand)
agttagtataacaatcactccttttcactttaactcatttgttcctaattttaaaaatcatatactaatataaattttattatgggtaaaatgcattttagttagttttatgtttaaaatttgtcttaatttctatattttaaaaatgatgattttgattttcgtaatttttttttataatcgaagaattttatccctcatcctaatatctttaagttgtataaaaagagacaaaatttactaattataaaaaaaaacacagaataaaatcaatgttttaaaaatgtaaagactcaaactaattttgactgaaaaataaaaaacttaaagcatattttacacttttcttatattatagttacaaataatttctagaacttgggaactgatttggatttacaatatataaatgaaaacaggaggtatctcaacattaccaagtacaggga

SEQ ID NO: 22341 - DNA, 887 bp, Glycine max
  Intron number 1 from transcript Glyma07g07870.1 (locus Gly ma07g07870) derived from phytozome v7.0 (chr-ID Gm07; pos 6522657 to 6523543)
atacccttttgagttttgattctctctcctcacatgttagtacttttcctcttatctctccatgaatttgaagtataattcatcttgcattcatagcattatcactttcttgtatttggggtgtgaaatctgttctagtcttcacaaaggttgtcactttctacgtggtgtttacatgtttgtggcattttgtactccttacttgaatttgaaactgggtttaaaacaatttatgattttgacttgaagtggttcagtaaaatggttaaaagaatcactttttaagttttatattttctgggtgtgttggcatcaaagggtgagtgaggttaatataaaacatggttatgggtatggggttgccatggaatttgcttggtgtttaaggttttatcatgggttggtgagagtggacctgttacagttcacctggtctttatcttcaatgtgaagcctttttgttgtttctatatagtagtttggtaagatgtatgtaaactagcttctctttttgtcttctctttaattggtctactagaatgtttcccttgtttgtgtgaactaccttctagctaggctttccattttttccattgatctatctttctactttttggttgtcttcaacatgttttgtaccttaaattgagtctaggtccctatctcttgcttcatatgtatatttcaatagggtgtcatcgttgagaaatttcatctgtgggaagcctataacatgttgctaaaataatttaagcacttgttggcaaacttgtaaatgatttcatagttttctgatttgtgcatttttcttttcccacaaaatttgtgatcatggactatatatgggaacagagctaggtggtattgaatattgggagggtcaaagt

SEQ ID NO: 22342 - DNA, 482 bp, Glycine max
  Intron number 1 from transcript Glyma07g37020.1 (locus Gly ma07g37020) derived from phytozome v7.0 (chr-ID Gm07; pos 42197149 to 42197630 reverse strand)
gggaaaagaaaacttcgggttcaataactgttgaggtgagatcttttcacaattcattttcccctgctttctctaaatttaactcaattcttggatctttattttcatttcaatttaaattctttcatcgtcatcgttagtcgtagattccaagatcctgattgaaaaatgactcgaatggatattgtttagggttttatatgttcgatttcatttttctttcttcttcttaaatctctatgaaagaaccctaactctgattgttgcatctgcaacacacctcaacgctcgtgattttttgattttcgtaggatttgcagtattgggtttttcgttcattttgttatttgaatgatttttttttcctgctattaatctcaggtgttgatttttcatagtgtgcaattagttttttgggaagttagatgctgttgagtttattcgtctgccacaaaaggcaaacttgaggacatatataaaac

SEQ ID NO: 22343 - DNA, 541 bp, Glycine max
  Intron number 1 from transcript Glyma07g36830.1 (locus Gly ma07g36830) derived from phytozome v7.0 (chr-ID Gm07; pos 42101891 to 42102431 reverse strand)
catatattggatcttaactgtcgcataatatactggtcagccattagtttcagtgcttcacattttttttactattttgttttgttattaatttcaatattttttttcctattctgcaatgaagataatttaatgaagatgcctaatatatgaatgtctttacttttatagaaactttcacatttaacttttctaagaggagttatataagttaattttagcttatgagagaaagtgaattcattgtcttttttttctatgtatacttagggaaaagtttcttcttataaatatttatggagaagtttcttcctataaatatttatagaaaagtttctccaaacaggaccttatgattagccccttgctgaaaaatggatgtgctgactgtgtttgaggtttgatatatgttgactgttgagtgtgtaatgttgtatggtgatgaatgcatgaattcagggaatctacattaaaagcttgtttttgaataaaaatataatcggggagtaattttgcaggaaccgtagtgcggaaaatctat

SEQ ID NO: 22344 - DNA, 866 bp, Glycine max
  Intron number 2 from transcript Glyma08g40970.1 (locus Gly ma08g40970) derived from phytozome v7.0 (chr-ID Gm08; pos 40936731 to 40937596 reverse strand)
cacttcaatttcagaaccaaaaacttcagactgaggtttctaattttcttccaacttctatgtaagattttggtttcacatgtgagaagaaaactttaaaaaagaagaccaatttttcttaaattactaattaaggccaaattcagatgagtttattaacaaaaaagaaaataaaattaattagaaaggtaagcaaatcaaactctttccataagttaaaatacacctcaattttttaagaaactttcttagttaacttttccattgaggtacgtaagttaacttataagagaatattgatgtattttacctcatgaaaatccttttatatctttctcataagtgtttgttgagaaattgattcaaattaaattagtcctaaattgacgatggaatagagggatcggatgttcaagttctgctatatgtcagattgttttaattctgtacaataaagctaggtaatcacgatgcttttctttaattattatgcttttccaaaaaaaatatttattatggctctcagtctcagagccttttatttcctttcaccaacttctggaactgatatgataactttctataaagctgctttttccaatcatcctcagtaacttcatgaagaccaagttccactcaattacatgtttgtcatgcaatgcatatagtttccttggtttggaaaaataaacaatcatttggttcatttttgacattgacacctttgttttaggctgatattacacacttgataatactccaacttttcctgcatgtagtattattttttggaatagctaaaaatttcactgctgtcacacactgctacagatattggcactgaaaagcagagaaccaactgaatc

SEQ ID NO: 22345 - DNA, 770 bp, Glycine max
  Intron number 2 from transcript Glyma07g26500.1 (locus Gly ma07g26500) derived from phytozome v7.0 (chr-ID Gm07; pos 29325967 to 29326736)
agtcagatttcaaacaaaggacttgaaagaagccagtgccacacaagtttatgataagcctttttggcaaccttagccttaaacgaaaaaagctcttagtttggaattatcctatactagttacctattaggtaattattaattcaaattttccttggcaatatatagtttgaggttataacccctataggctagatattagtattgtacaagtcataatgtcttagtcgtgatatcatgttactcatgtttggacttttgttgagctaatgttagaggcatatgtttgtcttcaccttagaaagaataacaatatattaaaatccaaaagtaacaacttgttaccaagaagcaaataaactatttgagtgattaggaagaggaaaacaaacatatttgaagtaagtcttatgtctacatgaattccaatgcaccaaaatggagaagcaacattttattactataaattttaaattatgcattacatgacctttgagtacttgtttaattttttttgacaaatagtctagcaactaaataatttactttgttatttactacatacttgacaaattgtattaacagaaaattaaacacatactttgagtgattgttaaatagataaacaaacatacataatttagacttcttaaatgtatatatgtttctttagattattgttaagattattattattattttgctaatggtttatcaatacttatggttgagtaggagagatagcttcatcacacacagggccttctgtg

SEQ ID NO: 22346 - DNA, 234 bp, Glycine max
  Intron number 1 from transcript Glyma06g19920.1 (locus Gly ma06g19920) derived from phytozome v7.0 (chr-ID Gm06; pos 16285866 to 16286099)
tggtatgtaactaaactaaccgacaaccttaaattgatgttagatgttctgtttgttactttctttggattaattccacgtgttgcaatttgatgttttgaactcaccgtgaccaataagacagttgcttagttttttttctggcagtttcttcagttaccgtgattatttctatttttggttaattaaccaaataaaccgtaaaaaatgtgtaggtgaagaaggctatactag

SEQ ID NO: 22347 - DNA, 682 bp, Glycine max
  Intron number 2 from transcript Glyma08g17370.1 (locus Gly ma08g17370) derived from phytozome v7.0 (chr-ID Gm08; pos 12874512 to 12875193 reverse strand)
atcataattgacatccatagaattcttggaaacaggtaaagaatatatattactagcacagaaaatgagacagaaagagtagtaaaagaagaataggatccttcaataattttactaagataaatgttaactaatgttcatgttatttattaaaataattttttttattgagatacataaaattatgttactcacaataatgtttatgttttcttattatttgtacagtaaatattttttttaattttttaattaatgtcctaaaaatactagttaataaaatctttttactaaaagtaataaaaaaagtattatttgtccttacaagatttgccagacaaccaagaaaccactgataaagatgaatataccccttttgatatccatataatacataaccatgaccttaatataatcaactctcaagaagatcttcgaccatctaattttccttcatcctctcatattcagttttaacacaagaattcaaattttgtgtccatctctctcttgatagacattaaaaaacttttatatatgacatgattaatgtttatgagaaaagagataatacacgtgctggacatgatttaattatcatatacatgagaggatgtgtatataattcagtgcaaggacatgcatatattcatcaatgccatgtgttattggtctactgcag

SEQ ID NO: 22348 - DNA, 516 bp, Glycine max
  Intron number 1 from transcript Glyma06g02580.1 (locus Gly ma06g02580) derived from phytozome v7.0 (chr-ID Gm06; pos 1724629 to 1725144 reverse strand)
tgttgatttcctacaccagcaacacttttcccacggtttctttctttctcctcttcccaattataactatctgtagttaaaattagatatatatgcgtttgaattgtaaaactcctataatttggagtttccaactgatgtttcatttcgtctggaactttccaaatttggagattcactatattatcattgttattcttattattcctgtattccttaatgaaccaagtgcttcaaagtcatttaacgctgtttgtcacttagggcttatatttattatgttgagtaataattgagtttgagaatttgcttgcaatttgattgagaccacttgagcaaagcagggatgcgttgctactgctttatttattttgtttttttaatcagctttccaattgattttggttttgttctttaagaattatggctttgtggtttgtttcaccctttttcatttttgttttttgatcatcgataacaggactacgtgcccacggtttttgacaatttcagtgc

SEQ ID NO: 22349 - DNA, 477 bp, Glycine max
  Intron number 2 from transcript Glyma08g20200.1 (locus Gly ma08g20200) derived from phytozome v7.0 (chr-ID Gm08; pos 15256233 to 15256709)
acaaaaatattagtacatttagactcttttttccccttttgtttatcatgttttaattagtgaggcttaaatattttcgggtccttcaattctgtttttggttttttaaatctaaaagtaattatttttgtcttataattaaatgatagtccattgttcatctttaaagttttttttttcttaaaaaaaaatcatcttaccattttaattagtcttctaataagacaaaaagttggttttcttcgaattgggaagacaaaaataatcaaatttaaatttaaagaaccaaatatgaaaattagattaattaaaatgaggtgaaaaaagataaatttatgcattactttaacaaagaaatcgattttttgcagtgcttcaagaaattttgctttcttggccacgcaatctatgttctgaatgttaatattattgatttgaaattcttgaaaggtggtaaatacgagaaacctgcagaca

SEQ ID NO: 22350 - DNA, 314 bp, Glycine max
  Intron number 1 from transcript Glyma05g23670.1 (locus Gly ma05g23670) derived from phytozome v7.0 (chr-ID Gm05; pos 29396006 to 29396319)
tcgggtaatccagtttcttccttttttctctctctcattcgcgttttcaccgacacatagtgcatgtttagacgattgttgacagcattgattttgaagtgatatttatgtttggatgcttttattattataataaaaataagttaggagttaaattcattataaaatttcttttgatgatttttcattcaactgttacgcgggttttggttgtagcttgtattgtatgtagcgattatatcatgggtttggtatttgaaataattgagatggctaggcctagggctaattggtgatgctattgcaggggaaat

SEQ ID NO: 22351 - DNA, 489 bp, Glycine max
  Intron number 2 from transcript Glyma05g23670.1 (locus Gly ma05g23670) derived from phytozome v7.0 (chr-ID Gm05; pos 29396462 to 29396950)
tcgcttgcgctttcaagtttgttgttgaggtattgcaccatttctacctataattcacctttatctgagatgaaggttttgttggggtgctgcttgtgcatgactttcttctatctagcttataactattgctgttttggttgttgtttaatgtttgttaaatgattgtttggtgttaacttctataagtgaggagccttatgaattctctaagttagcacaaattgtgttatatggacctattgagaagagggatgtaagttactatgaatttagtggagtagcagcgataagcgcttaatcgtgcctggctttacttgagatttttacaagtactaagggtcattttgatctttttgaatggtttctatgaaagttttactacttgtcttgatttaaaaaacgatctttgtgccttgtggtggttgataattgtactttttttttcttccaggctgttgcattgttccgatcatactttggtggagc

SEQ ID NO: 22352 - DNA, 823 bp, Glycine max
  Intron number 1 from transcript Glyma06g06010.1 (locus Gly ma06g06010) derived from phytozome v7.0 (chr-ID Gm06; pos 4300766 to 4301588 reverse strand)
agaaggcgagggagttccgggaaaggaagacgtgggtgttaaacaattttaatggtagatacctattaaaatttaaaaagtaaactacaatgaaaactataagaactaaatgagtaattaaatttaaaataaatatttaacacattagtacacatgccaaaacaacacctaaaacacccacacaagttgatgtacatgtttcatgctatttttgaaatcactaaaaaattactaataagtaaacataaatgctaagaacaaagatgcgccgcgagtacagatagatagacacctatcaatattcaatctatcaaaacgctctttgttccgaaggcaaacacagatctatatgaaagagcaaaaccagtacactctctattttttctttcactaaattggattcctagaatctcagtggagccaattaaggctctgcgatatgcaccatacgttattcggtgttgttgtgcttttgggcggcgagattgagtgggagaaggagagataattcctcactcaaatttacatatcatcattgtaatttattgttttccattctgctccccttttgattgcattgcctaaatatccagcaacacggtaattttaaatttttaatgatttccctttttcaaattttaaacactcttaacaccgtaattactaattattgttgcgttgcatccttagttattaccagtattactatgctttccttgcaaacatttcgttactcctaacgttggttgtgtttttttgaaaattgactagtatcagggtgatggcagcgacggcggtgacggagacggaggcggtgtggtcc

SEQ ID NO: 22353 - DNA, 599 bp, Glycine max
  Intron number 1 from transcript Glyma07g05290.1 (locus Gly ma07g05290) derived from phytozome v7.0 (chr-ID Gm07; pos 3942521 to 3943119)
tcctcaacgacaacgattctgagcccgaagaccaggtttttaaaagccccacctttttggttttgattcaatctttgaatttatgaagcataaccttttttaaccttttgaattttccatgtgggtcttgtttttctgttgctatcaagcccaaaggagttgggttagctagaaattgcatttgaaaataggttagaaacaaccaactagggactttgaatttaggttgaagataatttttcttgttattattcttttttgttaattaaatgtctcaacatttagtattagagaatggtatagaccctaagttgattaaatgtctcaccagttagatgagaggagcttctacaaaagttatctgcataagttgattttagctcatggaagaagctcgattcattttattttcttctcttataagtgcttatagagaatccaaacagggtcacagtgttgtattgattttttactagaaaaatttcttggatgtttcgcctaaaattgatgcttggattcttgtttgtacaaaataaggtagagattgaggattatgcttgttagttgttactcaatatgtctgttttgactgcagggag

SEQ ID NO: 22354 - DNA, 440 bp, Glycine max
  Intron number 1 from transcript Glyma05g36550.1 (locus Gly ma05g36550) derived from phytozome v7.0 (chr-ID Gm05; pos 40386460 to 40386899 reverse strand)
gtactatcagaactgcaattgatactggctgtggtgtaagttaatctatattctatcctcatttatctctatgcctctatttattttttgagttttacactatcaacctattagaaatcatgttagattagataaacttttaaggtgattattgatagtcaataaacttatatgtgtgaatttctgattgaattaaagtgtaaaaatcttcatcctgcatacattatttacgttttgttaactgagttttatttgttgtaacctagtagtgtttggaactttgcacagttgagtttaataggtgatcgtgattgatcgaaaatcaaatcaaacgttaggactacatatgctttttttgtgtgtagggtgtgttgcttatacttaattccttcttgcactgtaaaggttgcaagttggggtgcttaccttttgaaaagaga

SEQ ID NO: 22355 - DNA, 882 bp, Glycine max
  Intron number 2 from transcript Glyma08g21330.1 (locus Gly ma08g21330) derived from phytozome v7.0 (chr-ID Gm08; pos 16188078 to 16188959)
gaccctgagtaagttgtcaaaattttaagttttagctttatgcatgcacaactaattcaaagacattaataagagtacaaagttgtttgtttatattttttaaacattattagataaatttaagtaattctaatttaaattccaaatcttgatatacattagatcaagttaaagatatattttttagaaaaataaattttaatcttaatcaatccgaatttgactttgatttttaaattttgacatactatgtcaataaaatatgtagtatccaatgagtggctgagttgccaatagcccaatacatattaagcttagtgagataaaatatgagttcaatttttcataatacattcttcaaagaggatagtttttttaattaattataattacatcttgaattaaggattaatattataactttctaaaacaaataaaaacttgtgaaaatacttaagtttaatcggaaaatcaaataccctaaatcctatgatggttaaaataaaataaaattgaacttgatttaaaaagttttatctcttaaatttatttttacttatattcgttgttaataataaaaacatatattattctctttaaatttatttttatttatagatctaacttaaatttaaacgtaccccgaacaacgcacagaaaaaatagtaagtttaatcatacaaattatcattatgaggaatcaaaacaaaagtgaatattttctcatgattaaaagataaacccttgcatgcatgcaataatataatattattcgatcttttaagctttctttggtatatatatgatagaaatgttgtttgaagtagcttcattgtttgtcatgcagatatcaaataacaaacaagttgactgaaaaaagtg

SEQ ID NO: 22356 - DNA, 539 bp, Glycine max
  Intron number 1 from transcript Glyma06g15940.1 (locus Gly ma06g15940) derived from phytozome v7.0 (chr-ID Gm06; pos 12521586 to 12522124 reverse strand)
ttcttcaccacggtgccgttattctcgcctctcaggttccaactttttttatattttatatttcttttgttttgtttttgaatttacgaatttatgcgtgtttaaattaatttattttgtttcaataaaaaaaatgataatagccggctgggttgacggaggaatacgtgggtgcagcttcggtttcgcatgtggttccgatttgttgttttttcttgatgaaaaaatataataaatttacgtcctttcaaaagtcatctacattttttttatcggaaaattgtagttttgcagtttttcttggatttttcttcagaaaaaaggtgagaaattgctttttgactcgtgctgcgacaaatggtacaattagcaaccacatggtaccgactactgccgaccaaatcatgcctgtttaataactttttttttttgtttattctgtaaatgccttaaatttgatgttaattatggttctgacaatttggtgaaagtatggttttgtttattaatttaaattttgatccacaggacccaaaaga

SEQ ID NO: 22357 - DNA, 347 bp, Glycine max
  Intron number 1 from transcript Glyma08g22540.3 (locus Gly ma08g22540) derived from phytozome v7.0 (chr-ID Gm08; pos 17113761 to 17114107 reverse strand)
ttgggatatctttcaaaatcgtgactatctcaaaactatgacattatcatgatttttctaaaataattatatgtttcatatttaccatactttcataattgattttgacttaccttcccctcatcccaaacatgttagatgtctttttaaacatgttagatgtcttttttgagataaaaaggttaataattaaacatggtacagcatagagttttttttccggccccaaatatttattttcttttcctaggtagataattttggtggggcttgcttattcaagttatcattttctatgtggttacttcgcaggctattcggctacggaattggaattcatttgctag

SEQ ID NO: 22358 - DNA, 941 bp, Glycine max
  Intron number 1 from transcript Glyma05g33220.1 (locus Gly ma05g33220) derived from phytozome v7.0 (chr-ID Gm05; pos 37950865 to 37951805 reverse strand)
aaatctgggccaagcttggtaataatcacttttcagcttcaatttctttctgggaatccacaatcacactcgcattttacagataccaaataaagtttcaaacttggggctttgcatgtttccatttcttcccctcccctcctttatcgaatttcactttatttctttgaattctaaacggaatcagatggtagggtgtaaaagttttttctttttagtttaacggccaagttcacattttgtcgaatgataaagctttcatttcatgctagcttcccgaatagttccactgattaattagtcgtacatgggctgtaacaattggtagttgtggatgtcattttggggctttgattaatataaatgaagacgttaaacgtgcttcccattatcggggtataaaacaaactaacatttatcgattaaaaaaatatggacggaaagaagagagagagaaatggagaaaaaaataaaggaaaagagagaaatcggatgtatgataataatgaccctaatttaaaaggtgctgctgtcttcatgatgacaagaactttgtaggtttggatagaaaaaggagttggacatatgtgtctgttagattgaagtgggtggcagggaatgcagaggacagtgatacagctgactttatacatttcaaggggttcttgagactgtaatttgaatgctttttacaggcattgttgttttaactgttggtatccgtgtggtgttcccttaaacattaaagtttaaaatacatggatgaactttctttgaaaatttgtatgaaaaacacatctgagatttgcatcccaattttaaggggatgccaaattgactcctagatataaagaattgaggggataaatttagtttaaagtttgaaactcccttaaggctcttattttggtcaaactatttccttcttgcagttctgtcag

SEQ ID NO: 22359 - DNA, 863 bp, Glycine max
  Intron number 1 from transcript Glyma08g16080.1 (locus Gly ma08g16080) derived from phytozome v7.0 (chr-ID Gm08; pos 11724591 to 11725453)
caaagatccttctacctctctcagctggtgccctggtctctttcttctttctctttttcataaactgctctttactatgttcttgttttgtttcctctttttgctcttacccacatgaaactctctctctctctctctctctctctgcgttcacacagttagccaatgagaatcattagataaataaaaagacgactcggattttatcttgacaaatgaaatggaacttaaaacatgttttgaaattgagcctttttcatcttcatgtaactgttctgatttaatagctatgggtttgtgaatttggtttttgctctctcatataattagcatgtgcatggagaatttgacttcatatttttcttctcctagaagtgtttatggataaacttacccaaccagagtctgtattagttaacttgtgggaaaaagagcttctcattgattgatgttctgtggaatgtggatgttttaatttatttatttcattctgtggtggtgaatataaattaccaataaaagtattatagtaagtataaaaagataaagtattatattagacaacaaaaaaaggttatattggcattgatcataagaggatctacctgaattagtagttgagcaaagtgcatgagttgtttgaaacttcttagtacctgtgtttgattctggatcaaaaaagattgatattgattacttcttttttgtcaaattgttggaatttggtgatagtttgagaggcatgattagacagactagtttaccagaatccaccaatataactagttttctcctctctttttttaatattttccttttccttcctagattgtgtgagagctgaacctgtgatctacaagaag

SEQ ID NO: 22360 - DNA, 375 bp, Glycine max
  Intron number 1 from transcript Glyma08g07510.2 (locus Gly ma08g07510) derived from phytozome v7.0 (chr-ID Gm08; pos 5364495 to 5364869 reverse strand)
gacggtattatatacttattcgtcaatgtgcacatgcatatatgcacatacatatttcagattttctctatgggtttgttgtagaaaattaaacggggtctatcagtcacattgcagttgaactgcattggtttgaataaaatgttgtatttttgttatgtataggattttgtagtttctctcatatgacatgagacaagaaatagaattaagcattcatgatataatgattttccagttgagtatgttttattcttaagagaagtaatcattaaagaaatagaataaagttagagtttatttctttcattaccatctattttgttttttggtatttgattcattgcaacctttcccttcattgatagtcactaa

SEQ ID NO: 22361 - DNA, 924 bp, Glycine max
  Intron number 1 from transcript Glyma06g15720.1 (locus Gly ma06g15720) derived from phytozome v7.0 (chr-ID Gm06; pos 12368002 to 12368925)
gttggagcaggtcggtcagcaggtttgtttctctacttggtgtgtctcttctgatcctattttctgtatgttgattgaaactttataaagtgttcatctgatggtttgttgtgcaagcatgactgtaaataaacatggtcgtgtacactattaaataaaataaaacacgtatattcaaaaggtcctaaaatatatgtttctcttaacctctgaagcacttgtgctttaatttaagagctgtatacactcaggagaatgctgtgacacatctgagccctcagcagtattgttgggataaaatatttcactagttagatatcaaagacattttaagcatgtcttaaatgcttatatatttttttccatatgctttgttttctttgttagacacactggtgcaaacaagcattaccacttgatttattggtcgtttgaagacatctagtttttcactttatctttaatctcaatcatttatgtgcaacatctaatagtctagtattaaaaaaattatcttctggactaatgttcagaagatgcagttttcagtttttatagaagagctttgtgtactactttttcttattaagatgtatctataccatgttttgtttctttgttttagatatgcatcccttgtttgtattttctgacgagcttatttcttattatttgcttttatttccagctcatcctaaaactttctgaccgctttctatttttagatcttttacaaaaaaaggtagtctttattttgaaattatgcactctttctctaataaattattgcgtttagatattagtgattatactgtggccatggttgtggtggcgcataatatttttagatgcagttggttttgttaattgtctacctttggattatgtcatttactaggagtagtcgaagcaggagccctcctc

SEQ ID NO: 22362 - DNA, 390 bp, Glycine max
  Intron number 1 from transcript Glyma07g14350.1 (locus Gly ma07g14350) derived from phytozome v7.0 (chr-ID Gm07; pos 13729067 to 13729456)
caactggtgttggtgttggtgttgcgttggcgtaagtatgtactcttttgcattgtcaagttcaaatttcttgtcatttttcttcacaaaagtttagctggtcttttatcaaatgcaagtgctatgcaggccattgtgagaagtgaaaagtgacaaggttttaaaagccagtctttaaaggttttggaggtttttgcaaccataaagtaatagcaattgtagctgcattggtcacatctttctgcatttctagtaatatcaagcattgtgattgcaatttaaaaccttgaaagtgtagctataagttcagtttctatgtattgcaagtgatttatgcatgttctttttcctcttactctcagggaagagaaacttgtgtttcaaatttca

SEQ ID NO: 22363 - DNA, 828 bp, Glycine max
  Intron number 2 from transcript Glyma05g28980.1 (locus Gly ma05g28980) derived from phytozome v7.0 (chr-ID Gm05; pos 34693953 to 34694780 reverse strand)
atcattgcaaatatttcttgtttcaggtactaaccagtttgttatggagttttcctttccttcagctcttctttctaatttctaaacctctgtggttgtgaattttttttgaatttgcagaaatgtataaaatattcatttgaaggagatttcgttgggggttgaagtatagttgcaatgcactcttgcagtgtttaattggcattgccatgcttcaaagtgaattccccattttcaattattaacatacaacttaaaaatgaattaattattgaatatcctctttcatgcattcttatactatatcatctggctgtttttgaggagttggaacaatttgagttgtggatttacattctctagtttgaatgtatgactatgtttcctgagtcaaagaatttagtgtttcagttccatgatttttcaggtgaagtaacatatactatcattctgtaaattagttaagtctagggaaggggtctgtattctctgcttcaggctagatattgccatggtactagacaaagaaaatcattggcccaaattgggagattgatatgaccttagcattgtttgattaaatgatgaagcttcttatgaaaaaaacatattatggactattcttgtcactatcttttcttcatttttatgagttttgtagtagaatgttgaacagaattgacaaataataatctacaagtagaaagcagttaacggattctttttgagcttctaatttttgcatattttagctattcttgtgaatgatactaaccatatactcttactttagctccttcgaggtctaaaatatcttcattcagcaaa

SEQ ID NO: 22364 - DNA, 516 bp, Glycine max
  Intron number 1 from transcript Glyma05g28980.1 (locus Gly ma05g28980) derived from phytozome v7.0 (chr-ID Gm05; pos 34695178 to 34695693 reverse strand)
aaagctgaattttgtggtatgaacgcttttctcactcttttggaatcaatttgatttggtttcgttgttattggggtgtgtgtgggttgaaggctgagatcaggtgaagaggaaagataaaattgaatctttgttattttttaagaaaaaaaagatgtccaaaaagatgggcttggtgagaataggttctaaaaagagacaaggtgacatcaaaagatcaaaacccagatgtagaaatagcaagtaagaattgattcgaaccttctctaacatggcataaaaaagtatccaatgattcaccctttatcctgcaacaataccagtggatgtatatatgcattgtgtctctgatatttgtttgataccagctttaacagactgtgattgcttgtcacagttagtaaatgcatgattcatgcccataataataaatttactgttgtgagttttattattagtctcctgtgtgtgttcacttattgagaatatattgtgttgctgttaatttgcagggaa

SEQ ID NO: 22365 - DNA, 898 bp, Glycine max
  Intron number 2 from transcript Glyma07g07600.1 (locus Gly ma07g07600) derived from phytozome v7.0 (chr-ID Gm07; pos 6291975 to 6292872)
tgtcagaaactgacttggcagttattaaacctgaggtatgctacctttttgtataagagaatatatacttttttcttcaaaccatctaggctgtggcccaatatttcatttgagttgtactgcttccttttttgcttttggtagtaactgttaacttattcctttgacctttatttattaattatgtattctcttgtatacggtttgttaatctatttccagtaatatttagtacattattgaaattactctttattcaataatttcaataggtctagtgccatttttttctctacacagttgaatcccaataccctctcaaatattgcatatgaaactatgtgtttatttggtgtgaattgtgattatgtgaatacaaactgttttcgagtgtttggttttaaatgagttgttttagcattgtaatgactctggtttagttttctcttcaatctctttgatgatggagattggagggattgtggattcaaaattgacagcgtgcacatgcgtgacccatcaatttaataacagggagtttcaggggtgaatctctctttctagatattcttttaaaacatttgatattctttgaaagccttagacttgcatgtggctcatacaactctgtgcattatcttctccttgaatcagtgaattaacttagtgtagatgggtagtctctttaatagcttttgtattccaatttttctatgattgttttatgttgtgtacttgtcttgtctggaatatcataattgttattcattaatttaatgcaatgaaattcaccaaaaaaaaaattaatgctaggaaacttccctaccagagaatcaagaccttgcattggttactttcttacgttgaaactgaaactattctttgtttgtattttcag

SEQ ID NO: 22366 - DNA, 627 bp, Glycine max
  Intron number 1 from transcript Glyma05g34150.1 (locus Gly ma05g34150) derived from phytozome v7.0 (chr-ID Gm05; pos 38562817 to 38563443)
gagttgtgtacaaagccattgatacccacgtaattccccgaaactttcttctaataattatgcgaatttgagactgtaaaatagatttttttcctattctcttttctgggctatgtgaattggttctttactttcagttggtgcaaagaaaattgctgaatcagagtaaatacatattcatgcagggccttggcgtaatatagaaagggaggatgcatttatttgctttgggttcctgagtttgatttaggggtttgtttcaacaattttctttgggggtttattactttatcatctttgttttaaataattatttaggaagaatcatatactttgtgtcattgggtatgaggaagtggtacttcttaccttttgtttagtgatcttaagaaagtacggggaggaaagcttgaagctgcttaattagtttcagtataggtttcgtaaagtcatgacttgtaattgcaacacatgcaggagatagatatgcttgcttacatgtcttggtgaactagtcttttgttcaataatgaaaatgacagttctattataatgtggtattcttataaagatgaattcattgcattgacagacagggcagaccgttgcaattaagaaaattcggct

SEQ ID NO: 22367 - DNA, 597 bp, Glycine max
  Intron number 2 from transcript Glyma08g13780.1 (locus Gly ma08g13780) derived from phytozome v7.0 (chr-ID Gm08; pos 10069229 to 10069825 reverse strand)
tgcttgctcttgcagctggatacacgacgtccaaggttggtaattggtacacccgaaaataattgggaataatgttgaatacagaattggatttggatgataaatcttgaatgctttacatatttagctatctaaacacaaaacacactggatgtttcatcagcccctgcaatttgatgattttggatgctttcacttgaaaccaaaagtgaaccatactgtagaataaaaaacttcgtacctcattgcccagaggctcttcgctatgcgaaggtatgggggagggatattgtacgcagccttacccttgcatatgcaaagaggctgtttccggattcgaacccatgaaccatactgtagaatatgaatgaaattttgtggtggttttgcattattactagcgcataggataattcatcagctcccctcattatgttgaatataaaatgttaagttgactctgcataatcatacttgaatttgataacagtaccattagagctatgaagaaattttgtttcttgttttcttattgtatctgtcttactttaagaatattttccttttaggctgatctggaattcttcttagtgtgag

SEQ ID NO: 22368 - DNA, 407 bp, Glycine max
  Intron number 1 from transcript Glyma06g07580.1 (locus Gly ma06g07580) derived from phytozome v7.0 (chr-ID Gm06; pos 5528270 to 5528676)
tctcagaccaactgggaagctgacaagatgtaacctttgtttttcgtttctcttctttcatttttgcaacatgggttttgtgcttcacgctcaattctttgattttttggcttgtgggtttcttttcttatgaaccgagcttgtgtattgtatttaatgtcttcttttaaagtttcaatttttctttctgggtatcttagggtttgtggttttccgcaagttttgtggggtttattggaagttgctgattttggctgctgaacttggaatcttttgtgtggtgggtcacagggttttgttggatgttttgggattcgtgaatttgaagttgaaatagtgaaatctttctctcttactgttcacttggatgatgtaacgaggttttgcactttgaggtttcaggttag

SEQ ID NO: 22369 - DNA, 743 bp, Glycine max
  Intron number 2 from transcript Glyma07g30620.1 (locus Gly ma07g30620) derived from phytozome v7.0 (chr-ID Gm07; pos 35578171 to 35578913 reverse strand)
agggttttagcagtgacttttctcattttatcttggtaagtctttttcaacatttttcatttctgttgattggtgcttcaaatatacacttgtcatgtcatttggtaccacaagttgcttcttcatcaattaacatttgcactcacctccaacatttcaatgtgtcattgttttggttaggttacccattgtcgtagatattcagatatattcacccgtgatcctcaaaattccatttacccagtgaagaataaaagttagatatagttccttgtgtatttttggtattattttctaaataagattgaagtttcacttcagtcattttcgtaatacaagttcgcattcaaaattaaccaaaattattaaggtgaaattttaatattaaacaaagtctcatgttctaatcttgttcgtgaaaaacgtaattgtaattgtacgaagaagtttcactaaataatcagtcaaattctcaataaaaattaattattaataaaattgatgaatatttcgatcatgtttaaaaagttatatttacattacacgaggctttatccttttcgataaattgcactttgatccatgacaatactcattgattaatcctatcgatcaatttggcctcgtgttgaacgtttctttaccaaatcatcgcataaatagaataaaatttgatgccataagttgctgaattggtgtttattgcaggatattattagggattgctttttccttgctgatat

SEQ ID NO: 22370 - DNA, 701 bp, Glycine max
  Intron number 2 from transcript Glyma08g00360.1 (locus Gly ma08g00360) derived from phytozome v7.0 (chr-ID Gm08; pos 108268 to 108968)
catatatagcagacaatttcagttcattggatcaggtttttgctgctacttttgctcattgatttagggaagatagtcattattaatcttaccattctaaggaaaacttctttcttgtacacaagaggaggaatcctcaatcagatctgtagaagaatttaagtttgtttgattataagatttcatgacagtttgtgtaagatatttgttgattagttgaacgccactgtgtattaggaattttcttgaaggttttttaagttatgtctagattatctatttatggtcatactaatagtcattgaatatgttacacatcttacaaatataaatttattgatacctgctttagtttcagaagaaatatgaactttgaaggaacacggttccatatgaaaaagttggcatggcctgcacccacacttataaaagttaattgtattgcttttaggtcaatttgataagaaaaaagaaactaattaactgactattggtgaactcagtggatgagctagagaggttgaaaacaattatattaattttgaaaaatgtttatggggaccaacatttctcatagcagaaacaatgtacctccccttactgaactggattcactgttctgtgtggatttttaaaaatacttagctttagcacattatatttcaggttgtttctgctttgagagaagctggtctggaatc

SEQ ID NO: 22371 - DNA, 700 bp, Glycine max
  Intron number 1 from transcript Glyma06g05690.1 (locus Gly ma06g05690) derived from phytozome v7.0 (chr-ID Gm06; pos 4074841 to 4075540)
ttactcatacggtgctccggcagccgctgacggaggtactccctattattccctacttttacaaaaccccaattaatttcctcctgttttttcaattcgttattccccacacaaatatgtagaacaacaaaacccttaccaattttacatgttcttaaccactgaatttaaattcagtttgcgcttcggtaaatttcaacaattacgcttattttgcagcactaaaaccctaaatgagttatactttagaagactagtgtctagttgcagtaggaacatttttaaggttaaactattcacttggtccctatagtagtgtccattttattatgttttagtttcagtttaaaaaaagtgtaagtttagtctctaaacctgcataaaagtttttaagttttgatccttgttcagaacatgagaaaagtttctggtggtataaaactgctacaaaaactttttggcggtgataatacaccacaaaaaactgtgtagggtctaaaacttaatagttttttaatagaggtaaaacttaaaacgagaactattacactgatcaagtaaatagttcaacctatatttttaaaagtgatccatgtagctgacctcacctagtgggataaggctttgttgttgttgtgttctgaccgttgatttggttctgtcagctagcattgcaaggagcagctttgctggttatatt

SEQ ID NO: 22372 - DNA, 521 bp, Glycine max
  Intron number 2 from transcript Glyma06g36190.1 (locus Gly ma06g36190) derived from phytozome v7.0 (chr-ID Gm06; pos 38273356 to 38273876 reverse strand)
aaaacggcagcttgtaagtgccaatacacaactttgaaatgaaacactcaccttaagcttgttctatgtcaacccagcatccaaagagtgtttttctagtgtgaacagagggtgaagaaatggaaatctgtgatggctctttttggttctgaagattttgactttcagtgtgtgtttggatgaagtctaaaaatttgattttgaagtgaagtgatttatgtcttaatgtttttattctaaaaacaagttggtagtaaatcgagtgtaagatttttatgaggcaaaagctgcttaaagttgctttaacttatcaattggactcagaatcaatttttcagtgtggaatcaaacacgggaacatttacctagtcatgttagctagtatatgaatgtaattatggatatgaatatatgatctaacatggatccaaacacgcacttaaagattttgtttttattgatttatggttttggttattgcttggattggtgatttaatgtgttgttgattttggtgcagg

SEQ ID NO: 22373 - DNA, 783 bp, Glycine max
  Intron number 4 from transcript Glyma08g18750.3 (locus Gly ma08g18750) derived from phytozome v7.0 (chr-ID Gm08; pos 14108106 to 14108888)
gctcatcctgagggtataattgtttgtcctttacattctcttggattagtaaattttcagttgtggtattacagtattgtgtgcattttgccaaaaggaaagactgagagaagataattctatagtttctaataatgtattggtttaatgagtaagcagagttctattcctaatcaatttcatcaagatatgtaacccaacaaaaaatttagcaagataaaatccttgcaattgaattgcatatgcatactcaccaaatgacacatgctagagaatttgagaaactaatcaaccaaaagacttctatcatttaatacttagcagtttttacaaagaaactacattgcagcttctacctaagccttcattttttatatattttggccaatcaaatgtcagatattagacatataggtcaatcacacgtcagacatgtagtggtatatcaattaatgtcttgataatcctaacatgtttcatagttctgttatgtgattctatttgttacacgcaaaagattgtacaggagcctaatgtgattggtcatcagtattctgagaacattcttatcatctagttctgataaatggataataataaaatctgactttttatttggaaaacattacaatagggcagtagggagaaatttaaatttgttgaattttttgtttatatggagtagtttaattccaattcccctttccttgcactgctaaaccaactaccgagagcatggatttgtgtttgatgatatatacactttttcttatgcaggagaat

SEQ ID NO: 22374 - DNA, 607 bp, Glycine max
  Intron number 2 from transcript Glyma07g01230.1 (locus Gly ma07g01230) derived from phytozome v7.0 (chr-ID Gm07; pos 757741 to 758347 reverse strand)
ggtcctcaaagtagtggtatgctctcttgtgtccttaaccttattgttttcccatcccttctcaagctaattggattttatgatttctttaacctgtctgtgcatgtgaggatctttaagtaattaagatactttacttgacactgaatggtggaggtggattgttatttaatattcatggaaagattaaatcaaagtttaatgaataatagcctcctagttgaatttgatataaacttacaatttgttttgttgcatgagtagcaatgggatttgaacctatgaccttttgcaaattacccataccgctcaccactagcccaattgtagcagcttagatttatgacttcattatctatacaaatagtgatatctgattattagatttagtctcttgtccctttttatttttttgaaaatttttattttacctttttaaatttatttctcctgtttaattttacttcattcttttgcgtttgtttaaatttgttagcataatgagatgattactattcccaataaaaggatctttatattatctagttctttgttttctttgctctggacaggcaagagcacactgttaaatcatttgtttggtacc

SEQ ID NO: 22375 - DNA, 842 bp, Glycine max
  Intron number 1 from transcript Glyma07g01230.1 (locus Gly ma07g01230) derived from phytozome v7.0 (chr-ID Gm07; pos 758447 to 759288 reverse strand)
ggtacgctttttccattctcttcatcgtcgatctgattcctgcattttttatgatgatgatgaaagctttgttctccactttttttatttctctcagctttcccaattctaactcccatcgaagtttcaatcttttatagatgacaattgttgggtattaacggaaaactggtagttacacttgcatgcgttttgtttttttttttttctttctaactgttgtttaacttaattgttgtttgatttcatttttttttcagttttgagtgattgaatgtttgtgtggaatttatgggaatttggtgatgtgattgattttgacaattcgatccataatttgtgttttgtattgctaaatgggtggatccggggcaaggtttagattgttactatatgttaaaggggagaagaaaagtttagacatgagtgcttattagaaggttggttaatttaaatttttggaatggagattagtatccctgctcaggtttttcaaagctagtggaagtattgtggtttgaattgctgaatggagtgtggaaccagcaaacaagtgtaaagatttgtttgtttctttttgggtaactgagaatgaaaaccaatgttcttaccagggcaggatggtcaagttgaatttcctgattaaatgtgtttctagctgttcatatgtcacagtgcactgctgcaatcatacctaaaattccggttttgcttgtggatctcaattagggctatacttgaaatttgtggaagtcttttgcagcaatttatttttcctctactaacatggagtatttgcttatccagcaaatagtgagacttgttgttcaactcagcttatt

SEQ ID NO: 22376 - DNA, 659 bp, Glycine max
  Intron number 1 from transcript Glyma07g00900.1 (locus Gly ma07g00900) derived from phytozome v7.0 (chr-ID Gm07; pos 505296 to 505954)
caattgatcagtgctactcagactggtttgttcactctcatccttcaaactcttttctgtaataacattacattatattaataattgttttcaataattcaaatttaatagttatgcacttactgaccccactgtgtaaattatttcatttacaaattatatttggtatgacttttgacataataataattacaaaattatcatttttgtattttgatcacagtataaaacaagtctcgtataattatactaaagattgtagtaccaaaattagactcttaataattaatactaccgctgacacatcccatgcatccagctctagttattcttgaaatatgcaagggccaaggccaaggagtcacttacctaactttaccttgtatctcttaggctttgaatatatttttcttagataagataacaaaaaatattattttgatgaagttaactttacaaaggaagaaaaaataaataaaaaattcattataagaattaaattcacaatttacgttccaacattaaatccactacacaaccaggctgatgcaagtatcactttttacagattattggtcgatcacaatctcacaaactcatcacttataactattttttttatgaattgttgttttgtatggtttttgcaggcagtggaa

SEQ ID NO: 22377 - DNA, 872 bp, Glycine max
  Intron number 3 from transcript Glyma06g48130.1 (locus Gly ma06g48130) derived from phytozome v7.0 (chr-ID Gm06; pos 50429914 to 50430785 reverse strand)
acaacttagtggccaaaccccagtgttttccaaaggttagttctcaataattttctaaatgggtagttcagtgatgctggtaatggccatagatctcacatctgtgttcattggttttgttgatcatttttgtgattctatcactttcttaaaatatagattgctggtgaagtgattttgaagaatccccaaggtttagggtagtttattttagggttttcaatggaaagatcgtttggttttcttaattgcatcgtcaacactcaaaggtctggtaatagggtggaaatggtagtttgagttttgaattttttgctacttataatctatgatgcacggacaccccagccccttgccgtgtccggtgtccgacacgtgtccgtgtcagtgtccgacacccgaactatgttctatattttggacattacaggtgtccacgtgtccagtgtccgtgtccgtgttggtgcttcatagattataatgattaagtgtgtacctgttctttggttatagtcacagtagtggtgggcttaatgaaagtgcatttaaatgttgatttttcttcagaaacttgattcagaggttcatggaagatctgaaaatgaggattctgatatatcttgattgtatggcttttttcctgcttaatttaatttaaaccttgtatgcaagtccagaatacggaaagcattgtctattgctctgtttgaagaattttaaattgtactacttgctttaccactagtttatagtaatggttattgtatgttggatatatttggctgtttttcactcttgattggtaagaattgtttttcctctgcttggttttgacagcaaggtacactgttcgttcctttgggattagaaga

SEQ ID NO: 22378 - DNA, 983 bp, Glycine max
  Intron number 1 from transcript Glyma08g02940.1 (locus Gly ma08g02940) derived from phytozome v7.0 (chr-ID Gm08; pos 2030045 to 2031027)
ccgttctctgattgttctagccatcatttccttcggtaatttcacctcctaatagatctgttcatgcttttcttttagcttttgcttaaatgcgcaagtggaaaaatgtaaccagatctcgctttgtttgaacctttttggatctgttttgtttgattcgtttcgtgttacgtagcggtagatcagtgactgagatctttagaagtaattgtttaggatttcgtaaatcgtgctgtgttgtgttcttcatttcagtgaagttctttgcgaactcgttagttctaggatcttacatgtttgtgtaatacgcgtttctctgcatctgacaatttcgtcaacagtgatcagttctagttgttattccgatttccgagggagcgttttgttggttttgtttttgaaaatgctaattgttgcaaattacttttcgtaaccaacacacgtgcctctgatttctgttaaatcagtttttatagtatttcgtaaccaacacacgtagtaccattgatttctgttaaatcaggttttttttaatatattttaaattttttgaatcaatgtttcgtgcaaatatgtttctaactaaccagctgcattctcgtttgttttttgttttttaagttgttgataaagattttcactgttaagccgagtgattagtattagccatggaaataagttttgttccattgtgctgcttaagatttttgctttcattgcatgcttttttcaaaggattggcgttttcgtatttgcgatttgaatatgacatcgagaagttttcctccggctgataattgaatacatatagaaaaaagtataaagtaaagtgtcttcatgttaattttgttaacgtattcatatcattattatcatttgtcaagcacaattatgtgcaaatgcagaaattaactgcgtttcgatgagtttaagtgttgtaaaaatttaactatgtaactaacattgagaaatttctccatagg

SEQ ID NO: 22379 - DNA, 862 bp, Glycine max
  Intron number 1 from transcript Glyma06g06690.1 (locus Gly ma06g06690) derived from phytozome v7.0 (chr-ID Gm06; pos 4773927 to 4774788 reverse strand)
aaattcataccgttgtaggtgcaggttggtactttactcttgttgctcaagccttacaagttataataatatcaacattaagaatattgtgtactttttatttgttagagacttaatattatcatctgtatgccttcacctaattacttaaatgtttaggatagttcgttcatgacatggtatcatagcttctttaacttagtgctccaaagtttgatcttggctggccccatttttctaaaaaattgttgattttcatgacaagataggtggacttgtgcattgtccttgtgattttaaactcaaaaggctctttcatgagatagtgtcttagagatgtcatataaaaccaattttatgtttccacttaacaacttaagcttttgagacaatcggttcagcacactatttataagaacccacctccaatgccgtctctctcccatccctaaaaatcaggaatatttgttatcagttcttggttataatcaattaacgatcaaaatagttgattgctaccgtcaaagcagcttaatctgaaaatttctacttttgggtagattgggaggagggtgatttgttaatagtagagacagagttccgatggaagaaagcaatacaccataaatataataatactgtctatagctgatcgttgaattggttggacaccaatatttatcctttaatcaagtttttgcatgcctttgattatatgctttcttaaccagattttagtacattctgattcatatatggtcatccactgtgatttttgttcaagttcttctattcaaccaattagtaatatgacgttttttggtcattgactccctaactaacaggggctacaagtggtgca

SEQ ID NO: 22380 - DNA, 958 bp, Glycine max
  Intron number 3 from transcript Glyma07g30080.1 (locus Gly ma07g30080) derived from phytozome v7.0 (chr-ID Gm07; pos 35140800 to 35141757 reverse strand)
ctgcagatcttgtacgcgttcctttcgatttactctaaattatatgatgcttacttccactacgctctaatttaacttacctgttaaatcatgtgatctcataatcatttgataaaaaaaatgttaatagtgcgttcccagcatatgataaaaaaatgtaactaatagtaaacacaccttattaagcatgtgtttggatgagtgttgacaaaattgattttggttaaaattaattttgaagtggtggatgtttttattataaaatcaaattaggtggagggaatgtggccttggtctaaggcagaaagtttctgagcttaaataatgcttaaaaaatgtatttacatttaccttacccaaggaaacaagtaggggttcaaatgacatgttagatgcgagaccttatcttggtccacataatcaactccttggtattattaaatacttttccttacttaatttaatacacactatactaatagtgtgtttggatagctaccagaatcaactctggctcccaaaatcaaagtgaaaaattgaaaaagtgtaagctactatttgttgctttggctttcaacatggaattggaattgattatgtgaaaattgaattgaatctaaacacactatcaatgccttttttttttcttcttttcttaactggagcccttggtcaatggttaacaaaatcagttttaatattagatatttagttgtaaagttcaaacagcaatagtgttagctacttagtttaattgcatgttgtataaggaagcaatggccactagtaagtaaatgttagtagtgcgttgttagttgggattgggaactagtatttagaataaaacaaaatattgtgaaagtaaatactacttagtatgttttttgttttcttcatgatacataaactttgtggtttagtttctcaatggcggttttatttgtacagtgctgcagtc

SEQ ID NO: 22381 - DNA, 597 bp, Glycine max
  Intron number 2 from transcript Glyma08g21730.1 (locus Gly ma08g21730) derived from phytozome v7.0 (chr-ID Gm08; pos 16535926 to 16536522)
tcacaggaggcttggtaagtttaaattggacgcatctatatggctcaaaatcacttgtggaatcagcatttggcaaatcttttccttgcattagaatcttcattcataagccaaggacatatttacatctctttttctatctaacattctatataggggaccaaaggtataattccaattatggtatccatttagtgttttagtatatacaacaataacaaacaagttttttttttctcccaagcattcagctcggttaaagaccaaattttcaaagatattatttatcatgacacgcctcttaacaacttctcccaatgtccttcttggtctctctctctctcccttttgatatgactaaaaatcatgcaatataatctctttattagtgtttccaacgaccttctttatacttgtccaaattatcttaatcaattttctttcttatgtaaccagtactcttatccttttctcgcgctgtttttttaaacagcagcatgatgttcagttcatttttgctaaaaacaataaactgaaatgctgttgttatttgttttgtcagccaactccaatccacagtgtggcttcaggggttgg

SEQ ID NO: 22382 - DNA, 300 bp, Glycine max
  Intron number 3 from transcript Glyma06g18140.3 (locus Gly ma06g18140) derived from phytozome v7.0 (chr-ID Gm06; pos 14467723 to 14468022 reverse strand)
atctcatatctcgaattccttttttggtgcccaaggtaattatcaccctttctattattttcatctccagtgtaaccaaatattgaagaaaaaacaaattattgtatgtgccacaacaaagagatggtaatgaatgtggatttttcatcctctatttcattaatttgtttttggagtgtgcgcctgataactttagcatggagggataccctttgtaagttatctcatttgctgttcttgaaatttatttattaaaacatgcattttgattcagttatgtttgacattgacatgctgcag

SEQ ID NO: 22383 - DNA, 752 bp, Glycine max
  Intron number 1 from transcript Glyma07g14250.1 (locus Gly ma07g14250) derived from phytozome v7.0 (chr-ID Gm07; pos 13610322 to 13611073 reverse strand)
ttgttggcgtcttttcgttgtaagtcttaatttctgacacaccctctgcatcaaaatcttaatcccctctctttgaaggccaccttcatacctctccatgttttaaatttattttttctgtgaactgtatttggttttattttatgcttctttttaattttaaagttgatatatagtagtgttggatgttgttggggtaatggggtttgatgttataaagtatgatgttagaatgttgagttagatgttagaatcttctaattctgaattgaaagtttgaattcccagttgtgtgttggtatgagtggaagtgagattgaatatgaataaggtaagtgtttggagaatctgaagctggcattgttgcattagaccttgtttggaatttggatgagtttctcgataagcacttacaggaaaagaagataaataaaaggtgaattaagattattgcataagttgaaaacttgaaattggcttgtgcataagttaaacctatcttttagagaagttaaatgagagagcttttattggttatacataggctaatttaaacttatggaagaagcttaatttttttattttattttcttccccttttgtaagtgtttattgaaaagtttatccaattagggtcttaaggtttacatgatcaggcaacaaagtttgggaatggaagtttttgcaggtactaaaagagttttacttttgaggcagtgaacttcccttgtactgtgcaaggaactatattt

SEQ ID NO: 22384 - DNA, 1029 bp, Glycine max
  Intron number 3 from transcript Glyma08g17080.1 (locus Gly ma08g17080) derived from phytozome v7.0 (chr-ID Gm08; pos 12509568 to 12510596 reverse strand)
agagttactattgaaagcgctgaagctacactcaagtatgtgctctaatttttgtcttggaggcttctttgcacatcttcactcttgagattatgtatcattttattgttgctatcagtttagcttgatttttgtatcagtttaacatcttcacatcttcgctcaagaattagctgttttttccccatgattattgttaagataaaaattacaattctgttaaaaggaaaatccacccctatcttctttatttcctgtcccaaaataggattcaatgtaaagtcatgactcttcactcatttggattttgataagacaattcgtttatctagataatttagataaatcttttcttagtgaaaattatgattaaattctgaacagtgtataaatgtgttgctcaattgattgattttttttttcactctcttaacagaggataactgaactcaggcttctgtgccacaaatctgttggttctacagtagatgaatcattcctctaagtttgagattgagtctcacctgtagtcctttgaattcctgatatagtcatgtccccaagataagtccattggggaggtgtcctgttatacaattcttaaaattggtgctgtctgctgtggggttcctctagatccatgtgatggtagaaaagggtgcaatgttctgtcccagtagtagtggtgtagcctaactgactttatactaaataagaaaagtataatttaaatggtgatgaagactaaatatttaatatgctcgatactgtaaatacaatactgaatattgaatggttagaagaagctaggtttgaagaaaaaagagaatgtttatagtctggcaagaggattatggtttctgagtgtatttggttttggttgatatattatcaacttaaataaaccaaactaattctgtagaatagagtagctttcctttttgttattcattaattattagagaaacttgtcttacacattcaggcctcctaatgttttcatggattttttttttcattgcaggtata

SEQ ID NO: 22385 - DNA, 786 bp, Glycine max
  Intron number 3 from transcript Glyma08g06920.1 (locus Gly ma08g06920) derived from phytozome v7.0 (chr-ID Gm08; pos 4962531 to 4963316)
aggtttttctctctaattacataatatgctaatatagatgtcataaaaatgtacttttcgaatataatgtgtttgagtttatgtacaatttgatccattaaagttgcaacttggtttatttggtcccggaaagtgtgtgcttatacaatctggttgctgtaactgacagcataacaagtttatcttatattcagctagtgtttgacagatataatggaaatgccaaattgccaatgtggaatgttatgtacgcatatttgatgttgtttgacaactaggttacttacttggaatccttaaacaatgtcatcactttgtatgattggagaagactgaaatttctcacccattatgtcccaaacaaacatttttttttacttgtaaattccctaatctcttgaatcaatgtaatgtatcatttagggattccatgtacggaaatctagttggcaaataatgttgtgtgtgtgtgtgtatagcactctacattggcgcttccatgatgtctttttgacaccgagtgatggagggattcacttgatatgaagttgtcactttttgaggaccaatttatatagatgtgctttataaggaacacatttatggatcaggttgtatttaacttcaatatgaattttctctcatgaatcctaaaggtatttaggttatattctgcttgggaaaattggcatttatctgcatcaaggcaaaacatggcctttgacttgtatggtacaatttatggctttaggactctacaaacaactgttggggtatttggaggtg

SEQ ID NO: 22386 - DNA, 695 bp, Glycine max
  Intron number 1 from transcript Glyma07g10050.1 (locus Gly ma07g10050) derived from phytozome v7.0 (chr-ID Gm07; pos 8424385 to 8425079)
gttcccttgatttctgttccagatttgacaattatgttcttatctttttcattttaacaataacaactgaaacatttttatcttggaattggaagtataccatgctaattgtgcacaggaaggaaggtaaatacaaagggggaaaggtagggatagagtgaggattgttgtgagtatttgtattgtttatttatttattttgtattcaaaatatcttataatcaaaattgagaaaactttatagtaaaactgctgaattttgtaattactatatttaaaagttatatatggagttatttttaattggtttggtagggtaaaaaaattagatcatgaaaattaaactattgtatctttacctaacattttaagcttttcaatgagttagtttttcacatgaagaaacaagaaatacatgttagagatcaaactcacataccatgcatgtaacaactcacatagaaaagtgatcaattttctatttagacacctgggtaaatatttccccatcaccgcaagatcacattacatgatggcttctcctaaatatttattttttgtccctattttgtgtcagattattctcttgctgttgatttcccatcttcccaacatactttcacaagactcaagccccaccatagctcaatgcacaccaagcctccttctccttattccttgcacaacatttgtgc

SEQ ID NO: 22387 - DNA, 960 bp, Glycine max
  Intron number 1 from transcript Glyma06g48300.1 (locus Gly ma06g48300) derived from phytozome v7.0 (chr-ID Gm06; pos 50576516 to 50577475 reverse strand)
acgccgtctctgaatctttttcagccaacaagcaggtctcttttgttattatattatatgtttgccatgatttgtggctttttgattgaaaagtttggatttttgaatcatttcattagtgggctatcatgattaagatctttatctatatatgggtagttgggtggaagtgaaaactactgttttttcaattgagtcagcataacaagccatggcagcaaagtgcacatacaaaaagaaatcaagggctacttttttcttattctttttttctattgtgggggaaaaagggaagcttgttcttttttatgcctcaaaaggtgcatctagaaaagtacagggccaaatcactgtgctttgaaaagcagatgcgatttattttttgattagtcgcatgtatcttgttctactagttaacataccccacttccttgactccactatatgcttatgcattttgacctcagttattcttaagcgtcatgggaagattcttttctccacctttttcaggagagtctaccacaattgtctaaagggaaaattgggtctgtttcatgtttggagccagattgttttgagacttttgttgaaatcccaatctgagctgctggtgcttaattatgttagtacttgtacatttggattttgctaattatttattgtaaatgaactccttattttaagggatctttggaatgctgtttgaatttatgcgtagacttaaaattaatatatactcgttgtatgcaaatgtttgctaggacctaaaatggaaaggaaatgtgttagttgggggattggagcgacttctctcccctcctttttctctccaaccattgggccaaccttatatcttctagttcttatgccccctgtattttttttgaaatattttcctgacttgcctgtatgtcctgtgcaggttccagtaaatctggagaacattaaaataaagaa

SEQ ID NO: 22388 - DNA, 896 bp, Glycine max
  Intron number 1 from transcript Glyma08g38450.1 (locus Gly ma08g38450) derived from phytozome v7.0 (chr-ID Gm08; pos 37552858 to 37553753 reverse strand)
aggttcgttggtaggtctagtttccttcaccctttgtttggtaccgcggaaacaaaactggtaagaggggttttttagtttttgttaaaatgatgcaactaaaaatgcaactacacaaggttagtagcggagggtggtgtaaggcacagaccggagtatggaattgagggaaacgttgaataaaatgaaaacataagttttttttatgtctaagaatcaaatttaagtaccagaatgtttacaacaactcacggactgtttctgtttttaaaatactaagctagacttctagatgattagacactctagattgtttctgttttctggtttttaaaatacttgttttgaaaataattttcaaattttaatagattttggatttgaaattgattgctgaatagtgaaaaattattttagaaaacaatttttaaagctgtttaattttcacaatacaactaaaaatgcaactaaacaaggttacctggcggagggtggtggaaggcacagaggaaaacatggaatttgacggaaaccttgaacaatgtgaaaacaaaagaaaatgagaaaatatctgcggctgtttctgttttcttgaaaataggttttaaagcttaacatattttagacaagaaaatgatttctgagtagtgcagtattgttatagaaaacaatttttaaaaccaagaagtgagaaaagaatcaaacaagcccttactttctcttctttttcttttaattttgtcttcaatcaaggaaaagaatatgcatcattgttagtatttttttctctattttctttcctctcatctgaacatactgttagggctgtgttgtttgttaacgtgttttgtcttgggacagaactccgattgatagagactttcctggtcattatt

SEQ ID NO: 22389 - DNA, 706 bp, Glycine max
  Intron number 1 from transcript Glyma07g36740.1 (locus Gly ma07g36740) derived from phytozome v7.0 (chr-ID Gm07; pos 42054857 to 42055562 reverse strand)
atacgtttgcgatcacttgtttcgccattttcaaggttcttcattcggaaccccccactttatacccacagtttcgtttttatttatttatttatttacttccacggttgttgtggtgtggatttaatgtggccacgtttttagcttgattgtatcctcatgaatcacgagtagcagtagtagtagtaactgttaccagtggttttcatcaattcgctttttcgtgaaccttttttaaaagtactttttatacttttatttttcttattggtcttttgagtctgagatttcccagttaccaagtacacagttagcatgcagggcaatactgtttataagcttttctttctttctttctttcttttaatggtttgtgttcgttttttattatgaatcggttttaataggtgaattgtgtagaactttttattagcttttcttctaatgggaacggattcgggattgtttggcacataatgttgtaattagtaaagtgtttgggtctcttgactttttttgtgttgaaggcccatggttttgatgtggagcattctaccttcaattttggttccttcatggggtatgagtgttggggttggttcctctttgtctttttctgttggtaaaggaatgcttcttatctagctgtcttagatttcttgtctgtgcagcaatatcagctgagtcacgcggggttgtgacaact

SEQ ID NO: 22390 - DNA, 638 bp, Glycine max
  Intron number 3 from transcript Glyma06g13810.1 (locus Gly ma06g13810) derived from phytozome v7.0 (chr-ID Gm06; pos 10920337 to 10920974 reverse strand)
agaattgtaagtaacccatgttttcctttgctttcagatgttgtaattttcattgccatgttgggatatcgcttgttgtttggtttgtttgttttctttctaaaatacaataagtagttttattaggaaaagaatgcccaatagttggcttcaaaagaatcttcaataatggagtatggctgccacttttttcatagaagatagaatgagaaaattgactaagaaaagaaggaacaactgtagagagttagaagaattcttgcaaattgtaatggaaacagaaagatgccaatctgttcctccttccctagtccctacccaggtcacctgctatgtaaccaaaaaacaccagaaaaggaaaggaacaagaacctgcaaaattgatgaacagtctatggagcactgagttaataggattctgtgattactgaagctcatcatggctagtcatttaatgaatgtcaataaattttcatatcagaagttcactcttattgtttcgtgttgattgctttagaagatttgttgatgtagtaattgttaattcatgagttattcaaagtactgctggagaagggagctaaacttctatccttattgccttagcttttgcagattcaactttatccgaggagaca

SEQ ID NO: 22391 - DNA, 650 bp, Glycine max
  Intron number 4 from transcript Glyma07g05490.2 (locus Gly ma07g05490) derived from phytozome v7.0 (chr-ID Gm07; pos 4127222 to 4127871 reverse strand)
ggattcttgagattgtaggcattggatacactggggtaagtgaagtatacttaattgctggcattgattacaccatttatgctcataacaatcggcaaggaatctagaaccaatttggattagtttctcaacaagtacttacaagagaaaaataaatgaagcaaggaagtgaaatgaatcgaacttcatgcataagtttagatgaatttttgtacctcaactttttactagctctttcatctaatgttttcattagtaccttttttaggttgggaatcaaatactcatctcaattgaaaattttataagttaatccgaacttactctagtttcttgctacatttttctaccccttagtttctactatcttattattttttataataatttttaactttgttggatgattgtgtctaactggtttaacaaatgaatcaatgcacttcaactccataaaccaggatgaggcactattcaacaaatacagaatagccaagaaaacttaggggttttaataattacacattcataagaatggttttaaaaaatttcttgtagtactggattttatctacatgaaaacctatcattcatcttctacttgtttctttgcagtggtttgtatacaagaacatagttttcaaacccga

SEQ ID NO: 22392 - DNA, 601 bp, Glycine max
  Intron number 2 from transcript Glyma08g03190.1 (locus Gly ma08g03190) derived from phytozome v7.0 (chr-ID Gm08; pos 2253337 to 2253937)
aggaaacggaaaaagcaacacacaaaaaaaaagaggttcagattcgatctcttgttttgttcttccattcatatctgttttattttattttatttttctttctttcggcaattgcatctcatcaagctcgtttttttcttcttaccatcttcatttccgcacttgtttactcctcaattctcttttttttcttcgggatctcaggtgggtttccgttatttctcaatttggacgcatattttttgttttatctcttgaatctgcaagctatattgaagattcgttctaactcttaatttcattgcagcaaagctgcgtttttttttatattattagctagatcagaaacatgtgaatgcctcaattgttaattttcttgttttccttctggattttgcatgcaaatagttgtttaatttggttgtggtggctattcaactttttttctctgcatttgtaaagcattttttcttctttgagatgtttgtgggaattgagcttgggaataatggaatatgttcggttgaattgtggtgagaatgaaatgcatttgattctcttttgctatgatggttggttgcaggtctgtgcctcctcttat

SEQ ID NO: 22393 - DNA, 338 bp, Glycine max
  Intron number 1 from transcript Glyma08g00910.1 (locus Gly ma08g00910) derived from phytozome v7.0 (chr-ID Gm08; pos 504302 to 504639)
ctccctgcattgtgatccgccgccgctgaatcctggtttgtttctctgagaggctctcacttctctgtcaatcctcaatcttcttagatcttcccaatttattttgctctttatttttgtttcttctattctgcatgcactcagattacatgttttgttctgtattcggatctcaacttcaattctccatcgtgcatatgttctgttgttttgattttcggtggttctgttaatgcatgcacgctgtggatctgtgaatgtatcgtggataaatagaaaaagttttgttgttttgaatttgaatttgaatctgtgtgtgtggatatcgtagattgtaa

SEQ ID NO: 22394 - DNA, 529 bp, Glycine max
  Intron number 1 from transcript Glyma06g14820.3 (locus Gly ma06g14820) derived from phytozome v7.0 (chr-ID Gm06; pos 11615756 to 11616284)
ccagtctctatctcaatctccatcaaatttaactagtaagatctctctctttctctccctcaatccaattagttgccaactgttctttattgattttagtctctaattaggtgcttatatctaagagaaatattgtttgttttgtgaatttaatttcagtggctactgaagaggttttggttgatgaaatcacttaccctaccaagatcactactaccaagcccctatctttgcttggccatggtaagttgcttaaactaggttcctaccggctcttccaatttctttcttaatttttttttgaagatgggatgaggtatggattttttagtgttcctgtatgctaatgtttccatccaagttaaaaattgaagtaataaacttaaggcagctagggatctagatcatggacttgcaatttttgttccaacgaatattataactactggggtatttgctatgatttgattcattaatgagtaacaagttgacacaacttgatttccttgtttgaccaggaatcaccgac

SEQ ID NO: 22395 - DNA, 992 bp, Glycine max
  Intron number 1 from transcript Glyma06g37210.2 (locus Gly ma06g37210) derived from phytozome v7.0 (chr-ID Gm06; pos 39638375 to 39639366 reverse strand)
cgcgccgtgccgattcgttcgagaagttggataaagtatgtttctttcttgatctggttgcattgtggaattttgacatagctttggttagatgcagatattcaggttttagttttacagttgctgctagaatattgattcaagtgttgaattttcaaattggttttctttatctgtttaagtgttaaatttgttttttcacctctcttttttctttgattatctatgtttccaaaatatactttaagccagggatggcaattaggaaaacgagttaccaacttctccactaccttctttggttatgagtataatagttgccttggtggtggggcttacctaatatatatcattgtatctatgttcttctgcctaatagaccaaaattgcttttttctgtgaactgctttggtagcttatgagcctttgtaacttatttcactactaataataactcttgattgataaactctgtgtaaggtattcagaactctctctttttggttccttcttaaaccaatgtggttagctgtcattgtttgattataaccctcaccaatgcattatgcacatcctatcacttttaaactgatatttgaatattataatcctactatataacatttcttacaaaattcttgattcttatcaatttttgtattaaagatgctagtcatgttatgcttcattttttacttttttttttcttcaacatggccaggatcaagttactttgaatttggacctactacaattctttttctgtttgcatattaatattattgattttaccctctgatgtatataacaaaacattgaggtaaagctggacatgtttacttgtagtttctagatttatagatatctttttttttttttttttgtcttggatctcaattaaatgatgatattatcttcagcatgctttagttttccttgaatgctaaaatttttcctgcttatttttcagattggacagggaacttatagta

SEQ ID NO: 22396 - DNA, 649 bp, Glycine max
  Intron number 2 from transcript Glyma05g35120.1 (locus Gly ma05g35120) derived from phytozome v7.0 (chr-ID Gm05; pos 39238001 to 39238649)
ctcctccccaaggttctttactatgtaatcttttgttgtattctaggaaacaatattaaatttacttgaaaaaaatgttagtttcatacacaatcttcgtatttttcctcgtactagtattttcatgagaaacaagcatatttttatgattaaaaatgttgatatcttgtgtgataatccactaaatcaagcctggagatgtttatgatcaaaggttatgcatccgtttcgatttttctagtacaagaatttccttgaaaaacataacttgtaaaaacagttgttttcttgtgatacctaaaagatccatttattttaaagttggataaaattggtttttgttaaattgattttaataaagtttttatttcggccactgaatataatttgggatctgtgttcaaattaatctcagctacagactttatattggaatatgtgcaactgggaggaattgattatgggtatttgccaattaggcactaaatcaatttttagtgataatgattcatgatcaaagcttatgtgcccttttgacgatagtaacttcatcatcattttttgtcatggggttcaaataatctaactaaagattttttactttttttttgcaggaaaattgctatctggaaagatccggaggccaaga

SEQ ID NO: 22397 - DNA, 508 bp, Glycine max
  Intron number 1 from transcript Glyma06g16740.1 (locus Gly ma06g16740) derived from phytozome v7.0 (chr-ID Gm06; pos 13163788 to 13164295)
cctcgtcatctctatcgttgtatccgtattcacaggtgggtgttaactctcgcaccccataagatcaaactcgccaaagttttgatttttcagaggttttcactcttcttgagtttgaattgtgtctcttggagttgtgggttctgttggtgtgtcttaattcagatctgagagcaattggaattatgattcagttagatggtgaagcaattcttagtttttttagcttaattatgatttctgattattcttgcttatgaggagagaaagtagggagttttatgcagtaattttaattacacagttcgcgttcactgtctcatttcttcttgttcttggggtataacttttttttctctggttaataagttcccatttagcttctgatcataaagattgtaattttggcttattttgcttcaatgcaatttgacactgaaattcagtcatatgttctgaattttcggctttgattttttttctttttctgttgcaggtaattcttgac

SEQ ID NO: 22398 - DNA, 726 bp, Glycine max
  Intron number 2 from transcript Glyma06g16740.1 (locus Gly ma06g16740) derived from phytozome v7.0 (chr-ID Gm06; pos 13164336 to 13165061)
tttttcactttggactgagctcattttactggaaggtgatttgatttttgttacaaattatgcatgtcaggatagcaactttttgttttcaatcaccatccatttccctgcagattattgtacatgatggttacctgtctgattgatatggaatccaaatttttgctttatacttgcttaaagactggctgttaactaaaactatgtgtgatactggcttctcataaatctgaagaggtactctacattcattctatcatgctattcatacaacgacaacaaaaaacaaaaagttttttttttcactggatgaggttggctacaatatggatcaaatgatgctataatgttctactgtaaattatatctacagacaaaccattggcctctaaattcttcttatttgtttcacttgtagtttttcttggtctccgttcatgctattcataaaggtgaaaaagttggttctcaatttggtcttcaattgttgttatttattacttatagctttgctttttttattttttgtctttatatttgtaattgcatgtcccaaattgttattttactgtgtacttttgttggaaaatctatcagaaggctttgttggttaaccgctgaatttaatttagttgatattaactttgttgactgttcgtttctgcttctgaaatatctttaacgttttatatacgatttaatttttagatcattatctagaaaaag

SEQ ID NO: 22399 - DNA, 711 bp, Glycine max
  Intron number 3 from transcript Glyma06g16740.1 (locus Gly ma06g16740) derived from phytozome v7.0 (chr-ID Gm06; pos 13165156 to 13165866)
ataaaaggtaccaacaaagatttcatttccttatttggtgttgtttctttctgattgaatcacatgagagctaaattcatttagttttgttcataactttttatgtttcagatttgattatggcactttgtaagtgtgattcttttttctttctttgcataggaatcaaacctatgatctctatcattggcacttgagctaaactaagcaactaattatttgtttccttattatttgaagataatccttatgaattatcatttttctttggtcttgctgaaattgatagctgggtttctaggaacaaattatttttcattctaggtgcaccttttttatttggaaatttgttttatttttcaaaaggaaaagttataactttcgattagttggttaatgaaggatatctgatgcatgacatacttagtttattgctggcttagtttatcttgtgttcaaaatagcttataatcaaaatcttactaggagagcttttgaatttttattttattaaatcttaaataataattaaatccaaatgagctcttaatttgcaattcaaattatgctcttcatggttcttgttcaccattatccctggcttggctttcttcacttgattatgaacatacatgaatgtgtcagattgtcaggataatccctggctcttaatttactatcatatcatttgaatatgcagggaagcaagag

SEQ ID NO: 22400 - DNA, 981 bp, Glycine max
  Intron number 2 from transcript Glyma06g11980.1 (locus Gly ma06g11980) derived from phytozome v7.0 (chr-ID Gm06; pos 9241919 to 9242899 reverse strand)
caagattttgctagcactcagagcttatcatttgggttgtcttctctgccttttatccccctagttgtaacttcttactgtatagttgtgtgtactgttttatgactgtagtaaatagttctttgtagtttgtgtcgttggtttatctatgtttaacttggctgtcaaattgatattcttttgagttactttgtttttatgtggtgattgccttagctatagtggccatcaatgttattcactataattgaacttgaaagcttcagaaatttgtttgaatatgctacccgtgttttctgttcagtgttgctcgctttcaaggttctgctcttattaatgttttcctactttctataccagtccattggtcaatttagagattctagtgatctcctttgtttttctggtcctatatttcgtcctgaaatgttatttctaaaaaggttgtactttaggtgataaaactagggtttattctctattctgcaaggtgttcagtgttatgctaatcttggaataatttagtgaaataagcattgcagatttttgacactgtttttaatataatttcctcgctgaatgctggataactagggtaattatattgtaaacagtttctccccctgatgcagatattaacacatagaacattataggtgataagaggacatttatataattcctttttgttcattttaattttcacttgtgattgttcagattttcaaaggcaacgggttactctgctgtcatattcttttcttttctctttttgttttcttgcttgctttattttcttttgcttgcatgtgctcatgtgcatttgatttgtaaactacattgatgaaagtataaccagagttgaacatttcctttgtttttagtttttctgaaagtgtactggaactacaagttttccttaactgactatcaaaaactctctgttcagtgttaagtcctctgtaaaattggtattgttag

SEQ ID NO: 22401 - DNA, 673 bp, Glycine max
  Intron number 4 from transcript Glyma05g30130.1 (locus Gly ma05g30130) derived from phytozome v7.0 (chr-ID Gm05; pos 35562134 to 35562806)
ttgtggatatctcggaacattcggtgacaattgaggttattgctggacaccttttaatatgttttaatttttaatttccatgttttagtgaatgctctgtattcatatgtactcacaatcaattggactgtacttgtaaagtggagaaaattatcattgctgtttcattaagataattatttactattggaggtgaattgtgttatgagagtatggtacagtaccttgtaaacagctcatcttgggaatatactacatatatttatatactcttccttttattgcataaataataatggtgtaattacgaaactaaggttggagtatgactatactgtggttgacttgttggactggctgtttttatgttattctgttcttgataggagtctttcatttttacacaaataggattttgctcatctttaaataatatcaggaataaatagtgtcctgtatgagctgggtagatattttttagccttatttgtgcaagtgtttgtttcatattttgattattttcttttccatctacctattacttagtcacaacacaaccatttccatatcattacttgcaatttgtcattagatattcttggttataaaatcaggtcataatcttgggtgaattgttctgctaatgttacaggtaactggagatccagggaag

SEQ ID NO: 22402 - DNA, 517 bp, Glycine max
  Intron number 3 from transcript Glyma07g14120.1 (locus Gly ma07g14120) derived from phytozome v7.0 (chr-ID Gm07; pos 13479609 to 13480125 reverse strand)
gaaaagaatctgagctggtggaaaaaatagctgaggtctaatttcaatacaggaacatcatactgtttaaattggaaacattttattttatgtttttatgattgatgggcttgcatacatgagagaaggataattgtttcttttattaaacctttgttctgacctttactcaatacaaggatatatacaagattgtattgtaacatttggcatgtgtatcatgttacattttcttgttggcacctttgatatttcaatccattttgtgttgtaaatatgaaataatctccaaaacattttcctaaagaagtaaacaaagattggaggggtggggggacaagagatccactgatgtttttatttttttaaaagctatctgctgattattttaattgatttatataatgcttcacctttttgtcatggagattagagacttcttgtcagatgaaatatcattttgaatgaaatatccatttattccttttatgaaccctgtcatttacagagttcaaaa

SEQ ID NO: 22403 - DNA, 523 bp, Glycine max
  Intron number 2 from transcript Glyma06g10610.1 (locus Gly ma06g10610) derived from phytozome v7.0 (chr-ID Gm06; pos 8018471 to 8018993)
ctcatctatccaaggctccactctctgttcccaaggttttgtatttccaatcattattcccttagaaactgatttgttgatctatctgtttgtggatgctgagaatgtgactgagaaatgaaaccaatccactaggtagtgatcccaatataatattttattttccacattttttgagaaaatcttatattataaatcagagataaatgttaccctttttttcactaactgcctttagtaaattgctaattatcggaaaaccatcttaaatgcagaagtgtatttttaattttttttttctgtcaatagtggaagtttcttctttgctaattgcctttcagtggggagtttcttattttatttggttttagtgcttgtcagctatgttggggtgtcatgtatcttagcagatacagtatattttatattctgcaaagcaattatgcatctttttctttgttttcactcctttagttttgtagttgaaggattcaagaaaggattcagactacgagaaactgtg

SEQ ID NO: 22404 - DNA, 320 bp, Glycine max
  Intron number 4 from transcript Glyma06g10610.1 (locus Gly ma06g10610) derived from phytozome v7.0 (chr-ID Gm06; pos 8019195 to 8019514)
cgtactggggtgagttctctctttaaatttctctcatatgaaacttttggttttagtgtcagctactcagcttattccatgttgaatttttaacttcttatttgatttttgttagatgttagaaagttctccattagtttagtttctgagaagttatactaatactaccatgatacttcaagacaaaaaagattgctaaaaggcctaattgatgacaaaagtcttgaatttagagaacgtcactagtatgatagtcagttttggatgtttcttatcattgcattgctagaagctgaaagtttgttttctctactacagat

SEQ ID NO: 22405 - DNA, 958 bp, Glycine max
  Intron number 1 from transcript Glyma07g08160.1 (locus Gly ma07g08160) derived from phytozome v7.0 (chr-ID Gm07; pos 6798276 to 6799233 reverse strand)
ttggatttgaagccatttccaacacttttggtcaggttctgttctcaccttcctcacttgaatttggttgtgttgattatgtgtcttccttttcaattgggtgaggaaaaaaaaatgatttcgattagtgggtcgttttgtgaacttccttttgggattaaagtttgctccttttttgatatgttgctggttgaactatctatcatgatttggtggttctgttaggtacactttgtggagcctcaaattggaaagtgtttggtttgagtttcatacgaggcacccttcttctctctattgactcactgaactacttacttgtttgctgcttattcataacaatatttagatagtttaaagggtcattggcataccaagtgagatatgttgccaatttagctgctaaaactttgtatttgtgcatcttatatgaatgattgtttaagatgattataaatggatatgcaactggttttaggccaatgtagataacccagtctttttctgggttgacactgagtggcttacacctttggtacttgtggaatcctgcatgcttttggacttgtggaatttgtttctatataaaagatttttgcctccctttcctctcaacttgatagccactcattaatcattcttcttgccatgcacaagtgtgagtatgatcatgtatgtgcgcacacaaggatctaggtgagacagagaaagtgcatttcatgcaatggttattttaaatattaataagttcaacagatgccaatgtcttacaagattttgagccttttatccattaaatgtatcttaaaggtatagctagccttccccaaatagaaattcattaatagaaaacatgaggataaaggatcacatgttagcatttcatagtgtgtaaaataatattgtgatttgtttcattattgacaattctgtttgtttgtttggtaatggcagcctg

SEQ ID NO: 22406 - DNA, 585 bp, Glycine max
  Intron number 2 from transcript Glyma07g12370.1 (locus Gly ma07g12370) derived from phytozome v7.0 (chr-ID Gm07; pos 10657099 to 10657683 reverse strand)
tgttttttcttggttactttagtgttcaaaactgatttcctacacaaaatttgtggcagttttgtgattctgctcaaatttatgacaggtagcaattaaaaagttgtagaacgactaattcaatttttcagttaacaatgtttattaatgctatcatatttattaatagagagctttttttttcagttgtaattatgttttaataggttttgtacactttattattgtagttgtaaattcttttcatgaattaaaattataatcaatgaagacttttggttcatagattcagtttgccagcattttatttatacaaactacaaaaaatagcattgagtcattaatgttggtaataggtttgtgatcatcagacttggtttgaaagcctacttaataaataatctagaagaggacattgaaatgtagataacaaaatatcaactccccactccttgatatgttcaatgaattgtgcaatggttttcaattttgatgttgtgacagttagaccaagaataggtttaaggttaaatattgtgtatttttttagaaatttctaatcagccttctccttcacaggtggca

SEQ ID NO: 22407 - DNA, 939 bp, Glycine max
  Intron number 2 from transcript Glyma07g30320.1 (locus Gly ma07g30320) derived from phytozome v7.0 (chr-ID Gm07; pos 35345875 to 35346813 reverse strand)
aggttttctctcctcacttgctaatatatatgtcgtaaaaatgtgtttttttttcttccgaatataatgtgtttttgttgatgtacaatttgatccctaaaagttgcaacttggttgttttggtccctataagtgtgtgcttatgcaatctggttgctataagagacaacataataagtttatcttttaatcagctagtgtcagtgagatataatggaaatgccaatgtggatcgtcatgtgtgcatctttgttgttgtttgacaactaggtggatgtttggatttcagttcaaaatgcagtgcacgaattctgaagtaaatctaatggtccacaaactcagttttgcaaggaaggctttggatgcttttgcaaacttcatattgctccaaacgtctgtttgctgaaaaacaaacatgcactaggttgcttacatggaatccttaaacaatgtcatcacacatgcttggagaagactgaaatttcccacctattatgtccctaacaagcattttttatttgtgtaatgtaaactcccttatctctctaaataaaatgtttcatttagggactgggattccatgtagggaaatttagttggcaaataatgttgtttgtgtgtgtttggtactctacatcagcactttcattatgtctttctaacaccgactgatggagggattcacttgatatgaagttgtcacttttgaggatcaatttatatagatgtgcactataaaggaacacatttatggatcaaattgtatttaacttcaatatgttttttctctcattaatcctaaaggtatttaggttatattctgcttgggaaaattaccatttatctgcattgaggcaaaagatggcctttgacttgtatgctactatgtatggcatggctttaggactctacaaacagctgttggggtatttggaggtg

SEQ ID NO: 22408 - DNA, 994 bp, Glycine max
  Intron number 2 from transcript Glyma08g39300.1 (locus Gly ma08g39300) derived from phytozome v7.0 (chr-ID Gm08; pos 38812902 to 38813895)
ccatcaattaggtttgaattgtgaatcacaaaatttccttcatttgttggctgagatggggatccatttttatcttgcacaacatatgtaatagcatcaaatataccagttgattaacccaaaaaaaaccctagaaacatataaaagacacaattttaattgtaaaaacaatataaaaccctggaatattgggttaattcatgttgaaaaacagtctagaaaaaagacttggaacatcagcctgcaggaaaaattccaagaatatttcctctttcggatgtacttgaaatgtaaatagatttcaagaaaaccgggtatcgaaaacaaatccgttgactacatctgttttcttttaattgtaaaatttgacaatagtagaaaaacaaagggttgatagattaagtagctgatagtgagtgaaacgaaacttggttctgtgtgtttaaatccatggatatccaccctaccaaaaccaaacctggaagtgtgtaacccaaaacaaactcactgaaaaatcaaaggtttaggtaaaaacccaaataatctatctgacgaagtaaccaagcacaagaaatgtgtattagcatgtgccttcaatcacaatcaaacgtttctttaggtaaaaagaaaaaagtaaccaaggaaaagaaatggatattagcctgcgccttcaaacacctcctatgtccatgatattccagccaccttaaaaaaacaaacgtgagaacacgaacttgcagaaagatccagtctttttttttgaacaaaggcataaacgataaacaactcagcaatatgaggttcaggaaataatagcaaccatccatccaaatatggggcaaaaaaataaacatttgcttcaacaaaataaaaaaaggtcaatataaatattgtacaattacctatatccatggttgtttctatcccatccatatcaccattattgtggtttgagttgccatcaattttaaggtctcagttaggtgaaggaagt

SEQ ID NO: 22409 - DNA, 598 bp, Glycine max
  Intron number 1 from transcript Glyma06g44930.1 (locus Gly ma06g44930) derived from phytozome v7.0 (chr-ID Gm06; pos 47735388 to 47735985)
ctggtacggcgaccccgaaggagacggcagcaccggtaactaactaaatcccttcataagatctcttttttttttttctctcgagaaattcatagtcacctaattgagattttgttagtcacataaaaattctatgttgtgtttttttttcacatctgactcagtaacacacttgacacaaatgtagagaaatagaaacaacattagatgaagttttcttttttaagtttttgtggtgttctgttctaatctgaattgaaattttacttgaataatccgaagaaaaaacattccacttctaattagaaacgaacaaaacttaaatgtagtatatttttatatgtattttcagtattgttttgtatgaaaatggaaatttcacttcaataattcacttaataaaaatatacaagaaaggttcacatagataaattctaattaacaaaggggtctaggtctggctcattggttgagcaggtgcatgcggtgttgtatatcgtacggtctttaattcttaagggaaaaaaaaaccaattagaaaaattgtttgagatgtgttaaaaagttttgattttgattatgaatgtgaaggtggggc

SEQ ID NO: 22410 - DNA, 1005 bp, Glycine max
  Intron number 2 from transcript Glyma07g09960.1 (locus Gly ma07g09960) derived from phytozome v7.0 (chr-ID Gm07; pos 8379271 to 8380275)
ccttggctacgcgtgtttgatcttcaggtatgaaattcagctagatacagtaaacacttagcatatcccgtatcatattacttttgattctgatcaagtggtcatgcttcataatttgttaacgatcattcaccctcatctgaatttttggtctcaatatggtctcctaagcttaaagtttcactttggtttgaaatgtctctattagattatttaactacattgatcattcaccctcatcatgacaccagtttacactaatttggtcaacttggtgatacatgacaaactatgaaagatgtcacgtcagatgtgttggagaaccagctgatggagtcttaagactatacaagcaaacaacagatgatacagagtaaaacaaagaagattggtagagaaagataacagaaagtattattgattgtaaactgttttttgcacacacatttacattgcggggtgtatatttatacgtacaaggaaaagtaaaacagaaaactaaagagcaagttgttataaccaactaacaaattagttagttagttgctaatcatccttattggattacaacggtcaatgaatgtttgtcatttcagccaaaattaacacagttagtacaagaaacgaaataactattttggtcgaacatagacattataaggaaccaaaatgaaaccattaacacttagaagaccaaactgaaattaaaaatacagagaccaaacttatattttagccataattttaacttatgattcattttatctcttcatgattgtttttatattcttctcatctaagtgtttcctaacatccaaactattagacaatcatgcagaatgagttccactactgctttaattttaggatgtgactttccattcattattcactctatttttcattaatgattgtacttaccctgaaataatgaaatattatgtgtgttattcaatcacttgcacattagggactagtaaggcgattaaagaaagtaagtaaatc

SEQ ID NO: 22411 - DNA, 964 bp, Glycine max
  Intron number 4 from transcript Glyma08g16680.1 (locus Gly ma08g16680) derived from phytozome v7.0 (chr-ID Gm08; pos 12223320 to 12224283)
ggcaagtttctgttctccattttttgactttccatccttccccaattgtacatttattggattaggtgaaatgccttgaatgacaacctggactagaatgtattcaatggatagaatactatttagtgttcacaggcactgcttatggtgaattcctgtaaattgaaatctttcccatttgtttcagttaaagaacagtaagatgtagattatgcatcaccatagtggtcttctttgacatttttacttgcattgaaataaaacttggaatcaatactcgtttacttaaatttggattttagcattttatttaaggacaataagctatttggctttcttaacatattaccttactcgggggtaatctagtttgttccgttatatgcattgagctagttagttccttgctgagaggagttaacagtaaaactttcccatgttaggttatggaattgcatgcttattccatccatcattaaatttttttcattgccttgcttaatcatagcatgtggttacttgcaccttaattcttatcttacctctaatttgctgacctcttctgtgaaacatgtggtgacctgatgattctgattcttagcatactgtatctatatctactctaatcaaatccaatttttattgctttattgtgagagttgaatacctttcatgttgcttgggaaaattttgatttgagagctggtatgaatattagtgtgtaaatcctggaatcagttggtttgttagtgattctctgtcatctagttgatctgtggtaaatccaaactggaattttctctcttattggttggattcaccacaaaatggctgcaatatctgtattaggtgcaatgtgtttaatggtctttggaaaccaggaggtggcccttccaagttagtgtagtggtgaaatttgactttggattagctgctaatgttgttcctctaactaatgcagttt

SEQ ID NO: 22412 - DNA, 951 bp, Glycine max
  Intron number 1 from transcript Glyma05g08450.1 (locus Gly ma05g08450) derived from phytozome v7.0 (chr-ID Gm05; pos 8349001 to 8349951)
ggcaagcaggtactactacaaacttccccttttgattgattattggttttcgttctagattgttttggtttgttcttttcagtcatatgaattcagttttgtgatttatctaggttatgtttagaactagtaggtcattttctgtaatgttgttgtgcttgttagtgatctgatctgcaaagagatcgtttctgtaacaagaaattatgtacttgaatgcttttcattttttgtttttgtgtacgagcttttggtatttttttgtgcagcagatgttacttcagtttaaaggtatttaatcacttatatagtgatgactttgtgtctttgtctaaggaatatgtcatatagacacggaattctgcattttctataaaccttgctgctaggatttttttctttgatagaaatgtcttagataattaagtgattgatcatgtcctttttataatgcattacaatgcctatgtctatagtttggtgttaagactactttcactttgcaaagtacacgtttgttgcttgactgcagtttatagtagttttgtgtaatttgtggaaagaaatccctagtgttaccagcaattccctcacccaagtgattgggcagtttaacatggcatcatggcctacttgattgcttctgtctttcaaacatatcatgatgtgaacattgcctctatgaatgattctggatgatcaatttgcgagcatccctcctagatttctgctaatggcttagaaatttgatgcctggctcaaaaaatttggatgtactttcattaatatgtaataacttgtatctacttattgtgaacaaaagtacaccagagaagtagggtgatttcaacaattaaaattgtttggttcccgtctttcttctcaaactcctgagtatttttgtcttgcaaatcagagttacaagttcctggtggacgcaccgaggcagaa

SEQ ID NO: 22413 - DNA, 599 bp, Glycine max
  Intron number 1 from transcript Glyma06g48170.2 (locus Gly ma06g48170) derived from phytozome v7.0 (chr-ID Gm06; pos 50451630 to 50452228 reverse strand)
tcaacggctggcaccgagccaggaccacaccggtggtttgttacttagctcaaaatcaccatcatttcacttttttccttctatatcattaaattgagtttcttttcttccatatttcgatgttaaacatgtgcagttttttttaaagggtttgggttttattttgaatttgtttgggtttcgactttcaggacatgacttgtatcaagtaattttttattttttttgctccttatattgtttaatccatgatttgtgcaattgggtaactatcatagttgtatctgcaattctgatttagggttccagtagagagaagctctcaaaagcacttctggcttgtatccaaacaggcccataataataataacaataatatatttgttctgctgagaaaaggaaccgcacctgctaatttgaatttgtgtggtaattttcttaatgtactttcatttaaacttcagatttgagtatggttgttatcagtttcatactcctttgtatgaaaattactaatcttttattaaagacaaaaagttcaagcttcataattatatcaatctgttaattctggacaggttctataaggctacatctat

SEQ ID NO: 22414 - DNA, 691 bp, Glycine max
  Intron number 3 from transcript Glyma08g28800.2 (locus Gly ma08g28800) derived from phytozome v7.0 (chr-ID Gm08; pos 23159397 to 23160087 reverse strand)
ggagtaagttcttaatctaatgcttttcttccgtttccaatgtttttgtctgataattttaatgttaattttatgctagtttaagtaacatgccttgcatttattctgatctatatggggtgggatgtgggtctgcagaccccatatcatttaggtcaatttaatcttgttggatttaacttaggatactgtgttaatgatacttgtttattgatactgtgttaatgatacttgtttatctgttttctgttaacttcttgttgtcaattcaagtcaatgtttggctacgtctaaaattatctatatacattttggagtcactgggagaccttgggtcggtcatatgtttgaatgtcctgcattaaaacctgaatagtggttttagacttattttttaaacacctggtgataaggtttttggaagtttaaattatctgcatttgtagtagcctattgaagtttatagctaccgttttgataattacacatatgatataggttgctgacctttgtatgcactacttgcggctgtttctcttgtataaattattacacaaacaaccggattgtaattttacctattgatgataattgttggatgctatgataactggtagaaattgtcatttaactctttaaggttgctgtatatttttgtctcattaacaaaatattttgatgtttatagaca

SEQ ID NO: 22415 - DNA, 814 bp, Glycine max
  Intron number 1 from transcript Glyma08g28130.1 (locus Gly ma08g28130) derived from phytozome v7.0 (chr-ID Gm08; pos 22420128 to 22420941 reverse strand)
cctcctgtaagatccaggcttccttttttatgttttttttttcattacatttatgaccattatggaactggtatatgttgtgggctgactatccccaatatccagttgttagttaaagacacatgaatagttttatattatatctctaaaacgctgcttcatgcaagtgctctttgggcttctagcatggatcatgcacgacccacttaccttgtgctgaaattcaactttttattagcaaaatttgggcgatataagaattaaaaactacagtctagacaacttgggcatagaggctctaattatgaaacaactgtcccaaaagcttaagctggtgggtaaagatacaaaaattgtttcattttgtatatgaacaaaataaaaagggggatgctagtaaatatgtcctgctcttttgagttgttacatacaatatccaagtctatttttaatttatagcttcctgtgaaatatgttcttgcacattcttgcttatctagtaaagcctgacttcggagtaatgctttcatacatgatcagttatcagtaattttatgcgtttctttttggaagaatttcaatttctagggttttgatggacaaatttttaattagtgaaaacaccagagtcaatttattttatttactcataatcattaaccattctaggaccttgtgactcaatgtctatgcttttgtctaactttctttccttcacctttttttacaaacaaattgtaatttttaaatgttgttattaccgtaatccacttttttttttcatttcatgttggctttattttgtaggaaacta

SEQ ID NO: 22416 - DNA, 1006 bp, Glycine max
  Intron number 2 from transcript Glyma06g00200.1 (locus Gly ma06g00200) derived from phytozome v7.0 (chr-ID Gm06; pos 2985 to 3990)
aggtttgtgtaattgtgtatttccttttgatttcttttttttgtgctgctttacaggtatgttgatttcgttgaaatgtctgtttttttacttgatatattctttaggatttttgtagggaattagtactattgaataatgaaggacatagctcagtctttgaacaaataactattctctgtaggagccctaggctctggaactgtcatttggcagtgtgttgtttgaattcgataaaatttccctttcaatttttcaatttcagaattagtgttctatcataggtcctgtgcctagcataagcaggcacatgaagttatttccctgtatcgtttacctcgttaacactattaaaaaatggatcttcagatttcacagcttaatcggttggaagttttgttaattgttaattggttacattccaggagtaagctttctgaaatagacacatgatctgccagtaatttctcctttaatgcatctaaacaaaagtagcacaccaattttaattccaatagaaaacattcctcctgtttataattttaaaggacatatcattaaaataacgagcatgtctataatctacaattttgttgcaattgaggcagtgactaagaaaggcattaaaatggaaaattccctttagttagctaagatcatagttgttcatgtttccttaccgattgaagaatcaaatatttaaaatattcaggacaagtcaatatagggaagtagcatagaagctctcatgatagtcattgcaaaaagaagtttagtcttcatgggagacctttgattataaccttttttttcatgcacgttgactagtgatttagcactaagttagaggaaaaaggctatattgaaaggcatttactttgcaatctttataaaccaaggagttgggattttggcctactctatatccaactggttaagatgaattctgatttgtcttcgaaaatattcaggaaggaaagattggaagttctgtacatactgtaca

SEQ ID NO: 22417 - DNA, 818 bp, Glycine max
  Intron number 2 from transcript Glyma08g40840.1 (locus Gly ma08g40840) derived from phytozome v7.0 (chr-ID Gm08; pos 40702029 to 40702846 reverse strand)
gaggaactgtttggtctggaggaactcaagccaaggtctcaaccttttccttttattttatttaattttctcttactttgtcataaaaatttaattatttagtttaaaaaattctagcaatgtattctctaacacattttttacatcattgaattgtattttttattcaactgttgctagcttggctggcattcctcttttttatttaggagtgtggactttgggttctttgtgtttgtagttgctttgtggtgaaaatatgatttctattaaggtttagctgcatcttttgttcagttcactcagcatagaaaaacttttattactttcgggtctaggattttgaataaacaatatctagctttaagcataaacaagggtattgaagttcttaccatgattgaattagattatacaggaccacatcagcaatattcttgtacatttcaccaaaaagaaaagaaaaaaaaatattcttgtacagctggaagttgctgccagtgctgctatttcaatttgttacatctatccaattctcattcaccttgcaaaatcattctctcttttttcctgggtttagatattctcagataaaaaaattatgctatattgtgtggttaattgcaaactgtattggttattttcgtacgataatactcatcgtttcaatcgtacaaaatacatattatgatttgaatgttggtatggttatctccatatttgatattttatgaaaaagtcctttggcggagtgacttttaacaattttttctataatttcagcacggctaattctcatacaccagaaccaaggtcct

SEQ ID NO: 22418 - DNA, 240 bp, Glycine max
  Intron number 2 from transcript Glyma05g33480.1 (locus Gly ma05g33480) derived from phytozome v7.0 (chr-ID Gm05; pos 38116011 to 38116250 reverse strand)
gctattatactgccctccaattggagggtccagaggtagtttattttagttttagttttagcttttttgttggaattttcttctttttcattgttatacatctgggtctaaaagacacactaaactgatgttctgattcaaacatattgaaatgcatgtatcaaataattattgtgggctctcagtccgaaaaagtaatggtttaattttatttgttttatttaaggctctcttgtatac

SEQ ID NO: 22419 - DNA, 884 bp, Glycine max
  Intron number 2 from transcript Glyma08g08590.2 (locus Gly ma08g08590) derived from phytozome v7.0 (chr-ID Gm08; pos 6131202 to 6132085 reverse strand)
ctgttttcgtaccttgaagctcgctacaccaacttgtaagtttcggatttctttgtttgaatttttgtaaaacttatggtgtcattgtagcggttattgttgttgttctgctactctaggtggtcatgctagtgtacttcatttttctgtagattaactgttaagtaatgattggtacagtgatgtcgttgacatttcaatttgccatttaagttagtaatttacgaaaacatatcattaggcctaacctatatatgttttgagtccctacatatgcttggcatttcttttgtttctgattcctgcaatcttcttcatcacctgttttggtccttgccttaaacttaacagttaactacattttttacaaatataggatttttgtttctgattcctgcaatgttcttcatccctcttaaaaaaaacactcttttgttattggtattttatgtccctggaaaaatatcggaattttatttgtagattctactgttattttcttttaaacatggctatttttggttttagttcctactgtaaccaaaacaattgacggcaaatattggagggataaaaagtgagaaaaatgctacaaggattaaaaataaaaaatactgcaatatttgcaagggcataatttaaaccggtatccttatatttgtaggattttagtgggtttaggccttatgtttcagtcatagctggtggttatggttgttgaatactagaatttattttattcagtcattttggcctttagtccccttttctaaatggaatataaattgtattatatttgattctcatttagttgagttcaatttttcatttgttttttcttgtttgttgcagttggggaccttaaccacctcatttctgctacc

SEQ ID NO: 22420 - DNA, 953 bp, Glycine max
  Intron number 1 from transcript Glyma05g11630.1 (locus Gly ma05g11630) derived from phytozome v7.0 (chr-ID Gm05; pos 11858235 to 11859187 reverse strand)
tcttgcggctagggttttagcgcagcttcttctaggttcgttctcttccgccgctctatggattttaaaccttcgaatcatgtttattccattgaattatgttgcttgcagtttatattttctgaatctgtagttgttgtcttcaatttatcctatgctttatagatcaatcttttgtgtgtgtagtacgtaatttttgttctttttgcttttcgttcaagttgttgggaataatcggggtatcatgttttgatattgtttgttttcttttttgactgcttaataatttttaagttggttttggttttggggttttatgtgcttgttatattcaaatctttggatccagatcttacaaaagttttgggtttaaggatgtttttggctgatgatgaatagatctataaactgttccttttaatcgattcaagcttaggattttactaggcttttgcgaataaatacgtgacagtaagctaattatgtcctttttttgtctcaatcatatctgtctgggtgtgccataatttgtgatatgtctatctggtagaatcttgtgttttatgctttacgatttggtatacctgtttttgaacttgttgtatgatgggtatttagatcaccctatcttttttatgcttctggaagttttatgtaaatgtcgaatatcttaatgttgttgaacttataatgttgtgttgatgtatgtatgatggttttgacaacttttttcactggttctgaaagttttatgtaaattgcaaatatgttaatgttgttgaacttattttttttccttcgatgttgttttgatgtatgtatgatggttttcaccgtagtttctatggctaatatcttaatgttgttgagcttatttttttccttatatgttgtgttgatgtatgtatgatggttttgacaacttttttagtttctttgcagatttaaggaag

SEQ ID NO: 22421 - DNA, 987 bp, Glycine max
  Intron number 3 from transcript Glyma05g38260.1 (locus Gly ma05g38260) derived from phytozome v7.0 (chr-ID Gm05; pos 41642251 to 41643237)
tttccgaattcactccgattgtaagccatgaaacggaacaattactatatcttaataacttggtgcattatctattagtagttgatttgggcatatttcttaaatcttaatcatatgaaactgcaccatgactttgatttgtaagcatttttacggaatattattatgggaaaagattcttgttctatggagaggccaattcagaaacttttgtaaacgggacaagaaatattttataatagtatcacacaataaaatatcccagttatcacaaaatatataatattatgacaaaaaaatctaaaatacttataacttttacaaattataattatcttttatatattttgatattttaaaaatgttctataatttttttattgtcaatactatacaaaattaaagggataaaaaagtaagattagtatcaattcattttttattttttatttcttatattcatttaaaaataattcatcttagcaattttttttattacacatatacaaataaaaaaatcatatgaggacaattgggtccacaccctataaccttgatatgccaatagttctatacattgattaaaaatagttttatgatatgatatataagaataattttgaaatacaactcttactctcactttataagcttgattttgtaatactaaattagactaaaaccaacattttcatatatgccaaggttgaaaccgctagatatttatgacttctcacagataacaaattaagaatgaaaattgctgagaggttgtctcgttgcaggtatcatcttttatcaatatttatcctttatgaagtcgttcattttgatattatttggatctcttaggatgatatagtgaataaactgaactaattaaattacaatctctactcttcttgtccaaaaaaaattggtttaacttttaaaaccaactttctctgtgaattaattcgcaggacattaacttttggggagcagttt

SEQ ID NO: 22422 - DNA, 727 bp, Glycine max
  Intron number 3 from transcript Glyma07g37380.1 (locus Gly ma07g37380) derived from phytozome v7.0 (chr-ID Gm07; pos 42468760 to 42469486 reverse strand)
taagtggcactacagcattgacaattatcaaacaggttatctatattcatgtgatatgctattttcaagttttgatatgtttgatttacttacttgaatcatgaaatgttttgagcaatatgtttccaaccttacatatttttgtcaacacatcatgcttccaatgtttaaagttcattttcttttgcttttttactttattacctttttccttactgacaaaacaggcattaggaggatatggttaacgaaatatttatttcccggctaaaatttcataataattgatggaacttttttggatttgatgattataaaattcaacataatcaatttcatcatctaaatagttgagaggatggaagaagtaaaatcagtgtgttaattgatagttttaacttaattaaaactcctaaactaaacacttccctcccacacgtaatttaattcaagatgatagggagtgaaagagattaaggtaagtaacttatttttaaaaactaattcagttatgttttttttaaataaaaaaaacactacttcaaataactacataacatgctggcttgatagacataattgctcttaattactcaatttcagtggccatgctctcaacttgcagtgctatactagatcttactttgacgtaataatcagaagtggcctgaaatgtttcactgatgtttcagggagaatatcttactatagcaaacataggtgattc

SEQ ID NO: 22423 - DNA, 774 bp, Glycine max
  Intron number 1 from transcript Glyma08g41170.1 (locus Gly ma08g41170) derived from phytozome v7.0 (chr-ID Gm08; pos 41193826 to 41194599 reverse strand)
gctctgatttcctccggaggcctacaagtagactggtaatcctgcaattattttaaaacattttttgctattttgtacattatccataatataaacaaaagtcttcagtcaaggttttgtttgatcaacatgttgaaatgaaaccaaaaaatcatgttagtttaatcaagtgatgaaagttttaattattggagccagaaaagtaatatgtatatgaaagatattgagtcagaatcagatgatctatgttacatgtgttctgtttttcaccctccccctgtcataggttttgaagaataataagcaatggagcagaacaatatagtaaaaaaactaataggagaggagaaacttgtagaatgcagacttggatagttggatctcaaatgaaagttcattccacaagtatgccatttgatacatcaaatcttttgtgattaggtagatttgatttcttaaaatattgcctttgttcatggtgataatggatcatgcatttgtttataagtgttattattatggcccttccttggaattaatatttctacaatatttgttggcttgttgcttgatctcatttactatattttatgctgtgaagtagtagaaaactggaacttaaatatcaacctgaattatgtgattatgatatttcattgatagattaatcattactgcattctgtctttgatttataaagcatatgttaattatgtggaaaagattatatatgtttctttgctgcaatgcagatcagtcaatattcaaaggaca

SEQ ID NO: 22424 - DNA, 810 bp, Glycine max
  Intron number 1 from transcript Glyma05g36600.1 (locus Gly ma05g36600) derived from phytozome v7.0 (chr-ID Gm05; pos 40429874 to 40430683 reverse strand)
cgggtctctgcttcctctcgccatcgtttccttaggtaacaaccagatctcatcacttttctctttcaatttcaaatgtacgtagtatccagatccatctcactgcgattcctttcaaccttgtttagatcccctattttcatggatctgatgagatcctgaccctacttgcttaacattctcatcaccgccctcgttttactgccactgagtattatcatcatgcgtctctcgctctctccacatcttagaaatgcctcaacaatgattagtcgctgtttttcatttgcgtcattattgtatccataatttctctaatttcgcaaaaacaacgcatgctgcataaacctttttttcttcgttagactagtcgtgttgcgtgtcttgtgcaacaataaattaattacgtgcttgattgcttattaatttagtttctcgtattataatattcctcatccttggtcactgattagattacatgatgcatgatttgatacctaaaacattttttttctttcgtttatgtcaatctttgtcacgcctccaaataattgatttcttccttttaaaataagatttgcctcctccactaaagcaagtaagagtaaataagttatctagttgatgagaaaatcaatttattgatatttcatcacattcataattcaatgctgtgcatgtatacttgattatcaaccatttatattgtcatgaatgaatgagactacctactttacgtgagtcagtttgccatcaatttaactagtttgagtttacattgtaattaatgttgagagagttcatcgcagt

SEQ ID NO: 22425 - DNA, 666 bp, Glycine max
  Intron number 1 from transcript Glyma08g39840.1 (locus Gly ma08g39840) derived from phytozome v7.0 (chr-ID Gm08; pos 39416207 to 39416872)
ctcatcactccaaggttagtaaattgctgtgatttttttatcgaccaatattaatggttaattgttagtattttgttaatgaagaaaatcgaatccacaaccttttccttcgtcccttttccttttagcatcaagttaaccttataactcctagtcatttgttttcatttctttttacacttttgcctggaataatttttgaatgttctaggtcttgtttaaattcttaatttttaatgtgttatcaaatattcatgacttgtgtctgttgtgttaattttttttaggacaaaatatagatacattttttaggtgcttttggtggtatcaggactgaagttttaccttggtaatctttgttgaccattaaaggaatcatttttatgcggattactgaggtgaaatgattagagaacaacactaaaagcacttaagaaactgcatctaaattttgtgattttattgttggtgttaagagttttgttttatgttcattgttggaatgttggtttttctgtcttggtgttaccacttttaatagacactcaactgaactaacttctacttcaccatgtattcatacaagagagccacttccctcttcttaatcttttgtgcttatgtgaatcaggacctttccctctggcccactattgcattggcatt

SEQ ID NO: 22426 - DNA, 681 bp, Glycine max
  Intron number 3 from transcript Glyma08g04590.1 (locus Gly ma08g04590) derived from phytozome v7.0 (chr-ID Gm08; pos 3268480 to 3269160 reverse strand)
ttggggcagagcttctggacatcatcctccccaaggttctttcctatgttaattttttgttgtattctaggaaacaatattaaatttacttgaaaaaaatgtttactttcttacacaatcttcgtatttttcctcgtactagtattttcatgagaaacaagcatatttatatgataaaaaaatgttgatttcttgtgatacccaaagatccactaaatcaagttttggagatgatttataatcaaaggttatgcacccgttttgatttttctagtacaagaatttccctgaaaaacataataacttataaacagttgttttcttgtgatacctaaaagatccaatttattttatagttggataaaattgatttttgttaaattgattttgattaagttttttttcgacaactgaatataatttgggatgtgtgttcaaattaatatcatctacagacttatattggaatatgttcaacttggaggaattgattatgggtatttgccaattaggcactaaatcaatttttagtgataatgattcatgaccaaagctcatgtacccttttgattatagtaactaaatcatcattttttgtcatggggttcaaataatctaactaaagacttgtttgatttgtttgcaggaaaattgctatctggaaagatctggaggccaagt

SEQ ID NO: 22427 - DNA, 810 bp, Glycine max
  Intron number 1 from transcript Glyma06g01000.1 (locus Gly ma06g01000) derived from phytozome v7.0 (chr-ID Gm06; pos 590927 to 591736)
ttactctgcttcatttattgaaaaggtcaacatagctttattacgtgaatgatgacttctattgatgattcattactattcatactaattaccgctgttaaaattcactattgtgtttaactgtttattagtattgtgataaactaaactacaagcatggaaactgtttgtgaatctacctaacatgtttgaccggggaatcggttcattcggttgagagtccggtctgagcttactatgttatttgattagttttgcgtaatattaagtacaacccattggttgaattaatgagccaggaatatgggtcaagtttaacaacattgaattaatgagccatcccatacattttattgattaaatagtatttagtatagcacatgaatcatttcattttagaagaggtatagtaggaaaagattttacaaagtacagacctagtgtgcttccgaaagaacttgcatagacacctgaatttctgtattatacatatagactcaattgtcagctctgttcacttctcagtgaaaaaaataaaatgatttcctctacttaatttatgcatgcttaaataccaatatctgattgaaataaagtcttttaagcgagttggaataaaaaaaggaaaaacagggagagatcaaatattgaagaaaaaaaaaacaacacagaaagattaaattactttaatctcttaatgtgaagcaaataatcttaaatgctgcaaaatccatcataaatatatcttacagaaaattattctaactactacgttgttttcttcatgaattttgcagcccgaaattgaaa

SEQ ID NO: 22428 - DNA, 527 bp, Glycine max
  Intron number 1 from transcript Glyma06g46220.1 (locus Gly ma06g46220) derived from phytozome v7.0 (chr-ID Gm06; pos 48882768 to 48883294 reverse strand)
ctacactccgttcaagcacctcatcaacgacgacggtacattccacactccgcacattcgtttatctgtatttgatttccgagaaatttaaaggaaaatgtgaaagaaagttcacgttctcgatcgtgatgcttagtcgcagtaactataggaaatacgtaatagctttttgttttcgcgtttcgcatgcctccgattattcgaagacttttatgttttatttttgtttctgtgtgagcgatttttctatcacgaggttagtaaactgaagtagcttagttgaatttggttatgcttctcggaaattttgagatagggaaatggattgaggttggaggaaagttaaatttgaattgatgagttttcataatttcattatgtagatttctttaacaaaattggcgaagaatacagaaaaggctagaaattcattgttataagtttctgttggattttttttttatctgcattgattgtgtgtgaaggttatgaagatgaagctgagtttagttgttttcttacagaga

SEQ ID NO: 22429 - DNA, 723 bp, Glycine max
  Intron number 2 from transcript Glyma08g12930.1 (locus Gly ma08g12930) derived from phytozome v7.0 (chr-ID Gm08; pos 9453716 to 9454438)
ccgctaatattactgaagccattgataataggttacttcctcccttaattctttctcaattcacatcctacattttttttttgtatatcgcataaccacaaagttaatccaatcttgcttgcagcagtcactatctcaatgtctataagatcggagagatggtggacaaataatactagtacaaactgttttacatcttttttgctccataaacacttgtaagaaaataaaaagctaaaattaacttacacgcataactttcatagaagctttctcatttgacttctccaaaagttgattttagcttatgggaaaagttcaattaattttaccttcttattttcttgtcctataaatgcttgtatttatccaaacaaaaccttaatatagaaaactagaccaaaaacaaatgattttgatactctggcaagtcttgttgacccccccacccaccaaaaaaaaaaaggctttatagagtttcagctggactatcgaataagaaagaaaaaaaaaattgatcagaacaatagtaatggagtttttgattgtgatggctcctcaaaatatacactcaagagaaacatttgagtgggggtggaagtggggaggaggggtgcttgtttagaacagatataagataatataaagtttgcattttatgattctctttctagtaataaactctgaaagcttttgttattgaatttatgcagtttgttgcgg

SEQ ID NO: 22430 - DNA, 342 bp, Glycine max
  Intron number 4 from transcript Glyma07g02280.1 (locus Gly ma07g02280) derived from phytozome v7.0 (chr-ID Gm07; pos 1572854 to 1573195 reverse strand)
ctattcatccgtgagtcttgattatgtttctcacccctgcttccctattttttgttatgtactcgatatggagctgatttttaaatctcgaatgttgaacatgtatgattcgggatctattgtgcatataatgatgcatggctggcttttgagttttgaatgtgatttctgtgaatagtgctccaatcactaattgtgcactagactcaatatatgataatagtttgttatggcatccatttctatttcatgggatgaactgagatattgcttttgtgtttgtatgactttggagtttaactggtgtgttaaaatggcaatgtgtcttctttttctacagct

SEQ ID NO: 22431 - DNA, 731 bp, Glycine max
  Intron number 1 from transcript Glyma06g16050.1 (locus Gly ma06g16050) derived from phytozome v7.0 (chr-ID Gm06; pos 12598068 to 12598798)
tgattctttcccgcggaatcttgctcggcgttggggtaagtttcatgcaactgttctgcttttcgttagatccgtgtgattgttgtttgtttgaatcgatttttctagcctttgctccaagaagaagtctttactacaaaataaagcgtttattgtattgcatacgcgaaagtcttttagtacttgttttctttgagtgattgaacggtagttcaatgtattcagtgttccttgcttgtgctcaggattacaaaatcgtgattcaatgtgttgaatattgtggtagtcagcatcttacttcgttttgagaatctgtgtcggtgttggattttactgattagtgtcatcacatgcaaaatatgcggggtggttttctttcaactttgaagtgtgaaaacgttatgatccgtttagttcatgcactggttttataatcttagcttttattggatgtagtttcccactcctttgggttttactgattggactttagtattgaatgcattttgtattttcaagacattaaatgcatttatttatttcatttgataccgtactttcttgatttctttataaaataggtggaagatttgtaggaggatatttggaatgcctttgattttgttaactagtcttgcacaagcagttttttgtagctctttgtgggtggtgtttaattcttgtttggtttgtgaccaggtgtaagtcatttgtcaattcccttggacaag

SEQ ID NO: 22432 - DNA, 662 bp, Glycine max
  Intron number 1 from transcript Glyma07g18640.1 (locus Gly ma07g18640) derived from phytozome v7.0 (chr-ID Gm07; pos 18678724 to 18679385)
gcaactttgtttttctttcttgtctggtaaggataattaattgcaaacggcacacggcgaagaaaaatatagaaaaaaaaaaaaaaagactggcaccttaggacgtggtttactttgacttggcttcactatcttacactttttttctgtggctaagccgtctctctcactcaacttttcttctgcatataattgtgagttgagttattcttaacatgtgtccaaatgcaggtgcacctctcaccgttggaatgtaataaaaacacatagatattgtatttaattgtatttttaacccttttttcaattttacaaattttaccctcaatttttattgtggtgttattatttttgttaaatattagatataatttaattattagatcaaaattacataattaaaatagcggagggattaaatttgaaaacagaaaataggggtacaaaatttgtgaaattgagaaagtaggagacccaaaagttcaaagtttattttgtttatatccaacggtcacacatataagtcgcaaaatgctgctagcttagaaatagcattgtagaatcacttttgatgacatttccttgccaaattgcattgtaacataaacactggaaaacaaagggtctatagcccatcattagcctgttcccttcttcagcct

SEQ ID NO: 22433 - DNA, 653 bp, Glycine max
  Intron number 2 from transcript Glyma08g05610.2 (locus Gly ma08g05610) derived from phytozome v7.0 (chr-ID Gm08; pos 4008500 to 4009152)
ccaccaccggtggtggtaaccccaacaagaagaaggtatattttgttttgttcaattgttttcatttatcaattaattattgattgaaatttcattgactcaaaatttttacaattgctaggttttataatttatatggcattgtgaattgttctcgtggattgaattgaagtttcctcactatgaacttacggttctcttgattttttttatgtgtatttcatctacatttgcttgctctttcaatctgtagtaatctgaaaattatttgattttttgtctaaggatttagccacttgtttaggtcttgttgaattatgagttgaatctggttgaatgtttgctttgtagtttaacagagttatctatgtggcaaatcttgtttgagactttgctatttttgttgcaagtggaggaagtatatgcaaagaaaatgaaaatattttccccaatttttcacttacatgaatcattgtatcattttatttgtatattggatatgttttgtcatcatttttaaaggatttacaatactttatatgataagatatgttgatcgttctagtgcttgacttttgtgttgtgtttctctgctatcactttatttgtatattgtaggttatctactgcacaagtttgaactggagttcgga

SEQ ID NO: 22434 - DNA, 585 bp, Glycine max
  Intron number 2 from transcript Glyma07g02720.2 (locus Gly ma07g02720) derived from phytozome v7.0 (chr-ID Gm07; pos 1848782 to 1849366 reverse strand)
tcagggtatgatagttttgctttcgtgagtgattgtataatataatgataattattggttatgctatctgaccttcatggatgaaaatcttgttagagatgatatttgtctaagttacgaattgcaattttaatcggagcctgtggatttggttataatttgttctcttatactatgaaaagggttggtcctgaattcgcttctattcaaattgactggttagggaattggatttgaaaaccttatttatggagtgaaaaatggttattttgtgggcctttagtaaaagttgttctcattattccgatagtgtgttctagtcattgtgtttctcttgagaatagtgtatcattatccaagtatcaattcatatatgggttgctctgttcatggtattgttatgcattgtttcatttttaggaacaaatgaaaaagaatacttttgtgtgctgttagtaaaagttgcccatatttttctagtgtgttagtcttcgtgtttatcaagtataaattcttatatgggtgtctttgttcatatttttccctgcagtgaagagggtgtcattgcagttgagccagctgctg

SEQ ID NO: 22435 - DNA, 793 bp, Glycine max
  Intron number 3 from transcript Glyma06g01980.2 (locus Gly ma06g01980) derived from phytozome v7.0 (chr-ID Gm06; pos 1261310 to 1262102)
ggctatataccgacttggaacattttgaggttggtgctgcaatttttcggaacagctttctagaatatacttgatttgtttctggatcgaaattgggcatgactttgaaaaaaacattgaaacaaaagaagtataattttcagataatgttgcacacagtgccgagtaattgttgctactcgctactacattttctgtcttgagtgtttatgaacaattgccatcttccatcagccaagtgaatgagctcatctccctcccgtttttgcttgctttgatataactatagcataatgcttctgaattgaggctaaggtatgcatgacagttatatgaagcttggtagattagatactaagatttttggaacttgtgctgttgttagattaattaagtttcttgtgtgaagccaacattcggaaaactgataatttataacatcgtttgtctcaagtaagttgtattatttgaggacagtcattccttatatgtcatctgttcatttcaacaagtctttcttgctgtgtcattgtttggtctgacatcactataaatccaagtgatgaatgttacatggcatgttacctgttttagattcactgatatgtcaaatttcggtgaaatttacatattgaagcagatcttcactaattagtccaaaactcctttgtgtaagttttggctattgagtggagtttgggtttcatggactactgtttgatcattgtgtaaaatatttcttgttagtccgttacaaatttgaaacacactgttgcttcattcttgcagatag

SEQ ID NO: 22436 - DNA, 923 bp, Glycine max
  Intron number 1 from transcript Glyma05g32420.1 (locus Gly ma05g32420) derived from phytozome v7.0 (chr-ID Gm05; pos 37357612 to 37358534)
ggacattggtgggttccatctaagctttttgatatgtaagtttcccttctttcacacgttttaatgctaagccactgcctagtacagttgattctaatgcagagagtgggagccaagggtaatttcaggttggactgagacatgtaccacattatgtccatattctattttcaaaaagaacatagatatgcatatatcccatcttgacatctattttaaatatgtgtagttaatgtagttgctcctgaatcctcttatgcaatctgttacatttataattacattcaagagtacttccctttgaatgttcctaactgtcaggataagctctctgtgagctttcttgttggatgggaattgcatgtggctactttttctaagcataattttctataaataacttcgtaccccattgcccggaggttcttcgctatgcgaaggtatgggggagggatgttgtacgcagccttacccttgtatatgcaaagaggctgttttcggattcgaacccatgaccaacaagtcaccaagacataattttctataaattgaaataacattataacttaccagtagcaaatgttgtattagcagaaacgtgtttattagcataactattttccaaatcagcaaatccttctggactctcccattttgccccttttttgtctcttctggcttatacctatcagattctaggcctttgatctgattcattaagcaatcaaccttgattttccccatcaggcctaacagattcattattcgttaaatattcattcaactgccttttaaatttatctttgttaggcataatatgtgtcttcatattttgatatcttgttttttggttcctgtgtaaaatggtcctcttctttctttcaacaggggctgctatttccaggttggaagctctctgaaac

SEQ ID NO: 22437 - DNA, 597 bp, Glycine max
  Intron number 2 from transcript Glyma08g26530.1 (locus Gly ma08g26530) derived from phytozome v7.0 (chr-ID Gm08; pos 20867754 to 20868350)
tcagtttcggcttcgtgggatagcagccgtgcaaggtttggattcacttttgagagagaaaagaaaaacaactttttatctgcttttttcttatgttattttgatgaacaaaacttacatacaattacttactattatcagtatttagaattggagtttcaactagctaacttgtggtaataacttcaatgcaaatcttgattatacaaattagtgatgtgaaacaccaattctaattggagaaggaccccaactagagtagtgagtacttaagaaactgcatctaagttttgttttatttaacattatcaaccgattaaaaattatcattgatatgactcttgagatagtttgtgtaaaagtcagtaaacttactggtggattttgtaaattgtaattgaattgtcaactagtagactatttactttttcgtaattattaattaagttgttttgaacataaattaagatccaaaacgcattcatgtttgattttcgttgatccctttctagtgttaatttcagtgttgtgttgatgtttgcttactttctatgttttgcagtgtgtctagcaggacttctactgggggtcgaagaa

SEQ ID NO: 22438 - DNA, 870 bp, Glycine max
  Intron number 1 from transcript Glyma06g17650.1 (locus Gly ma06g17650) derived from phytozome v7.0 (chr-ID Gm06; pos 14001884 to 14002753)
ctcaaggggtgacagtggtgccaaatcactgtcaaaagcactagtttatccctgaattttgcaatatagggagtaacctaggtcgaatctcaaaggacacaaacaattcgaatttaatctcagagaagggaggaggattagcaacagacttaatagaaatttgaaaatacagagaaaacaatgcaatgcaacaataattcaattatgcaaaattatcgatctgagatttcgattcacgcggcaaaattatcattgtcaattggatttcaaattcatagacattcgtaccaactcacattcatctagacaatcgtctaacatgcattcacgaaaattgaaatgacaatcacacttcctaatttctgtgaattcaagcgccgttaatagttgacttaggaaatcaattgatctcctaacctcaaaacaaaatatatcggatcaattaatcaatggatctgatctaatctatgccaattctcaaatgcattgtaatcatgaacacaattgaaattggaaagagagaggaagaaatgtatgaatccgcaattaaagacgaaactcaaattctaaccgtaacgtcggaaccttgaattgattgcggatccagccttccatggcgaagtccattgaagatcagagatcagagagcatagactcgtgagagagaagagagaaaattctaatttggtatcaagatgaaaaaaatgaattccaagttctgtcaccagttctgttttctgttgtttatacaaagttaaactataaaattcgtgggctattatggtccaattggaaggtctctgaatagctttctaaggaaatatcatatgtccaatttgggcctaaaatgaggaaaatagcctaaatcta

SEQ ID NO: 22439 - DNA, 593 bp, Glycine max
  Intron number 1 from transcript Glyma06g08640.1 (locus Gly ma06g08640) derived from phytozome v7.0 (chr-ID Gm06; pos 6312221 to 6312813)
gaactcatcaaatacggttttcccgaagacatctggtaaccctaatcttttaattcctccatttttttttcaatttaatttccgtaaattctctgctcccgacacagattattcacacgacctatgtctggaactcgatttgatttgattttattatcagttgtttgtgtagcgaagatttttatgctgtttcgcttcgatgttttgcatcacctagaaagttgaaggtgaacatttgttaatttggtggttaatcttatcatgtaataattaatagtcaggtgtcttcacaattgtgattcaaataattctgttcttattggaacacgatctttatttttgcgcgtgacataatttcggttgttttcatataagaagcaatcaaatcttttgggatatgatattatttgttggctatttgttctattatggaatagaagtccctttacacatttatttcgaaagtgcgttgcctggaattgttactgcattatattttggtttgatttgatgattgcctagatagttgtattattgttatttttgctttctatgaggttctttaatgataaaatctgtgtattgtaggttcc

SEQ ID NO: 22440 - DNA, 910 bp, Glycine max
  Intron number 3 from transcript Glyma08g10050.1 (locus Gly ma08g10050) derived from phytozome v7.0 (chr-ID Gm08; pos 7231642 to 7232551 reverse strand)
tttcgcggcggttgacaaagacgcggaattggacggtaggattgatgatgacgatggcagagtctatgtaatcgcttgatggatgtgcaatttgattttgtttgagtattcaatgatttgtttgtatgtgttttcttgttttacttgatggattgatgttgttaggtttcaatggtaggaatagagataatagagattcaatagtctgaaattgatatcggcctgttgatgttagaagatgttatacaaagtttggaagtgaagttcttcactgtcaaattcaataacatttcctgttagaaatccagttttgaatgcgaaactaatgcttatttggattcttttgtttttccctcttaatgcgctggtgttgggttttgtgctatttctgaattttgataatgatttgtggcatgtggcattgatgacgccattattttttagattcttccttgtgtgggagggaataggattccatgaaacaaaatcaccattatttttttctcaatttttaaaaaaataaaaattcttggttaaaaagtaaaaacatgggagtttctcattcatgtaacggaattcctgaatatcaacatggtttttgttattccttaagatgtttccattattgatatatccactgagcatctaatattactcattattcctcaggtcagattgtttaaggattatatataaagaatttatgcctagtcctttgcaatgtctcaaattttgagtctcaactattttctttttatgtgtattttagcattagttgctagctcaatttcccttgactagcccgtaattgtataatgtgtatatgtagataacaagatatgcttatgtttcactaccctgtgtctcattcacaggtggcattgaaaacactgatagtcatccataggtt

SEQ ID NO: 22441 - DNA, 990 bp, Glycine max
  Intron number 1 from transcript Glyma08g01910.1 (locus Gly ma08g01910) derived from phytozome v7.0 (chr-ID Gm08; pos 1242655 to 1243644 reverse strand)
ctgcccagaaccgcgtttcccagccttctacccaggtttaaccatatttctgttttcttcccaagagttttggaaaataattaaccaaaaataatctttttttttggaggggggtttggatcattttgatgctttagacctttattagccttttggttctttggagttcttttccttggtttttgttattttatgtattccatcattttgtgttgaacgtgggcactgtttggtcgagtttattttataatttgatttatctcttttccgaaaagaagacatcttttcgttttcttttttccccttctacgattgcaaataaagtagcaaacttttcgtcttcaaaagatagtaagttcgtgaaaaagaaaaaataaaattaattgaacaatgttaggattttcctgtgcttacttggtcttttgccttcggtattagcatagcgtgtaaagtccgaactcatcagttttctcactctttctgcttttagttgatatcagtcgttttcttgattatttagtagtaataatatgggaatatatttttgtttaattatgcaagtcttctctttggagtcagaactttttacttactgaattaatttaatgaaaagcaataagagcattatatgcatactttgctgataataacaaaatagtcttccttttattttttgggtattgaatctctctcacttttggataatctgacgcctcatacttgtatgaatcttttacttactgaatcaatttccaaagaagtgacttttatgtgattccttgcatttttcactggaagaagggatgttcaagatgtaaaaactactgtgtatgtttcttattcaatctggggtctatcaatattaaaattaaggtctgaattgtatttcattttgtatgcaactaactataatgcatcaagggaatgaatacttgtgatgtgttctgtgactgaaactcaagtcagctacttttggttgcagaagaaaag

SEQ ID NO: 22442 - DNA, 620 bp, Glycine max
  Intron number 1 from transcript Glyma07g21670.1 (locus Gly ma07g21670) derived from phytozome v7.0 (chr-ID Gm07; pos 22847545 to 22848164)
tctacaaggtgacagtccttttgaaaatgtacttctttatgtctttatgattctttcttatgcagtctttggtctttctttcctttttttttaaataattgaaaattttataatttaggaaatgaaatctagatgacgggcttcaatatgcctctttatagcgtgctggtagcatctacctttgaaaagatcaaaaattgttatctcacaatcagttatttatttatttttaaatgttggattctgcagtcacttctttcaatcttttgaagttaatgaatttacttttggtgtcatgttcttaagcttaacacctagtgttagtaaacaggagaaatacattttattcttgttagaaccattcttatgaaaaagagtgaagataatgaaaaagatagcatacatcaagctttagtgtgtacatacaaagtttcttatttaaacataacataaaccaatagatatgactaaatagtaacctatatactgtattgagaaatatcttatgccatcaattcattagctcttaatcagcctcagatgcattctatgtcatttagaaatttattttgttgattttttcctaagatatggatgtaattgatgttttaatgacacag

SEQ ID NO: 22443 - DNA, 370 bp, Glycine max
  Intron number 2 from transcript Glyma08g06060.1 (locus Gly ma08g06060) derived from phytozome v7.0 (chr-ID Gm08; pos 4304823 to 4305192)
catctttagcctatcctagtttctgtgtctgtcttgttagtcctaatggattctcatcttgatgcaatctttgatgaagatcacaaggtaattaaaattagttgcctttcgcatgttaacacttaatcacaattttttttgtttgtcaatcgtcatacaccctcactcattaattaaatatcttctatgaagttttatggcacctctgcattaagaactttactttgttgatatgtagctgttttattaatttgaatcttgtcttgctgtaaattaaatttggttcggttgaatcttggtagttaggatgttgaaaggatctagtatacatattttttctcctaatcatattttttattcagaagaaaac

SEQ ID NO: 22444 - DNA, 710 bp, Glycine max
  Intron number 1 from transcript Glyma08g06620.1 (locus Gly ma08g06620) derived from phytozome v7.0 (chr-ID Gm08; pos 4773544 to 4774253)
tggaattcccaagtatttttacaagtatgttaacttttgttgcactgctgtttcctgcttttgtaaactgacagttgctgtaaattagtgtgcggctactagaatctcttagttaagctttttgaaccctactattaatctttatgcttttcttaagaagcagatgtttgtgcaaaaataatatttctggctatatgcttttctggtttggacttctgaaagcaaataagtcgaacagtcgtgtttgatagacataattaaggtaatatgcggtaactcaaagtgaggaggaaaaaaatgtcagatttaatttcaatcaaggttttaaattgtggggaaatgcggtcaatgcggccgcaactaagatcatgaagacaccaaaaacctttgcgttgttgttgaaatagtagttgctgaccattttttcttaaaaccttggcttcaattaagagaaacaaagagcataataaaattgtctatatattataaatagtgagaatgtaatgatgcaaattctctggcacattttttagttttaggtttttggactgaatatattggatcttgtatatatttattagtagcttagtggctgaagctgggaaactgccaatagtgctgtttatttgctcatgttttaaatctttttctgtgatcttgtgacaccttttccagagatatacaaaaggctacttctaatttcacaacca

SEQ ID NO: 22445 - DNA, 685 bp, Glycine max
  Intron number 3 from transcript Glyma08g06620.1 (locus Gly ma08g06620) derived from phytozome v7.0 (chr-ID Gm08; pos 4775237 to 4775921)
gcagtcttgattcccatttatgttagaaagggattaaattttttcttgtcattttatactagttggcataatttgtttgtatattgccagatggagtagatgctctcagtgtctaatggcttcattctttcttccttaaaaatatagtttgacctgaaatttttgtctaaattcagggaaacatctgtatttgctttgtcttgtgtcaatgatgtatcagtgaacttatctaattcaataatttgaatatctgagttgttttgacttgtcttttggaaaatagaacatttgattatccccagaccgaacttcatatttactttcttgatagtgcaataccatgcttacatagtatgtgatgtcctgctgttcatgatgcagttctttattttcttttgtctttattttagcttaaaaccaatataggatttttactgaaaaattaaaaccacatatatgaggtgataacattaatctagttatatattaggctgctttttatcaactttgacacacagtcaacttatcattatgcttactgaacaaaagataattctaggaaacacaaattttcatattttcttctagagcttagaagaatttttacttgtaccttcttgttctctatttacttaccattctttgtgtagctgatttgggaaaaaatcacaagccattgagctgg

SEQ ID NO: 22446 - DNA, 717 bp, Glycine max
  Intron number 1 from transcript Glyma07g09420.1 (locus Gly ma07g09420) derived from phytozome v7.0 (chr-ID Gm07; pos 7855433 to 7856149 reverse strand)
tgctccgccgccgcaaccgccgcggggacctaaaggtgagtgagctttagctacaaaaggttctttttgtttttcacctttgatctaatgttagtgaaaaagcctggcatgtttttgctaattttttaatttttaaggttcgagtaaattatatgtaatttcaagatgttttcaatgttcaatcccttagttgattctcttgactcttgctgaatctcgttgcttatgatacacattgacattattatccatgtaaagctagctggttgtattttcatatgttactatttgttttagattttttcttagtagttaagttatgttctaattcttgaagaaatgaatggctcctcactttgtgtctttttatgattttcaatggtgtattcatggtctaatgataattaggctttgtttggataaacttctctataagcacttagagaagaaaacaagaaggcaaaatgaatttttgaaaagtttagatgagtttttataaaaagctgaattgcctgagttgattttaacttgagagaagtttatccaaacatacccttactcgtttcatgttgattttttcacaatcattagatattgttctaattcttgaagaaatgaacggctctttacattgtgtcttttggtgatgttcaaatgtattcaattctagtctaatgataattactcatttcatgctgttttcttcacgattgttag

SEQ ID NO: 22447 - DNA, 744 bp, Glycine max
  Intron number 1 from transcript Glyma07g15120.1 (locus Gly ma07g15120) derived from phytozome v7.0 (chr-ID Gm07; pos 14958449 to 14959192 reverse strand)
gagggtatttatcctaggttttaaactatgatcaccatcgtgtcatgttttttgatataatgggaaatcacaaatatagctgattggacaacaattatggtctcattgcactcacaaacacttacaaaaatctttgacgttgtggccaaaattactgtgtccatttaaaaaaatattatatctttcaatttatcaatctattgttaattatctatttattgttgtttggctttgtaaataagaccacaacatctgaaagatgcttgtgtgtctgtagcccctaataataaacaccataaaagttggggtgattagtgataccttctcacctcaccacaatgttctgacacagaaatttacattcaaaggaagtcaacatctgtacagaaaaagttgcacaatggtatgcctcaaacaaactcattacataaactaaaaaagaaaatgggaagaaagatagggaacattcaagggtaatcaaccccaccagtccaccactctctctctctctctcttcaatgctgcaaccttatttggattttggaaaagcttagctaattaagaagcataatacaccctcttgaataagcattttggtatcttcagctaaaaatggagagcagctgcattctggcttttcttttcctcctcattctccactcaagtacaacaaaagctgccttcagtgttggtggtggagttggtgtaggtgtaggtgtaggtataggtgttggtgttggtgtt

SEQ ID NO: 22448 - DNA, 790 bp, Glycine max
  Intron number 1 from transcript Glyma08g13890.1 (locus Gly ma08g13890) derived from phytozome v7.0 (chr-ID Gm08; pos 10119695 to 10120484 reverse strand)
ccatcatcgatcttcccctcactcaagcttttcaggttaattgtttttattatcatattcaattatttccttagcctaattaaccagtttgaatcacttcatcatccttatcttctttgctaataatcttatatcactgatgcgttgccgcatatttggtggcgattgacttttggtggttattgataattaagtagctccaaccaacttccttggtaattgccatttatgttgcacatattgaattcaatatgtttttgttatttgtccttacaaacaaattaattctcattttatactttcctagtccgatcaacattgagcattataaaatatttactaaaaattaataaattaatttttaaaattttaaataaccatattttataagaaaaaatattataaaataaaacatatgtttattatatagatgcattcataatataaaataattttataatatcatttaatctcatgattgataacttggtatggattttatgataattttacaaaaatcaacaaatttacataataatgtatgattagatggcattgtaattgcataatttttttcataaatttgattaattaaattaatttccctcttgattttctaatttactatttttatattttacggtttcttggtgggtattttttaagggtaacatttcttaagagtacgaaccaccctctcaactaacttacgtatagaatgagtttgttcaagtctgagttgaatttttgtgatgactataggcagtggtgaaaagtcttggggacaacg

SEQ ID NO: 22449 - DNA, 936 bp, Glycine max
  Intron number 1 from transcript Glyma05g30780.1 (locus Gly ma05g30780) derived from phytozome v7.0 (chr-ID Gm05; pos 36048185 to 36049120)
tctctcccgtgtctcctacctccgctgtgttccaggtacacattttcacatccctgacgattttggttttttgattcggagataaaacttctcggtttatgtttatcctgcgtttatcttcgatcctttttattttgtattattttgattttgtagaaaattacattttctatgcgtcattgcactgtacctgtttcgagtattgcttaggcttttgttatgctatttttcattgacgaatgtgctgaatccgagtttgctagtttggttcatgttattattcatttgtgagattctgctgtggaattaatagtttgactttattattattttttctttattgtattttttggtttttcattcagattactctgagattatgagctgacttgaagagaattataggttttagtgctatgacttgcaaagcttaatcattgttcattacctaaaagtatataatttgtacacacataaaacaagtacgaatttagatctagttactttagagcttttagtgcaattctgaaaaaattgaagttttactctggtaacatttgctgatattttttagacaatttagtgggtattaattttaaggatgtactcagacatgagactctgttatttacagagttcagcttctgcactatcactctgttattttttagacaactgacttttattttccatagctgaagttttactctggtaacattgcttagacgattattgaaatgaaactaattttaattggagaacaatactaaataaacttgtccgactaaatgaattattgtgttattgatggtggcatttctgccttgctggtttaacttttggattcaatcattaagtgggtcactcaggttatttttccgttgttgattgttttgttcaggtgatagtgggtggtgctgtattcgttggaggtgg

SEQ ID NO: 22450 - DNA, 1062 bp, Glycine max
  Intron number 1 from transcript Glyma05g34530.1 (locus Gly ma05g34530) derived from phytozome v7.0 (chr-ID Gm05; pos 38835133 to 38836194)
ggatatcgtgctgacgaggccctcggtcgcaattggtaaggattttcttccttttctctctcgtttccttttctccaaattctgacccttttaaatctggggtttcgctcttttgtgcatttcactctaatttttactttattgggttgaaaccctttttcgggtctttcaaatgattctgttctttcagatctatgcttcagttgaagttttggatgttttccattgtgtcatctagttaagatgcggggttctattgtatcaaaattcattattctgacggcttttgcaagctacatttttactgaattatgaatttggttgccagataagtaatgttttatccctcagttgggtatttttcgacaattttgcattttctatggttagctcttctattaaacttcatgtttctccatttctatgattttccaagctgaagtattttttttcactcttttttaattcaatccttttggaacccttgtttttacttttttacaatatggttgcatggtgaaagttgtgatcagctgagcacttctaattttccttgttagtgtcataattaattttcagcgaaatttacgaagtatccaatccaaaactaaatataataaatattcaaatattgtaaaatatagattttcctctgtgtaaccacacacaaaaaaatagtagaaatgtgaatgatttactgtttgaggaatacctttttaagtttgatttttaaaaaaatgggtacttggaattttatgatacaatttttatcatctgtttgggcctgttcttcaactgcctctgaaaaggatttttgataggaggatattgattaaatatgtgactttcctattgtcaataatatagggaagctagctagttaagagtttattttcttttaaatccttcttccaattccttccttattcatgtaataaccgcagattgatttcctttatactgatttgggtcatttttagaaggaaaaaaagtcccaataattgctttgaaatttctcttgtttcagtcggttcttacagtatagagatcctcgagctcaga

SEQ ID NO: 22451 - DNA, 482 bp, Glycine max
  Intron number 1 from transcript Glyma06g20160.1 (locus Gly ma06g20160) derived from phytozome v7.0 (chr-ID Gm06; pos 16539760 to 16540241 reverse strand)
caggtacctctcttcactcctttaatggcctttcaaatttagttaatttacgtcacctatggctttgttatttagggatgcatcgcctgtttcatgttctgggttttctaaatgacaggtattttatttttttttttaaaaaaaaaacctttgaataggcctcttgttgttcatggttagtgtctttctgggtgaaatcgaattgccgctacattttctttttcggggaatttgtctgtttcaataagggtagctgattttgtattaggcttttgtttatgattataattataattataattataatgtgctcatgcttatagtgactgcattttaattttgtagtggctgttatgttgtttgtttgcttccattgctgaaagttcacagaaaaatcggcttctttctgctgatgcttactgctttggtttttgtgttaagagtttcctggccgtgacatgttgagtttttattcacagaat

SEQ ID NO: 22452 - DNA, 783 bp, Glycine max
  Intron number 3 from transcript Glyma06g08850.1 (locus Gly ma06g08850) derived from phytozome v7.0 (chr-ID Gm06; pos 6461655 to 6462437)
attctaaacctccaaacaaggaggttcctcctcaggtttattttcaatctcactgttaacatgctaatagaatgtttttctagacacatgactattccgtgttaaattttcttcctaaggtgttccaccgatgagttcactgtttctattttatgtttgttgagctttgtgttggagattgatcccacattgactattgatatggttaaataattgggaggcaaccttcacctcatgaattagcttttgggggtgctgagctagacgtaaactcaaattctaagatgctatcagagtccatcctagtatcctagtggttgttgttgggcctatctgatcatatgttattagacaacccgtttatgtccaatcctctaaaattcatgttagagatgcgtccagttcttcgtggggtatgttgaaaatcccattgactagcactataaccataacagtgtatgtaagttaaggtctgaaagacaactctctcctcatgagcaacttttgaggttgattaggcctaaactcaaattctaagactttaggtgattgtttttcaatggcattaattttgtttctttcttggaccttggtttttcttagttggtagtccttgactgtcttgcaaattgcgatggttatttttctttcttaaatttccaactattttaaactaccttagcaaatggtgtatgttctgtcatatttggcttccagcaacaagtcttgttctctatttccacttattatgctttgtattcggtcattttgcttaggaattta

SEQ ID NO: 22453 - DNA, 589 bp, Glycine max
  Intron number 1 from transcript Glyma05g09120.1 (locus Gly ma05g09120) derived from phytozome v7.0 (chr-ID Gm05; pos 8930078 to 8930666 reverse strand)
aaggaaagtaagtcaaacctgttttggattttatttttgaaatcaatttttggtttttgaatcctcttatcctaaataatttttcattcgtttttttcctgtaagatttagtgcaaagtttgtttcgatttcttaatcagcactattgtgcttctcctttccatgagttaggctaggttgaccaaattcgttttgattataattgattttgaagtgaggtgatttgtttttagactttttttttcttttctaaaagcaagttagttgttaaactcagaataaatctattgatccaaaatacaaaagctacttaaagttgctttaattccaaatcagttatggactaaaaattaatttctcaactatcaaacatgagaacatttacctaaaatcatgttagctggaaatctgaaatttcaatgtagttctggatgatccaatatgaatccaaacacatccatttcacagttacagtttacaaataagattatttgttccggtaaatacacattctgtttccattagataagattatttgctgacttgttgagtttctattgttgatttccttgcagatataaaaatcaaa

SEQ ID NO: 22454 - DNA, 536 bp, Glycine max
  Intron number 1 from transcript Glyma05g38000.1 (locus Gly ma05g38000) derived from phytozome v7.0 (chr-ID Gm05; pos 41467645 to 41468180)
gccttcttgcggtacattgctttgtttttgcattcttgttaaggagcatttaataatgattttaattacttaatgtgttattaaaacattagaactagtgcatgtgcaaaattatgctatgcacggaaccttatcatacgaatctgttgtacgaattgaacaaatgaaaatcgtaatatttaatgtatgtttgatttgcattaaattaattatttcttacaatattttatttaactttttgttcaataatacaaaaaaagtgacctcattatcaattcgtgcaaaaagtcttcaaatctttgtactgaatagcagttaatacaaataattttactatttgtagcatcaaatgctttatttgtatttttaatataatgtttttttaataaagactttgtatatgcatccttgagaaatattcttaagaaactcaaataaagcatggtgtctgaaatctgaagccttatttctatattttgtgatgttaaattttcattacagataagcaattactcatccaccgaaggagttttgta

SEQ ID NO: 22455 - DNA, 741 bp, Glycine max
  Intron number 2 from transcript Glyma06g47400.1 (locus Gly ma06g47400) derived from phytozome v7.0 (chr-ID Gm06; pos 49868037 to 49868777)
tcatttacaaggttagcgcttttctgttttgctggtttctgaaatgcgtcactgtgactgtgtgacttttattctggttatttattgacaatgaatgttactaaagtatatgtttgtttagaatcattttattatcaagtctattgtgcctaatttatggatgggagctactgcattgattgagcatctcttttctcacctcccattcttttcttttattgaagatataattttttgttgatgtgtcggtttatcgtttgctcctaagatttgtttttaagcaatattcgattagttaattcacttgatcattgcaagtgtttctcagatatctggattgttgaatctgtgaataaacaaatcatactgtgacatttctaaccataagtggcatagtaggtcggaatgttttttcttttgctggccagtttgatgtgctaggatgctatggaaaacatctttatcaatatcatcatcatcaaattatccgcttcatttttttttttttacttttgatcattgcttaatggtcaagtgtaatgacattaagaaattatcaatatagtttgttttgaattttacttaaaggaaaacatttctaagcagccagttaatatgtaattatgtattagctttgcaaagtttaaatgtaacttaggaactgtgggatgcttattagtcataaattgacactacttaattgttatttatatgtaatatttaatggtggatgaacagggg

SEQ ID NO: 22456 - DNA, 703 bp, Glycine max
  Intron number 1 from transcript Glyma06g20570.2 (locus Gly ma06g20570) derived from phytozome v7.0 (chr-ID Gm06; pos 16987402 to 16988104 reverse strand)
ttcttgctgggtatgttttgctttttcctacttttctaacaaagcactttcctttcttccaaaaaaataaaataaaatgaaaaagcacttttcttttgttgctcttacataccataccctctgtgaaacacactactctttatctttgaaattatttctaaaatgaattttgattatgtgccacagggcttcacaaccgaacccatgactaaatttaccatatttttcaagttcagtgtgttttttctttgtgtattaactactgatgatacctttggctattggatttctctttcaggcctgtgcttagtcttgcctatcctctgtaagtgcacacagtacatgctaacaacttgtgctttttaaaggattaactgtgcttttagttctgaaaattttctgaagttttggttttagttcctgatgtttagaaccaatagttttgtccatgtatttcttaaaattattcaaattttagtctatagaattaacatttttcctctgtacagataccaaagtttgagtatttcaaaaaatatagggactaaaactaaaatttggaaaattgctagggactaaaaacaccgaaaaccttttttttttaatttgtttgtttttattttgctggctcgttatgttttaagctattgtttgagaatagattgattcatggtttatgatttctttgaacaatgcctcagat

SEQ ID NO: 22457 - DNA, 567 bp, Glycine max
  Intron number 1 from transcript Glyma06g07000.2 (locus Gly ma06g07000) derived from phytozome v7.0 (chr-ID Gm06; pos 5061087 to 5061653 reverse strand)
ggtaatcactctgttcaacctgttcgtacgaatttaccagagttatttgtgctaatcgaaatttacctagtttgaggttttttcctggttatattttttcttctgtcatctccaacattttttttccttgcacagcatgatcttttctttttttctttaaaaaaaaattcctttgggtactgggtcctgagacaaacacctcattttacttgacaacaaatcttgtcatttttaggatgtgaaatttaatgtggcaagagcttaaaaatttacatctgaattaaaatgtggatgagttcaaagcttgttggttgcttatgtctcatggtgtttaatcaagtcaaatttagccaggttttaggaaagtcgatggtttggttaccaggagattgaaatggcaaaatttatttgtttattattcttgatgcatactgtttgttgcatatctattctctgactgcacatgggtttgctatagcagtatagcctatgaatttgattgtatattgatattggtaagtccttgtggcaggtgtgggaacaaaagattatattcttcctggaaaa

SEQ ID NO: 22458 - DNA, 517 bp, Glycine max
  Intron number 1 from transcript Glyma08g13950.1 (locus Gly ma08g13950) derived from phytozome v7.0 (chr-ID Gm08; pos 10153565 to 10154081 reverse strand)
acttcgctgacaagcgcgaattctttggtacttccttatgaaaactattcttaccctttcatttccagtaaattttccttaaaaatgtgaacttggttatgtagaggagtttatgtcaactgggcagaggagggtctttctctctttcatttccgttcagtttcttttgttggaaaattttgaaagtaaaagggtttcttttccgaatttaactagaatacattacactaagtgaacaaatttataaggatttctaataataaattgtataatgtaatattgttaaaattgaagagttcaatttctatatatatttagttcgccaactattaaaaattatggttagtacgaactttaagataattattattgtaaaaaatgtacaaccttatcatataaatattgtttgtgattaattcacaatgtaaaaattattttctgtgaaaaactttacggtaatagtatcttaaaattaaagttttttttcttctttttgatcgttcttcaggcattccca

SEQ ID NO: 22459 - DNA, 1032 bp, Glycine max
  Intron number 1 from transcript Glyma07g39530.1 (locus Gly ma07g39530) derived from phytozome v7.0 (chr-ID Gm07; pos 43994164 to 43995195)
cacactgttgcccctcctcaagtgcccaaagaaaggtgcgatttttcgtatgtccttttattttgctcttcaagttcttaactgggtgggtgagtcttcgtggcgtttgtcgttgtcccgttaattaattgagatcttagctccgatgttttttgtttgtttcgatttagtttagggttagagttgtccgctttcgctttcgtccaaagtaccgttacaatcttgggttgatcttctattgtgtgtagttcgagtacggttccatttctggaaactctcaaggcttggttggttgttgttgttattatcatttttattattattggaaaccgtagttttttttttctattttctcgttgaaatttcatagctttaacttctttttttttgtaaaaatagttgtaaatttgttcatgtcatttttcgtttgatgattttattacactataataataataataattttatttattggaagagaatacccccggttcccaaatatctttctttaaaactattgtcctcttgtagtcttcttgtttgctagccttctcctgcccctatttgtgtatttattcccattccattgaccaggacgtgcggcaatattgtttgcttaatgttatttgtcgtttttcaaaatttaaaatgcattgttttaatatactgttcaaaaacagcttatatttatacatttttcatatgtacatgaacataattagcgttttgctagcccatgttatattgtgactttcttcactcttgagatgtaatgcacacaatagattctatgcttctagcatatttctacagtattggatattaaattaatttgaaggcagaggttcaatatctgtgccagatgtcatcttctgattagctttgaatatgcatgattttttctccaatctgtctctattctaattctaataagagtgacgttatggaattaacgtatgagatggtgtgttggtattttttatgaatgatttaccagtgttcaaactggagccaaaagaagaggtggcgctg

SEQ ID NO: 22460 - DNA, 786 bp, Glycine max
  Intron number 2 from transcript Glyma07g08000.1 (locus Gly ma07g08000) derived from phytozome v7.0 (chr-ID Gm07; pos 6647803 to 6648588)
gatattgtgttccctgattggtccttttgggggtatgtgctaaatcaacttcccttcttctatttaaaaattaatcttgtttaaatatgttattagtcttagtgaatgagacaatttaaatgtgttattgtttagtaatcacatgacatcacatcacttattaatttagaatggttgcttatataatatgtttaagtgtatgttatgttcttgttaaatatataattaggcgtatatgtttttctaaaaaataatttttatatatgggaaagtttgatttcaagacttgaagtgagaagttcttaattattttttatcttgtacataacaaaatagaaattgaagtaaaggacatgaataaataaaaatgtttaattttctgagcaaaacaaatgtaatgcataaacgtgaatgagaatttgttttaattaaaacagtgtaaacaaaaaaaaaaagtttaccagttcacttcttcatttaacttctttaattgtgtataaagataataattacagacaatacacttttatctttttggatgagatcaatgaacacacacatacacatattcagtgtaaaaatgttttttttttttaattttacattattatcactcaacttttgacctttgtttgtttggttcctcatttttagcatactcaagtacatcatcttagatgttcaaattgatagtacacctaaccctgatggctagctcaatatcttttcccatcttgtaatctggattttctttatttataatagggctgagataaatataaagcc

SEQ ID NO: 22461 - DNA, 231 bp, Glycine max
  Intron number 1 from transcript Glyma06g41140.1 (locus Gly ma06g41140) derived from phytozome v7.0 (chr-ID Gm06; pos 44429756 to 44429986 reverse strand)
ctgtcaggaatgaagattggatgagacctcaaaagaaatcttagtattcaccttacagcttggaagaatgctgattatccatttttgttttttttttttttcttgaagcagtagttctaggtcgtctcacttttttcaaaatgtttttcattattaagaaaaggtaacgaagatcaaattcgagcttgttttatagtccaggagacttcacttggggtattattctgcacc

SEQ ID NO: 22462 - DNA, 846 bp, Glycine max
  Intron number 1 from transcript Glyma07g14540.1 (locus Gly ma07g14540) derived from phytozome v7.0 (chr-ID Gm07; pos 14043125 to 14043970)
aagaaaaagaagagtcaccgctacgacgccgttcggtatgctctttctttctcttcagtttttccctcgttcgtttctagggttcagatctgttcccgcccttgtttcaatcgcgttagggttctcgattgccgactttcttagatccgaatttcgatcttcgatttttaatgttttttggtggactttattttctctgctgttacggccttagttttcgatcattttttttttctattttttttgtttgaatttttttatgatctttttgttttgttgttgttgtttagctggattttgggtttttgtaattgtgtatgtaaatttagattaaaaaatattaattttgaaaaggaaagttgcgttctttgtttacggcgaaggaagcatatataacattgcagatgatgttaatttaagaaggatatttagattccacctgtggtggcgagatgctgcgattttggttttgaatttaatgattatgattatgattctaacatggaaaggttttgttgtgtgaaaatagttgatgtaaaattgtgaactttgtagtgtgtattgcatgatttaaccatacatggcggtgcctatgtagttttgttgtttactatgggttttatggtcgtgtggtgatcatgctttcagtgtattagtgttgttctttgaggtggtggggatatgtttactgattgagacgggttctaatgtaaatgctaaattatacaaagctaatgaattgaaatttctgccacgcacttaggtggtaatgattttctctcttttaaaattaataattccttccttttttttgtgtgcgtagtgcttttttgaggtgccacagtc

SEQ ID NO: 22463 - DNA, 693 bp, Glycine max
  Intron number 3 from transcript Glyma07g39420.1 (locus Gly ma07g39420) derived from phytozome v7.0 (chr-ID Gm07; pos 43908709 to 43909401)
actccattgtcatcaaccttggagaccaacttgaggtatattatttttatatatatacccatcccctgttttcttaatcttactcatcatttttcaccttaccaaaatcttacatcttggctaaaatttcatgcaataaataatatatacattgatattgtctttttttttaatattttcattcaatgacacgtaattgctaaaatttattgacttttatgctctttatttctaattataagatcgttttaagttatttataatctttaaggaaaatagttaattttattaatcatactaaatctatcgattatttatactatcatttcaaatttattatttttttatctttctattcatttaattgttttttattaatatatagagatacaataattaagattatgtaggaaaaataataatttatgtatctagaaattaaaaaataatcttataaaaagagaaaaacgaatattagaaaagaattttataattaggtaaaaaggaagggagtaataattatactaaaaattatattaaaaatattttctgattgataatacacaaacttttaaaatacatattcaaagaaaaggtgacagtaaatagcataagttggggggaaagaatgtatgtaacattaactttgttgattaacagcttgttgtttttggtcaaaacaggtcatcacca

SEQ ID NO: 22464 - DNA, 799 bp, Glycine max
  Intron number 1 from transcript Glyma06g03790.5 (locus Gly ma06g03790) derived from phytozome v7.0 (chr-ID Gm06; pos 2671506 to 2672304 reverse strand)
acgttacaacacgaaccccaaattccggcgtaagtatcaaaccctaagtcgtcaatttgattatcaaataagaattgtcagacatgatcttttaagtctatgattattctcgtcagattgcatttcttcttgttcaattacttatttaattgcgcctcttcttgttgggaattctcatttgtttgattactccttcgattctcctgctcaagctgcttcaatggttgctgacaaaaaaaaaaaagctgctccaatggttctccctcgtccttgcttcttagttcttagttcttatagaatatggtaattgacatttttatccatggcaacattttacgatccatgataatctgattcttatttgataatatgtttgttctccactctgcgccttagctgagttaagatgacatgttctgttctaaagttgcatttttcagttgtaaatgatcatgagcgtaatattgttgagataaaggacttctctgtgtgtgttttatataaaaaaaaaaaaatggggcgagggggcgcagtggcagggatttgtaagggggatggttaatctgatttggccagatcaagcatcttgtatgtgtacttattttgtatttctgtttctgccctttggctagttttctacacttgcttatgtaaaatcttgtcttctatgtagtgttttgttataacaatgactctttattttccatatttgtagttgtgtgcctgtaaatataaatacatgatgatgaaactaatcatgtctacaaacattgattttttcctggattctgtagtgaag

SEQ ID NO: 22465 - DNA, 976 bp, Glycine max
  Intron number 1 from transcript Glyma07g01410.2 (locus Gly ma07g01410) derived from phytozome v7.0 (chr-ID Gm07; pos 901628 to 902603 reverse strand)
tgcaaggtaatatacatacacacacacacacatatatatatatatatatatatatatatatatatatatataaatacatatacatatatatacatgtatgtatatgtatacctttttatttcttaatttgttaaaagatatttttttcaaaataatttgaacctgtctttgatttgccaaatcatggtgaatattgaaaaatatacaagagttaattctgaattgaaacactcttgttggtttaaaaattcaaaaatcgatttgtataaacagttggcaacaatacacgtttttagatattgttttcaagttgatcttaactgactctagcttctgggaaagtattatttgctatttttaattataaagatggctgctaacgtgactcatcatgtccatgagtcatgaattgatcctttaacaatggagtgctgtctcctaattttttcgccattaaaaaattctgctcaaaccaaccagccactctatcgtgggtttctctgagttgtggccgctgaatttgattatggcaaagaacaattttgacctagaatcatcaaatagtttcaaataaataaaaaaatcatctaccaaatgattgttggattcaggcttcttagtatgtgtttgaatgaaaaattatgtgatttatgtttggatactttattataaaatcaagttaaaaataaaattcaatataaaattttggattaaatgtaaaaactattcaaagttattttaatttagaatcaattctgaattcttcttgataaataaaacatattaaaatatattcaaaattaattatgtaattataatcaattctgaaaagtcaaaccaaacatgcatttactcatatcaattttgaagtttctatcatttggaatcttgtgaccaattattatggttctaaaatcttattaaatttttaaccatttcagggtttaatcatagatagaatccaagattcaatttt

SEQ ID NO: 22466 - DNA, 960 bp, Glycine max
  Intron number 1 from transcript Glyma08g37510.1 (locus Gly ma08g37510) derived from phytozome v7.0 (chr-ID Gm08; pos 36165289 to 36166248)
gggcatttccacttatcccctcccctagtacccgggtatgcttcgtaatataatagagcatttacaattcatagttgcatacatgcattgttcatcttaattttatgggcttataatttttcagatttaaacactttatacaaaaatttactttaatgttacgatatttgtgtgagtgattaattttattttacggatcctataatacttaaaaaatatattatttatggtataaatgttataaaaaacaattatttatacaaataattcatgttatctatttcaataacagagaaaaaaaaaagtaaatcaattttccttaaagttaatcaacttatgttggagatgctttttttttttttatataccgtcaacacatgttcgagatgctcttaccatatttaaaggttaatataaatattgttttatttaattttgactttttttttaaaaaaaaaaagttactctacaatgcatattaatctttgaatatggtaatttcaaaactaatttattaaaatttaaacttgtacttaatgatcttctgcacatttagctaatttctaaaaggtttgataaactaatattcacttttagtttttctaattttttgttttgtttatgattttggtaaaattctgaatttactttagaacgaagcataacagggttttggtgttttgaatttttcaagcatcacaagcattgcattgttcttttcaagtttgaatccccaatttttcagcagggctagtccaataaaatcataaagaaattaagatatgtgatccaaattatggtcgtgttaagatcacaaataattaaaaaaaaatcttgatgttatagttcaaaacggtcacaaaccgttttttaaaaccttggtcacattgtatatttgtattctaatttgagtaccaaaacgtaggcacgagattgcaggtgaagtaacagaggtaggaa

SEQ ID NO: 22467 - DNA, 566 bp, Glycine max
  Intron number 2 from transcript Glyma06g47560.1 (locus Gly ma06g47560) derived from phytozome v7.0 (chr-ID Gm06; pos 49968955 to 49969520 reverse strand)
gcccagtgtttaaaagccttcaagtttgtaatccaaaaacagctctgaattatgatccatagctatatatatgtttattctgacaaagaaaaaagccatatataaatacttatgcattaattaatcaataccattttagagtcattctaggcaagtaatataagtttctcattctcatcaatcacaaaagataaaaaataaaagaaattgaagaggtcaaatgtattaaacttctcctatataacataaaattaatttgtgcatcgatctgaactcacgaattagaagttaaaggaaacttaggaaaaattgaggtgtgttaagttaattttaatttaaagggggagtttgattcgtcatattagttttacttccttggttggatttttttagttttaagtacacagtagtttggtcaaataaagaagaacaagagtcaatttggattaattctcaacaaatttatttatcatgtttgtttaattttttttctccaaatttctttattatgtttgtttatatttgttgtaggtttggaggcttatcacaaatttcttctttcttgg

SEQ ID NO: 22468 - DNA, 601 bp, Glycine max
  Intron number 3 from transcript Glyma08g11970.1 (locus Gly ma08g11970) derived from phytozome v7.0 (chr-ID Gm08; pos 8678340 to 8678940)
ctgatcgcctccacgttgaggtaatcactttttggatattagaaaatttaacaaacatgattccttgcctctatatatgtctcactagtgaccacaagcataaggatatgtaggttttatttggatacacttaagtaagttataggaggaaaaaaaaaagaatgaattagcatgggtggataaacttttcaataagcacttttagagaagaaaataagaaggtaaagtgaattaaaaaaatgctcatgcataaattaaaataagcttttaaagaagcaaaatgggagagcttctgtaaattagcttatgcataagaggatttttttaactcatgcaaacagggtcttaaactttttccatgagttaaagtaagcttatgtacttcaacttttatagaagctctcccatctaaattcttcagaagttgagatgctttaagcttattttaacttgtggaagaagtttgattcgttttgctttttattttcttctaaagttgatttaaagggtcttatttagtttgtactttaaagtactgatactgtgtccaaaggtgatgatttctgtttaaattttttccaggttgctgcagttcctgagg

SEQ ID NO: 22469 - DNA, 1039 bp, Glycine max
  Intron number 2 from transcript Glyma08g14290.1 (locus Gly ma08g14290) derived from phytozome v7.0 (chr-ID Gm08; pos 10389878 to 10390916 reverse strand)
agtatcacgggcaaggttgcatcatccagccacaagtgagttctatgtttgaatatttgttttgtagaatggtagtagaaaaggtgtgccattaataacaatttatgagtcagttattgcatataaaaacaataggtctgtggtttgcagccccaaaaatcgtttttatgattcatgttgatgcactacattgcaccatgggaaggaatatattactttttaacattgttttctctaccatatcgatcaacagtgatatgtaatcataagttgggtgtaatttgtgattttgttactttaattgtcatttacagttattttgttgtttggatatgttctgaatttctcagaaactggggaatgctttcagtcctatctgtctttgagtattgctagatttagagggagaggaagaaagagaaagtgagagaaaataatctagagagaatttagagaagggtaatgctttcttgttctacttgagtacatagtgtatgcaagacatccatatatataggcttttaatagacttggtggagattttttcctaggttaatactaatcatagttatcaatctcaaatagccgcatgtagtggctagcattgaaaatgggggatgactgttattttaaatattataatacaaactaaatagtttatactacacatataaatactcaaaaacaaaattaaaacccaaaattaaagaaatgcatgataaatacataatcaccaattcaccatcaatctaggagcaaaacatagtaatgaagtcaaaaaatgaaagatgatggtgaaattaataggaaaaagataataagttagatagaaactaatagaatgtgaaacggaaagtttaaaggtagaagaaagaatggaacacaagaaaaaatagtaccattatttccaacaaatattaatattctttagcatcctacactgcagttatactaaaaattttcagcccagttcattgtgctggattttgtaatttctttaagtcaccttccttgcagttctactggcagggtaagtttt

SEQ ID NO: 22470 - DNA, 679 bp, Glycine max
  Intron number 2 from transcript Glyma06g06310.1 (locus Gly ma06g06310) derived from phytozome v7.0 (chr-ID Gm06; pos 4522443 to 4523121 reverse strand)
tggtgaagtcgttggccttttcggagtttttggtatatttttatcttcctctcttcttcatctcctggttgtacactgattggaaaatatgccaaaatattgtacgtagaactcatgctatgtgttcttctgttaatatatagatgcttgtgtacctgtgcacttatattatacaatacattgctagtttgtgcatttttgttctgcattttcagtcttaccagcttttgttcttctgttttctcaaatataaataaatacatgaagaggaacttttagatttgtttacagttgaggtttcatctcacctttgactccatgttaatctgattgtttggactgtttgattagtctgtttggctgtagtgttattttctgcacaccatgaaggaaatctctttgaaggtttatgatatacaatccttcgggtgtaatttccagattcttcaacctcctcttgaacccaaatttctctttgtagtattctcgtttgtgattttagaaccttcatatattcctctatgtgaacaattataagcaaagagtaattttttgtttgccatcagatatttttccccataaaaaattattcttaataggaattatttcctattggttaaacctatgcttgataaatagaagtaattgcaagtttcttatttataactctttccaggtc

SEQ ID NO: 22471 - DNA, 1044 bp, Glycine max
  Intron number 1 from transcript Glyma08g12090.1 (locus Gly ma08g12090) derived from phytozome v7.0 (chr-ID Gm08; pos 8734946 to 8735989 reverse strand)
ctattcgtcgcaatctccactgcaccactttccaggttaaccctaattcttgtactcttcctctttcaattattaattctttttcctcattgcattcttgttcaatatccaattcatttgtgatgccgcctaaacaaattagattattcgcttggcttgattgttgtgttctttgattttttttttaaaaaactgtctgattagtgattaattcaattgctacaccgcatgcaatcatgaaacattttttcaaggcgtattttcttttggatttacttttgttagattctttttcttcgtaaggcacactgcattgttacgggcaagatctttaagccgttactttattcttggaggtgttagattgttagggcctgattcttaaaacacggcactttttgttttttatgcccaattctttatagtaaaaacctaaaactactcggaagtggaaggaatagacgcacccagtgattgccaagggcactagaatttaaaaaatgttgtttcgttgaaagttaccttatgttgaaagagtaaattgtttagagaacatgcatgtcgggataaagagctatcaatgcctcccacttatgcagcaaatcatttgtattaatcctgttgagtattgttgcccccaaacaaaggacttgaccttagagagagttatcaatttctatctgtatttttgaagagggaacttttgggggttaagagactattgtctgaagttaaaaaaataattttacgggtaagcagaatccaaagttcaaattttcctactagagttggctaggttgatgaaattttcaaaacctcaatacttatgaatagatataagaatcaattactcttttcttgtatacaaattgtgtcaggataaagaggtaaagaattctaatgatatcaagagtggatcttatcaatataaaagacctgttacactttaattatttaattactatttcattacgtaatctgtttattgttttggttgtttgaaataaggaagattttgtttttagcagcatcttgaatttcaaa

SEQ ID NO: 22472 - DNA, 561 bp, Glycine max
  Intron number 2 from transcript Glyma05g29150.1 (locus Gly ma05g29150) derived from phytozome v7.0 (chr-ID Gm05; pos 34820572 to 34821132 reverse strand)
cttcttttcctgcacccttttctcccatttgcgtaattcaattccctttttacccctttttgttttttgttttaacattgatgtgaccaagaaaatttgcttgctgatggggttattccttgtttcttctttgttatggttttgatttgctgtcaactttatcatttttcatttttttttattgttggaataaaaacatttgtttttttttctctggatgtaatgtaatttcttacagccccagcccacattgtttggaatcattgagaggacgaattgagctgggtatgcttttgttgagcaaaaggttgtaaggaagagattgatacacaaaatgagggaccctgaaaccaagagcttcaattgtttttgctttccattgtaatgtataagtttttcatagttagtgaattttctgctgcttcatccaaataggtggaagggtttctatgtacagaaaaaaccttccaattttgtaaatttgatatgacatatcatatagcttcctgactttaaagagatatagatattgtcgctaccaaagtggcattgccttctcat

SEQ ID NO: 22473 - DNA, 653 bp, Glycine max
  Intron number 1 from transcript Glyma08g05540.1 (locus Gly ma08g05540) derived from phytozome v7.0 (chr-ID Gm08; pos 3963289 to 3963941 reverse strand)
gagttgtgtacaaagctattgatacccatgtaatgtcccgaaactttcttctaatagttatgcgaattcgagactgaaaaatcgattttttttttttcatattctcttttctgggtcgtgtgaattggatctttactttcagttgatgcaaagaacaattctgaatcagagtaaaatacatcttcatgcagggccttagagagtaatgtagaaaaggaagatgcatttatttgctttgggttcctgagtttgatttaggggtttgtttaaaaaatttgcttagggggcttattactttatcatctttgcattaaataattatttaggaggaatcatatactttgtgtcattgggtatgacttatgaggaagtggtacttcttaccttttgtttagtgatcttgagaatataatgggaggaaagcttgaagctgcttaattagtttcagtataagttttgtaaagttatgacttgttcttcgtataacttgcagcacatgcaggagatagatatgcttgtttacatgtcttgatgaactagctttttgttcaataatgaaaatggcaatactattataatatcgtattcttataaagatgaattcatttggattgacagacagggcagacggttgcaattaagaaaattcggct

SEQ ID NO: 22474 - DNA, 689 bp, Glycine max
  Intron number 2 from transcript Glyma07g38550.1 (locus Gly ma07g38550) derived from phytozome v7.0 (chr-ID Gm07; pos 43270319 to 43271007 reverse strand)
aagcaccaaatttaaggtacgggctgattctcaaatcttgtgtctatttttttgtttatattttactagtcttctaagttagtacaaatagtagtttgcctctcatcatatttgattctaactcctctttattttgggatgatgccttttaatgataagatcaatgattcattgtgtatttcttgggagcaaatacgtgtttccttggatgcaattactcatatagattaattaaaatttacagagattttgaaaaatatattctacattttgttctaaataaacccacttgtcctttttaaaccactagctcacaacctttgggttgtattgaatattgatagattttttttattttggtagagaaataatcaaagaacatctatttcaacatgtaactataaattagagagttatgattgattcatgaaaacaatgctatcctcaaaagtgatgtgcctgctcatttgttttattgtgctgtctacctttttagtttttttttttttttttttagattttgataaattatgccgccaatagaatttggatgtttcattctgctctctttgccaattctctctttctccatttctgtgatgccaaatgtagtatacccctgggaagtaatactgtttcttctctgatgttaaggaacattgcagacaaggttgcagctgctgggtatt

SEQ ID NO: 22475 - DNA, 297 bp, Glycine max
  Intron number 1 from transcript Glyma07g38550.1 (locus Gly ma07g38550) derived from phytozome v7.0 (chr-ID Gm07; pos 43271011 to 43271307 reverse strand)
ttccattgccattcttctcgtctccgacgtttttggtacgctatcatcacaatccctgcttttctttctccatgctcttattcttgtcgtttttctaattaaggtcctgtttgatttatagaagaaataaataaacctggttaaagttcttatattatatgtaaactctgctttatctattgagtttattatattgacggtatgtatttgcgtcattttttatttttttttacttttatagtctttaacattagtattgtttttttaacttagcatgctcaatgtgttttgcaggat

SEQ ID NO: 22476 - DNA, 979 bp, Glycine max
  Intron number 1 from transcript Glyma08g22790.1 (locus Gly ma08g22790) derived from phytozome v7.0 (chr-ID Gm08; pos 17285096 to 17286074)
gacgacttggtgtgtattcctttcatgtttttttttttttttacttttacttattattatgtcaatttcaattcagttacgtgtttgaaactgggtagttgaaggtttaggattagaaatcttagattgctgtcattaattaacgtgttttctttatttctagctgcaaaatatttaatgaatgaatgtaattttttaaaattttgattttcgtctagagaaggaaatttcacttttgatctgtgttcatgctcgagaattcactcaccaaagattcctaaagcttagtatgaactcaagagctatgcattgcgtgacttggtgtcgcctgggctggtcatgcttgtttaacaatcatattaatcaattaatcatattattcaatattcgattgattggttactcgagctggtcatacctattaaggagcaaattaatcgatattggattgattggttttgaggttattgacaaaaaaaataaaattgtctaagtcactttgtttctttttgtccaagtttcttctcattttgtctaacttacttcctttttttcctttctttgtgagtttcgggagtatccccaattgtatgtcttctaatggttccctcttaacggtttccccttttatggagagtggtgtgaatggtgccttaggcacgtgcgaggggcaggtggggtcaatggtgccttaaacgcatgcggggaaggatttataaatattatattgggcctgaaggcccaaagcccaatgcccactgactatttgaggtcctagggcatctcaactgttagtgtgatagggtgagcagtcaaagtaaatggttggttttacggcgctcggccatacggtccaatttgtgatgttttagattggtgttctttgaaaggtgcatgattgatatagatgactctctttcttgatatatcttatcgtttgctattttgcctttcaggttcttgagagagctctccaaga

SEQ ID NO: 22477 - DNA, 890 bp, Glycine max
  Intron number 1 from transcript Glyma06g15520.1 (locus Gly ma06g15520) derived from phytozome v7.0 (chr-ID Gm06; pos 12231937 to 12232826 reverse strand)
gtgagtgctaagccatcttcttcttctcacacaaggtattcatcttaatctctcacatcataactttgatgcaaagtacgtttccttttgctctttgattcagcgctttttgcaatctcgaatgtttattcttagatttgttccatagtagtactcttttttatgtttttctttttaaatctgtgtgagataagattgttacctacctcatcaaaatcatatctggatgttttgtatctgattatttatattcgtactacctgatctatactgaatgaaatgtagtagattgtggcgatctgtagttttagtggtggaaatgacatatcacagttccgatcttctatagcagagatcttcgaactttttgaactgtacctttacttattctgaaatgtggatagccatcgattacataatctggtgttggatggatttatggtctgatctgttttttttatcacttttttggctttatttttttcctcattgatctttcttagtagaagatcatttggtttgggaacttaagatatgctgtgtcagaggacttctgagattttagctggtgtcctaatggacgttttctattcatctattaattttggcagtttcatttaaaaaatgcacaggatcggctcctttatctgtttatgtacatttgttactgttttatttctaagtagattgtataatactgaattattttttttccttgttttctttcctattgattttgtgtgttatatatactatgatgctgtcttgtgtagaaaaagagagtttgaagtaaaccctcaaagtctgtaaatggctgggttctgtagattgtctattcaaacttggtggtactgacaatttattgtatgcgtactgtagtttggtaaaaa

SEQ ID NO: 22478 - DNA, 631 bp, Glycine max
  Intron number 1 from transcript Glyma07g39090.1 (locus Gly ma07g39090) derived from phytozome v7.0 (chr-ID Gm07; pos 43685179 to 43685809)
ggccaaaagccccttcaagcttgaacatcccttgggtactctttttcttcttaatcttttcttatattgttttttactctgctatttctatttgtggccttattcatgattcgttccgttgccacaacacaaacactgaaacaaaactggcctaatgtattttcaccgaaccccacccttgtgtttagtagggtttgcgcgtaattagtacagttaaaacctttctgacttaaattgtaattctaaccttttgattcctggaatttaaaatcgatgccttttggattctgtcgaaaataaaaattatggcaaaggataattcatctaaatgaaaatctagttgattttgattatttattctaagacaatttcaaaaggatctcttgcttattctctgtacgaatagaatactgaatatggatatttttttcttttatgcctctttctctatgcaccttatgttttccccttggacaatcttttttgtttcacccttttatgagtattgtattttctctttatatctaaggcatactttgttgcatatttttctttttcaactcctgaattgaactttttggtctcccccatgtcagaaagaaggcaggctgagtctgctcgcattagagac

SEQ ID NO: 22479 - DNA, 645 bp, Glycine max
  Intron number 2 from transcript Glyma05g24800.1 (locus Gly ma05g24800) derived from phytozome v7.0 (chr-ID Gm05; pos 31003360 to 31004004)
agttcagtcttcatctgaaggtgcttgctccatggacatatatttgcataatatttggatcttgcagttgcatatagggattttttccatataatctattaattttccttttgcatgtccttagcgcctcagctctaatcacacacattgttctctcgagtttcttttcactcatgtttttttataacattagttctgttttcattatatctcttctgattagataaaaaaagatagcccttttctaatcaaaacagtccattgaatactgattgaagagtacctagtttagtatttaaactttgttatttgtttttcagcttcattgttggcttttgtatcatcaacctatcctttttgtatttaagtaaaaaggacaaaattaatttaaattagatgatgatggtcacttatgtatacctttttctaatttgcttttattactgtactaactgtttctttaaatactttatacatagtcattcaatttcttctgaagcctggcatttctagatttcacagctattgttctttgacatgtgtgaacaagtttcgttagcttttgattgcttgttaattttattttttcatctgatttctaattaatcagggtccttgtggttcccaggaatacttgggtcgggg

SEQ ID NO: 22480 - DNA, 841 bp, Glycine max
  Intron number 1 from transcript Glyma07g38820.2 (locus Gly ma07g38820) derived from phytozome v7.0 (chr-ID Gm07; pos 43483793 to 43484633 reverse strand)
tgtccactgaatctaaggtttacctttgcttcttctcttcttcgtggctaaattattattatttaaactaatctttatataacacataattgagttttattatatttttttgactaattgagactaccaatacatgatagtcttcccagtatctaataatttcttagccatccttgtacaaacgaacactcagtcaagaaagaaaacatcaaagttgaagcatgtcaataaaggtaggagagatagaagaattttagtgcaataggttgaatgtcacaataaattttcttgccaaggatttcttgttaaatagatagcaggtctctgccccatgcccatgtttttttttttttgcttgttttgaccatgcgttcataatgtatggttgtcagaaacaaagtatttgttaaattgaaagttgttcaatatatcgtgacccatacatactttaatggtatggtggtctacttggtccaccacatcaccaaccttagcatatgtaacggggctcatttttttgcccctttgatttatatggaaatgaaaccaataacctttataaatttaatcgtagtactcccgcataactcttgattgcgatgcatagaagtgtagtgatcctctcaaaaaaaagtgtagtgatatttaaactatgtacaaattttgtaacaagtgttcatgtgattccatatgaacttgacaaaaaaaaaaaataaaggttgtgcaaaaaaaatattaatgcagccatgtgggtttatgcataatttgtgagagttagtgtatgcaacgttttccacctgatgaatgggaatatggggtagtgcagttgagagacctagat

SEQ ID NO: 22481 - DNA, 979 bp, Glycine max
  Intron number 1 from transcript Glyma07g15150.1 (locus Gly ma07g15150) derived from phytozome v7.0 (chr-ID Gm07; pos 14974063 to 14975041)
agcctttgtgctatcgtggctatcacaagtctgttccctcctatatcctattctctttctgattcattcacttccctttttatgggacttttctgattttcttttatttttgccgtaagctagctcttaattctgaaatacataaacaagatgttttttttattggatcaattgaatgtttatagcatattagttcttgtaattcaacaccattttcggcttagaatcaaaataaataatcacccacttgcttgcgttcactctgttcactatattcataccagggatagtcaaaaaaggatggagtgatttagatacatgaattttcaaatgattgattttgggttaaaaaaaacaaacaaacaacttaattagaatgcacggtagtataagttttaatactgttatcattgtttttaaaaaacagtcagtaacagttaaaaaaaaagtcagaaaccgcgatttccgctgcaaaatcaaagtctttcttgggctcaccatgactgcatcacaactgcaactgtggctgcatttgtctgtaatttaaaattattttgtatgtctaaggtaatttgtaattagtcgagagtctaagaatttttacacggattgtgtatcaaaattaaactaaaagaataagttcagaaaccacaaagatgagtttgaagtgacaaaatttgaagtatagttcaaatctcctaattttcaggatgaagattgtgtgaactaaacatatacttaaaagaaatcaacttttttgaacagccgccaaaaaaacataagaaacataaaatctggtttagatcctagaaaatgtatacatcttagggtgactaggatattgaactttgtgccaaaacatctgcttcacattgatgcaatttgatcatcatattgatattgataaaccatatataataatacttagcacaattcttttccagttgttggactagtagtcagaggcaacactagctat

SEQ ID NO: 22482 - DNA, 839 bp, Glycine max
  Intron number 1 from transcript Glyma05g38570.1 (locus Gly ma05g38570) derived from phytozome v7.0 (chr-ID Gm05; pos 41920422 to 41921260)
gttgccgaggctgagaaacaggttagttttagttagttagttacatttttaagtgcgttatcggtttcaaaataaatgtaacatttaaaaagaaaaaattattcaaaacatgcgtctcatctgaaaaaaacaaattccaaaataactgttgcatttaatttttttaaggtaaattaattgtttttttattaatattcctaataagtgtaattttaattgtccaatataatattaatattaaagttagtcttgtaaaattatattttctttcctctattttttagctttatttttatatttgtaaaacaaaataggacgatgcttatctttagacggaagagtacattagtcaacgggtaggcaaccgttgagttttgggtttgttttattttaaaaatcacgcagtttgagattatcaaagcaaacaaattaatagtaaaaaatatatatatatatatataaggtcccgataggtagggaaaaaagcctacaaaattgagacttgtataaggtcctcctgacttgtgctcccttcaaccaatctcttaacattactaataatgtcatgtttgactcatttatatacttgaattttatattaagcttaaatttgcctgtttaaaaaactaaatcagcttgataaaggaattaacaagttaaataattgtgaaaaaagttgagcttatttgtaagatgaatagctgagctaccccctcaacctaaaacaatgaacacatgagaaaaagcattagtgtgagttcaagtaatgtgtcattactgaagtaaagcaatgactctctatttggtgcaggcaaaagaacagcttgcaaccagtgaag

SEQ ID NO: 22483 - DNA, 652 bp, Glycine max
  Intron number 1 from transcript Glyma06g21530.1 (locus Gly ma06g21530) derived from phytozome v7.0 (chr-ID Gm06; pos 18088267 to 18088918)
aacctggtattgttaaggaattttttgcctgtactgcagtgagatgttggatttgtatgtcaattaattaatgtgtctcatggtagctttcgattcatcattgttttagtagattggatgaaattgcataaaaaaaaatccagagaagacaggctcaaaagcttttgatattattcataacaatgaatttgattgcttatcgcatgaataactaaaaatttagtcccaagtctagaatttacttatgataccaaaaagactaataataccaacgatttgaagaatatccaataggaccgaacaaaagtaataaaacaagtccaattgcaaccttcgtgatctacattaccaacctacttttgaactgtaaaaaattggaaaataaactaaaatttcatatgcttgtcaatgtttgcttgtactttaaaaaaaatgttgcttgatggttttttttttgttcaaagaaaatgaccatgctaatttcccttgtatcgagataatatttctaagtttgcatgtgtttatagtttatacagaaaaaacagatatgctatggctgtaatactggaagattattatagaggtttcttcattcatctattctacttttttatcaggaaagctttcttatcaggaacttggaattgcgaag

SEQ ID NO: 22484 - DNA, 783 bp, Glycine max
  Intron number 4 from transcript Glyma07g04740.1 (locus Gly ma07g04740) derived from phytozome v7.0 (chr-ID Gm07; pos 3493417 to 3494199 reverse strand)
gcaggaagttcttggtgttggtgaacagttggaccgtaagatatttcttgaattctctgaataattttagttttatcattgtctgctgattgctttgaatgcaacatccaaatttgttgtcacaaactaccctaatttgaatatagtatgggaattgaggcctctattatgtatgcatccattgtagttggctttgcttgattgtcagacacttggctggagaagagataaagttgctgaagtttacaatgtccaagcttcttctgtccttctaaacttgcctattagattttctgatagaaatctttattagttatctcacaagttgtggttattatcttcacttaagggatgattgctgcgttaaattaaattaaaggctaaagatgtatttggcctcttgataatttgggaaaagcttctgtaatggaaaagcaatcaaagtgtgccccatttaatgctaaattacaacataagaagattttgaataggatattagttttatccttgcaacatgaatttcaaatgcttgcaatctcctgctcctagtttcttaacctggacatgaggatcttataaagatttttctcagaaacttctactaagctttcctagttccacacttccatctccattattctgatagatgatctcctcttatttccacttctaatgcagcttaatttttgtttgtatgttttggtgtatttgatggtttaacttgtgaagtttgaaatttatattctatttgatttcaaattctaatttgcagaggtcagccaa

SEQ ID NO: 22485 - DNA, 778 bp, Glycine max
  Intron number 1 from transcript Glyma07g04740.1 (locus Gly ma07g04740) derived from phytozome v7.0 (chr-ID Gm07; pos 3495115 to 3495892 reverse strand)
ggcatctccggccactctctctcatcgccattcaggtttctctcccttccatttactccaaccaattattctttcttctttcggaaattcaaaataaagaagaaaaatataaaacctaatgtcgttgttccctgcctaggacctaattagatgatttaagcgcgcaagatctggttgtcgtattttaggtttccttgccgttttgttttttttttttatcgcgatttgatagatctagttcgtggatcataattgcaatgacgatatgttagctcaattggcgatgtgagttgctacatcgtgcgcggtgcatctgttttttctatgaattcgtttggtttaatcagcaatcacctgtcattgttgcactgcatgcgtttctccaatttttgaaggtggattggttatgttgtttcttgtttgatattttggaatttgatgaatatctttagaactgtgaagttctaccccgaaaggggaaaaaattgaattgtttgatttgattgcttatgttgacggatcaaactaggctagaaattgtggtattgtgatttagtgggcgttaggtgctactagtatatgaatgggggttaattattaattatatttttagtggtctatttagtattcaattattggatgaagggaaggaaaataaggcttgtgttttacaattatagtttttatctggctcgaatctgactgactttgatttgtctctgtctcttggtttggtgttgtagtgtattttggtttagttgcaaagttttagagttgg

SEQ ID NO: 22486 - DNA, 747 bp, Glycine max
  Intron number 1 from transcript Glyma06g20250.1 (locus Gly ma06g20250) derived from phytozome v7.0 (chr-ID Gm06; pos 16667545 to 16668291 reverse strand)
ctgaacagtccctaccttgttgctgccgcaaccttgtgagctatccttcaatagagactaattttatcagaaaatgtagtgtaacatcagatttgtgatctgtgcagaatctatttataaaatataaaaagaacataagttgtggttttaacaccttaaatgtccaatcagcttttttggcttgtggtccaatctcaaattgcatccattttaatctcttcagtccatgcttttagtaacttacatcaataaagaacaactcttatcacctctattttaggagcatatatgcacctctatgcacaaattttgtattccttcatcaaaatgtattccaaaactataataatgaaatcaatccaacttattcaataataggaaacacaataattattggtagaaagatataaagaggcttttgcaatgtgcaggcctatatctaatttgagcattgttactgctttgtgctcagtattcttatgtttctttcttactttatgcacaaactttgtgttacttcctccaaaatctattccaaaacagtaataatgaaatctgtccaacttattcaataatatgaaatacaaaagttattgatagaaagatattaagaggcttgtgcaatgtgcatgcttatatctaatttaagcattgttactgctttgtgctcagtattcttctgtttctttcttcaaaccaaaatgactgtgtcatgctgaagttttgtgcatgttaaattatgcaggc

SEQ ID NO: 22487 - DNA, 688 bp, Glycine max
  Intron number 3 from transcript Glyma08g05870.2 (locus Gly ma08g05870) derived from phytozome v7.0 (chr-ID Gm08; pos 4186147 to 4186834)
cgccgttgctgccgatttcgttgactttgcactgggtcagccaccttcttcattcatcactctaaagacattcttcataaccatttaagtatatatctttttttccgttaagtaactgttgggcgttaggaaattattttggacacttcttttgcaatcaacaaatgccatctttcttttctttcctctattctcttatctggcatcctaacagcaactaaatactaaaattgtctttctggtaattctggagggttatgcattcatatgatgtaatggagtcattttcctccagggttggctcttttcatgtctgtattctgttatgtacattttcctccaaaagtataggcatgatctcagttttttgtttaaattaattcagaccataacacataaagtgataaaggtgttcagagcaatatttaaaatccagccatttaattgtttaactatgtcaacagcacactttggttcattgtttttctattatgtacatttgtcttgccacgtccctgtaaaatatttcagttttaatgaccatagtgttattttattttatatatatttgcatatttataatttttgttttattgtctctgcatgctgatatgtgaaaatgtttgatactattgcaccatcatgtacaacaggtattgatacagttggcggggttagagtacctgct

SEQ ID NO: 22488 - DNA, 983 bp, Glycine max
  Intron number 1 from transcript Glyma06g12120.1 (locus Gly ma06g12120) derived from phytozome v7.0 (chr-ID Gm06; pos 9340247 to 9341229 reverse strand)
gacgcacttccaatccaggttaatacgactaccttcttccctcctcttagactagtactactactatttttttatttgttattcttccaatttttctctccttttcatcacgccttcttgaaaacctaaaataaataaaataatattggaataaaaaaggctcaattattggacttctttcttacttagaagttatgtactatcctttgttgcttgagaatgtttattcctaatgctatttttcttatttttgtgacatttaaaataaataaaaaattaattttatttgctaagaaattgtgggagtttgatggtggggttgagaatttatgtttgaatgtttttatttaatttcaagagaattataattgtcgtttttttaactaatatcgtacatgttacaagatctttgatttgtcattatctgtcgcattaatgaataaaaactttagatcgcattaatgaataaaaactttagatatatttgatctgtcttgtctcaggtgtttgtgtctgacagacatgaataataagaaatattatttttttagttttgtctgtgtttgacacaagttagtacaacaggagcatattaaattgtgtacttatttttttaagtaacaaaagggaggattttttttttttggagaaaaggtatttgtattttttatgcttattttctttctagagagtattaatctgtgttttaaggcaattgtaatattttgctttttattaagtttcttgatagcttttgtacaaaaaacaaagctttttcccatctacttttgcccaactttattactgctgaatattgatttactttctatgcattcagcagtgaaaaaaaaagcgctttaagtttgcacaacaataaatctcttagcaataataaatactctttgattaattgcaattaatttttcatataaaacaaaattccatctcatcaccacttgggattcgttgtaggaagctgtgga

SEQ ID NO: 22489 - DNA, 580 bp, Glycine max
  Intron number 1 from transcript Glyma08g01740.1 (locus Gly ma08g01740) derived from phytozome v7.0 (chr-ID Gm08; pos 1099573 to 1100152 reverse strand)
tcgaaaagaagctgagaattgtgactgcttgcagggtactactacttgcttagttaattcttctctctctcttttttaaagttagttaattcaagttcttagtaaattcataaatttagatgcagttaaccaactacttttcatcttattctttaattagagagtagtagtttcaccttttttgtaacaaaatatatatgtagtaccttaacttcatttcatgttgttcttttactaaaataaaagtttcatcttagtaacatgtgttttgttgtaaggcaactataataatactctagttcagtagttctgattgaagggcaacatgaaaatcacctaaagaattgtatcatagatttgtcctttttacagtcccttaaatacttttttgttctgatcctcaatcaaaattagagttttacctagtagcatatgttattgtgtgaattactgagaagaaactctaattctaataggaaaataataaagaaatagaagtacatctaagttatgcatatgagaattgtttgtttgatgatcaacagggttccaaatttgtcactcactgggaggtggaact

SEQ ID NO: 22490 - DNA, 521 bp, Glycine max
  Intron number 2 from transcript Glyma08g02820.1 (locus Gly ma08g02820) derived from phytozome v7.0 (chr-ID Gm08; pos 1933667 to 1934187)
aagacctttacaagggttgcaaaaagaagtataaggtcaaggactgtttctgataaattcgggcacttatctaattcatgcccttctttgcttcattgcatgcattaggtatactgttgccgttttttaatcagaattgaagtttcatgacattttgattgaaaaatagcactaaaaacacctaagttttgtccataacagaattgaaagggccgatgtaaattcatgatacatacaactactgtcattaattaacatcgcgagtttgtattggctacaaggcctttgaattgaaacattgaaccttttttttttatagagaaaattgaaacattgaacctaaaaccacttttgtgtaaccttaactgttatcaaatggttttttttttttgctgccaagtgctaatatgcaattgtattaaagaaaattatgatgctttctttttcttttttattgttgtacgataaatcttggttttttttttttttttgcaaagcacgataaatcttggatagtttac

SEQ ID NO: 22491 - DNA, 401 bp, Glycine max
  Intron number 3 from transcript Glyma07g12300.1 (locus Gly ma07g12300) derived from phytozome v7.0 (chr-ID Gm07; pos 10602522 to 10602922)
gagcaagaatcaagacatttgcagtaagtaatatatatatacacacactaaggattttattttgttgataaaaaataataggaagttaggatgacaacatacttgcttcctagagctattctgctataattgtatattttgtacccttttcttcaactcaaactatgtaattatataaacaacgtgagtagtaatatattacaaagtattattattttaagtcctgcaacattgatttagaggtgtccttagtaaaattgagaatcaaatgcttaaaaatattcagatgtatggaacaaacaaaaaaggaaaaataaggaaaaaatatatttccattatctcttcccacttgaaagtaatattttatatattgtccatttctttatagggtggatcaggtt

SEQ ID NO: 22492 - DNA, 562 bp, Glycine max
  Intron number 2 from transcript Glyma06g33910.1 (locus Gly ma06g33910) derived from phytozome v7.0 (chr-ID Gm06; pos 35095049 to 35095610)
ttgaggcagagtgtggctatagccacaccagaatttttgaaattataattttaacttaaaactttttaagttaatttattaaattaaagatatttagtaaaattaactattatgctaattgataaataaaaaaataacctaaagaacatgtaattataacaaaaatcattagttttaatttttaagataattttttatacttattatttttgtttaaatattaaatatttactaatgttaaataatataatgttaaaaataacgtttttttttataattacatgttcttagtttgttttttttacaaaggctacatgtttgtagttataaatcaacactaagttatgatattaaaataataaacatatagtattaaaataaaattttaatgaaataaatatataacccagagatagctaatgtaataggttgtgcttcgggcaataactttatgactgctcctacgattcaaaaggatagagacaagaattgcttcgggacaaacaagtatctcaatttgaagagagtcagatagagactggtagtggattaaatcaagaat

SEQ ID NO: 22493 - DNA, 1038 bp, Glycine max
  Intron number 1 from transcript Glyma06g08560.1 (locus Gly ma06g08560) derived from phytozome v7.0 (chr-ID Gm06; pos 6240061 to 6241098)
ctactccttctcttgtggttagagacacagtaagaactctaactctcactcatcttttcgcctttgaattatggttatgaaaaaatagaaaacaagaaagaaaaacctgtgcttgtttttttttttttttttctcttcttctttccaaaagttcatgtccctccttatttggaatttctgatttaatatgaaaaaggttcgtttgcaacaagacgcccactttttttatttccacctttttttaatcgtgttgtgttgttgtgacttttgtcatgtttcgaaatatacaccgtttgctctgcaaattaaaccaacgatatgtttttcttttaaattttttctcttctcatgcaaaaattttaaaaaaactttcgtaaaatatagttttcaaggttcgtacttaaaattttgcattactcatcactatctcactatcagaaaaacgaaattgcaaacatttttttcttcgttctgaaaacaaaaaggaatcagtccaattaagattcatgtaattagatatccacaaatttggcttttctagtctaacacacaaacttcacacaaattatcaaaccctcgcttcattctagtatcgatcggcttcaagttccaatagattgttaaaaaatgattcagaagctttttaattttatattctttttattcacattttttttaatattcttttgaggtaaaaacacgagtcttaaaacttgatcttgcactttcttggatttttaattaagcatgcgcaacataggtgtgtgtgtgatcagtgatattttcattattttgaacccaaaacttctttttctcttgattcgatttttctgagtgttctcccaaaaaaatcaggaggtaaaagttctcgtgcatcaactcccaccttttaattatttttaattctttgtggtactgaagttgttttgttataactttttacagtttacaatttacaatccagtaattaatattgttggtgttaaatatttttgttcgtggtttggtttggttaaggtacacgtcctaccacgagag

SEQ ID NO: 22494 - DNA, 326 bp, Glycine max
  Intron number 1 from transcript Glyma06g07810.2 (locus Gly ma06g07810) derived from phytozome v7.0 (chr-ID Gm06; pos 5729488 to 5729813 reverse strand)
ttttcacttggagttggtacactcattcactcatctttcaatggcataaaaaaagttttttttttttttttaattcacttttgcatttggagtttatggggtggaatgaaatgatggctttggcttccattattattggtttcttcatttgcatgttttttttttctcttctgggtttctagagaatcttgcaattacagtgtgagatgaatttaaagttttgatttttattttctggtgtttggctaattgtgtagtagcattatttgtgatttgaaaaattggttgtttgtgtgtttgtgttgttcaggtgctttgagataata

SEQ ID NO: 22495 - DNA, 808 bp, Glycine max
  Intron number 1 from transcript Glyma06g45480.1 (locus Gly ma06g45480) derived from phytozome v7.0 (chr-ID Gm06; pos 48185322 to 48186129)
cctcggtgccctacaaaaggtaaccccaattattagtattactattatttagagctcttctaactcaatcctaaaaactattactttgattacgttcccacctcaaacccacatacattgttagagtttcatgtattcaaggtattgctcgatcgaccattacaattttatcttataaaagactcatcgatggtttgagagctgaagatgtttataaataatttatgggtttgattcgtgagactttgagaatactagaatagttacatgattattaccatgctttttcatgctgaagattgaacatcttttaatatgaaatgtgtatgactaaatatttgtgaatacttcaataataaatccaactaaaataactaaataagttgtgataatattatcttaaaatttccaacaacaattttcttacttatataaactagtatttttttttcatttttgaaattttggttttgagttttgtttgggttgggtgcaaatgttctgccaagtgttacgtaacgatattcaaaaaggaaaagtgaagtggaaaaaataagtcatcttttttcgccgaccaggttgaccttagaacatgacttcccatgtgcgtttacaaattattagaaacttttttttttctttcttttttcggtttaacttttgcaacattgttgaattgaaccgtttctaatttgtcccgaaccatgttttactactgtttaggatgtgggttttattttttggcgttgaaagattaatgataataacgtgatttttaattggtttttgaaggtgaaggggtataaaa

SEQ ID NO: 22496 - DNA, 787 bp, Glycine max
  Intron number 2 from transcript Glyma08g33830.1 (locus Gly ma08g33830) derived from phytozome v7.0 (chr-ID Gm08; pos 30471501 to 30472287)
aacaaactcctgctccttcttctccttggtcataggttcgttcatgtctttgtttcttcatttcattttaagtaactttacttcttttgtttatttgttttacttctagttaatatcccttaatagttatactaagctttctaattagggccttggaatcttttattgaattatgagattattagttgaattcgttaatttgcatgtaattctgatgttggtagcttaaatctattaaattatcaaaattgagttttgtctctatcagtcatatagtatctattcttgaaagaattgaatctaataaaatgcccaaaattgattctctctcggtaaaaactgattatctcctcaacatgccccatttttgttttctgtttctttttttttttttttaaaaagatatatttcatttgttagactaatatcttgcatgctgctctaatataagaaaaagataggttttaaagaaaattgctcaataaaaagggggtgggggaactaaaaattgtttcattacagatagatccttagcagtgatgtacttgaagggaagttttgatatctagaaaagtttgctttttagatcaaaggattaagaataggatctaaccattattctgatttgtgaaagaacttatgtgtaattgattatcactaagaaaaataaatagtggtatgcatagagagacagtgagtgagaattcttttttacatttttgttctaattttttcactcttaattgacaaattaccagaggcaccatttttggtttattgataggca

SEQ ID NO: 22497 - DNA, 610 bp, Glycine max
  Intron number 1 from transcript Glyma08g10960.1 (locus Gly ma08g10960) derived from phytozome v7.0 (chr-ID Gm08; pos 8001164 to 8001773)
ttcccaaccacatcctcctttttgtcgacaacaaggtttctttctctctttctttcatcaaaatctatattttttgcttttgctgttttaccccttcaaccaaatcagttaaagcttgcaatttgtttgtcctctgtttgtaattactctaaggatgaattttgtttctcacgatattaacttgtctttgtattctgatgcaagatctattagtttcgttacccccacaaagttgaattgctgaaaattgccgtgaaaatcgtggcaaataacacccttctgagtaggatcctgttatctgtgcgtttatccacagttgaattttttgtttttcattcttatcccagaacttgatactaccataaagtttgattgttatgtatagttctatcccttaaattgtcttgtttgattgctatcgttttctatatgtacttatagcataaaaaatattaaaaaaacatgtactaacatgaattgaatttgtgtaaattttgtatgtccttgcatcgacatgcttgaaattccgttgttgatgttttgaatgaattgggaaattgctagtattttgctaagcaattaattttgggaatatgattgcggcaggtgg

SEQ ID NO: 22498 - DNA, 795 bp, Glycine max
  Intron number 1 from transcript Glyma08g27720.1 (locus Gly ma08g27720) derived from phytozome v7.0 (chr-ID Gm08; pos 22045636 to 22046430)
aatttcgtgcctctcctctttgtttaccctaccaggtattctcaatgcaaactggttggttctttattatgttgatcacttttcctcttcattctggctcaaagcttgtttttttgtcttctcttgtcaaactttattttctttttaatttgttgtttactgaattgttggtgggttgtttctgaatctgatcatgagatttgtttggagcaaaagtttttctgatatttcccaacatcttcttttgtattgcaaattaataacttgttctacaatgattgagattttatgggggattagatgctaggcgcacacagttctttagatacttgtgtggttgtttgccaattagaattgaagttttacctcactaatttgtattcatctataatgcaaagttttactatatgaattatcaaaatgaaattctaatctgaccgaaaaacaggactaaaagcaatcaagaaattgtatcattgttttgtctgatattttattgtcttgatattttacccaatcaaattacaaaaaaataaagacttttgacagatctcacattcattagttcagccataatttatcatcaagattgtacctgtatgaaattagggatcatagttcaaaaggataaatagaactgtccagggacattaggagaaaatatgactgatgagtcttttttttcttaaaaataaatggtaattggttaagattattcttcttccttgtcatagctatcttactttatgtttacttgtaatgttgtaaagatattgcaaatacagcaagatcatc

SEQ ID NO: 22499 - DNA, 626 bp, Glycine max
  Intron number 5 from transcript Glyma08g27720.1 (locus Gly ma08g27720) derived from phytozome v7.0 (chr-ID Gm08; pos 22047154 to 22047779)
ggctatttcacacagggaaaatacatcggtgaccagtaagtgccttttttttttttgtgatccttttgtttgctcaattaatggcactttatctttgtttctttgatgccttggaaagggatattctagatacttatttgaagacatgtccatctctatggatttcagtagctgaattgttttgattttgacagttcaatgaatatgaatattcacttgacacattaattttttatttattttctgtttctttgtggttgaatatctaattttttttatacgctgcttatgcaatgttaaaactgctaactgatttctttaatggaggttcatttaaatattaagattcatgtactaacaagaacaataaaagtcttatcttactaggtgaagtatgtagtatataatagatctaaagaccaataaagtggaattaaatgttctgtatgaaaaactgggacatagaaaatgggataatgggtggtcttttgtggtaggacatacagatattgcaggacatttacaccaaatgtcttcaaatctagttcctaaaatgacaggcattaattatcattttcaatttgggtgcagtaagtttcttctggaatctgctgcaaaggttggta

SEQ ID NO: 22500 - DNA, 833 bp, Glycine max
  Intron number 2 from transcript Glyma07g12380.1 (locus Gly ma07g12380) derived from phytozome v7.0 (chr-ID Gm07; pos 10692606 to 10693438 reverse strand)
ctgatattgacaggttcttaaaatgtgaattgggttgtggaatatgagtggatttgatgcttaatgatgttactcttgttgtattggtcccaaaaattttgtctatacaaattagtttccaaagggatgaactttggcaagttgagaatttggggagagtgaatttgatagcaagttgagaatttgggtagagtgaatttgataggaagttgagcatttgtgtagagtgaatttgatagcaggttgacaatttgggtggagtgaatttgtatagaaaattgaggatttggctagagtggatttgataggaagttgacaatttgggtagagtgaatttgatagcaaagttgacacttttgaggactaatttgtttagacagaaactttggaggaccatggcaagtaacatcttttaggtgctgatttgtatatttaagacattttcttattaaccaatttactgttataattgaaagatatttgcctccagtagctatgctgatatgtttagctaggcattcttggtttcacagtttctgggtctggttcttatttcttttcttgaaaattcaattgggttgtagaatgttagtggtattcagcaactgttgttgatacaaatttgttgttgttgactcttctttttaccattataagtgaactatatttgcttctagctccatgctatgctgtgttgatgttggttggtgttcagtgttctttttttttccttggaaatttaattggattgtagagtatgtatgatgtttggaaattgttgatgcacatttatgatttttctttttggtggatagtgggttgtggggttggtc

SEQ ID NO: 22501 - DNA, 889 bp, Glycine max
  Intron number 1 from transcript Glyma08g35600.1 (locus Gly ma08g35600) derived from phytozome v7.0 (chr-ID Gm08; pos 32954209 to 32955097 reverse strand)
cagtgctggtatgtttctttgttcatttttggctttttgttcctgtccttcaattacgcaattaataattttacgttgtatgattcaaaatgtagttttttttattgaaaatgttatttctgaccaaatgaatagaccaaggttttaaattacaatttgaactatcacatctggacctctggttgtgattttgttattatcagcaattgtgattgcggtgggcccaaaaaccttgacattgttgttgaaatcatggtcactcactgcaccaaggtcttaaaaaaaggtcttctcagctgtaatttcgacaacaagatcagggtttttgggtgttaaccgtcataattgcaattgtatcggctgtatttgtttgcaatttcaagtaatatcaaggaatataaggaaactgcgaccgcaatttaaaccccgaataatacaatgttggttggtattgtgttgtgatggacttagttacatcctttaattttattttaactttaaaatcttttgaatgtttggcaaactttttttttaattactttgttgtggctgtatgtttatgttggtgtgtttgtgtggaatgaattattttaatatttaactactatgaaacaactgtttgttgctagttatcacaataactcgttcaagactataggatatgccgaacaatagtgtgtgggtacctagactcttgctgtttaggaaaataaaaaatttggaaatttagaggtggggtgaacgtgtagttgatttttattttagtttttcggtgaaaataataaaatgatgtcattcgtttgcttaaaacctgtttgaaccatcgaactgttctctgttcaatcagtgcatgaataattgatttttttatattcaggcccagtggctg

SEQ ID NO: 22502 - DNA, 717 bp, Glycine max
  Intron number 1 from transcript Glyma07g21640.1 (locus Gly ma07g21640) derived from phytozome v7.0 (chr-ID Gm07; pos 22806540 to 22807256)
gaggtgtgggaagcggttccaagttgcggaataaggtagacctatacatttgtgtttgataaaagttttaagtgattatactttttatttttttaatcttttttagtttattgtatttaaattttgggtaatatgtgtttaagaacgtctgtaaactttatttataaacgatgttttttttaatatatagactacaggtagatatcctttacgtgagacaatcctgaatttaacaatgactttggtcattgtattttttataattggtgaattttgccccactttgtgaaacttaggatgctagggtgggtgatgaaattcatccatcataaaagatacaacgactagcatcatcttttttttttttttttgttatagcatagggattaaaagcagttttgacaaaaaattgaaagacttgaaacacatttgacccttgtttttcttttgctttcctgtaactggttgtttacaagttcaatttgatgttatctgattgattgacattgaggtgtctctggaagttcatatgcttattttcttcatctccttcattcttttatgaatctaatgattgtttttgacattttttttagcttactgctttgaatgcatgacttgataagaaatgttgatagtttgtttataaatgcttatggctgcacggatgaatgtatcattgactgaaattcattatactttcaggtagttgctctt

SEQ ID NO: 22503 - DNA, 685 bp, Glycine max
  Intron number 1 from transcript Glyma08g16690.1 (locus Gly ma08g16690) derived from phytozome v7.0 (chr-ID Gm08; pos 12230693 to 12231377 reverse strand)
attgccccagaagaacatttatcaacagtatttaggtagttcttttgctctcttctcgaatcaagtttttttttccaatcatctattgttttgtgtgttttactctaatggggttttcatcaatcatgttttctttacatcttgtttttctgttttttttccttgaatggctgaatttccgggaattgttctaaaagggaaaagaataacggacgctcattttagggtgtatgagcggatggaagagagaaatagaaagataaaatagagagaaaagtgatagatgtgataaatgatgtaatgtgatgtgatgaaaaataaaaaatagagatacaaagaaaatgagataaaggagaaaatgaatctacattgatcattacgttttctaaaattatcattgcaaagtaaaagcacatcaagaatgcttgttgcaatacaaattttgggtatgaaatgtttgattggcttgagtaaatgtgggtgaatggtgaccctcaattccattgtgccctatatatgcaagaatcatgatgtgggcctggtggtgatcttgtttatgatttggtaatcattcatttgttgtgtatgatgtatgaaacgttaatttggttttatttgttaggggatggaacatttgaaatgagatgttgaggggacaaacctgtgcatagaattgaagtttgtg

SEQ ID NO: 22504 - DNA, 395 bp, Glycine max
  Intron number 1 from transcript Glyma05g13110.1 (locus Gly ma05g13110) derived from phytozome v7.0 (chr-ID Gm05; pos 13639099 to 13639493 reverse strand)
gataatttggcgacaactgaaatgtaattgctgaatgcataaacttgttagtagacaattttcattatcaggggttaatttgattaattactgagaaataaatgaactctatctgtctgcgattcatcttatatagttttacaagaaagtataggcaaaacacgtaaagtttagcattgttttggatttgctttcatattatttgttgatgttattgcatcttactctatatctcttcatagaatggatagcactgtaaaaaatggtttatactgaattaatagaaagaaaaggctaataatatttgaaatgttttcctagtagacttgtgtttattcttattacacttctctttctttaccttgaggatgctttattttcatttgtgtagaatc

SEQ ID NO: 22505 - DNA, 827 bp, Glycine max
  Intron number 2 from transcript Glyma07g13260.1 (locus Gly ma07g13260) derived from phytozome v7.0 (chr-ID Gm07; pos 11834305 to 11835131 reverse strand)
ggccccgtgcctctaacccttctcacgttgacagggtatatacctctttttctttgccaaacatcaattattattatttattcatgcatgcatatgtcactcctatatacccacgtccattcaaatgttagtcctacgttttaaattttcacaaaacactatagacaaaacggaattttggatttttcaccttactgtaaataactctccctttattgccatttagtgcaaataatgttatttgctaaggtaccatcagggcgtgccatggttggtagatatggccaggggtggttcaattctcgggtctgtgtctatgaaaaaaatatttttctattaggagaggtgcgctacttaaatggattttcatacctcgataaattagtttctaaccctagatcgggggttatgttgggttcaacaacaaaaaaaaaatgtcttatgatgtggtgtgacatggttggtagataaccatgtcatttaagtatgtgatcagtggttaaatttttaggtttgtctttacgaaaaaaaacacatgagagatgttaactccttaaatggatttttgtatctcaataaatttgtttctgacctggactggggtcactttcggttcaccaaaaaatgttattctcttaagtagactaagtcacactaattcaaccatatgataatcaacacacaaaaagatagggaagctatttgttttcctttgctgtttttcataacttcatttctacagccagcacatttgacatttgggtattcttcccctttttgcaaggatttgattttttttttttaaatcttgtttgttcagtattact

SEQ ID NO: 22506 - DNA, 888 bp, Glycine max
  Intron number 2 from transcript Glyma08g08650.1 (locus Gly ma08g08650) derived from phytozome v7.0 (chr-ID Gm08; pos 6160523 to 6161410 reverse strand)
cagagcaatctgcagcagagattgctatagacaaggtatcacttagttccgatcagtatgcaaattattaattcttattatgtcatcatgcttcatacttgattcccctttcaattagatctgtctatggttgttgtgaacttgtaatatgaacgacatttacttttcttcagtcacaattatgttgaatctagctacagccttatctcacgtgccttttgaatttttgttatctatttattcaaacaagtgttattaattctgttacattcagctattaatgattatatttagttttagtcctactttggagatgatcatggtcaagtgcttgttttcttgcatttgagaatgtcaatgtcagacactctgatattgccacatgtgaatcttactcttttgtgtcttctaatatagttaagggagtattttcaataataatcatgcttgtgtaatgtgtcattcctttaactggaacttcaattgctggaattttctatggatgttgtttttttggccaatatgtattggagggcattttttatgtgggcttgattgtatttatcctgcctgactcattgtctcattgtttcaaacactcacacacataatttctaaataatgttatgaataggcatataattttttttttctgatatcgattctactgctacagtttgttttatatgtatgcgtcctatttcaatagtaatgtgatgttttcttataaaaatttaatgctgcacaggaactggctttatattgttatatcttttattcaagtgtttattgtcttaaggattatgacatcttaactttcacaatgctacacctattaattactctccttcagcttggcatttgtacagagaccattgatcctactcc

SEQ ID NO: 22507 - DNA, 1002 bp, Glycine max
  Intron number 1 from transcript Glyma08g08650.1 (locus Gly ma08g08650) derived from phytozome v7.0 (chr-ID Gm08; pos 6161662 to 6162663 reverse strand)
aacccattgctcctcgcacactctactcaaccaaggttctattctcatcactgcgtttattctctctccctctttttttccaatgttaaaacgtacttaattcctttgatgcgcttttctatcctcaacttgcttctgattctccccccgcattcacttccatattccgcgtttaattccattcctgtcgtttgttttaccacgatcattgtgaatgagaacttgcttggggtttctcttcgccgttttaactacgccgtttcaatagtatgggagcaaaactgtttttttttttataaaatatttggtttcagttttgacgctagtacacgcattgttccctatgctggtaatcggctacgaaatggaattcatcaatttttattttttatttttctagttattatccgaaaatatgagggtgatatagttctttatgcattaggcaactgcaactgcaactgacttgctttttgtttatatattatattctctctctgtgcgtgttggtcaaaatatatttaggaaatttctgggatgatgattagatggattaacaaatgttaccgaggttatacttttgcaaatacttatgattgagggtttgattttgtttttcccttccaaatactgattgaagaataaattaggtttggtgaaaatgtatttaggaaatttctggaatgtttaacttggattaacaaatattaccgaggttataactttttgaaatttatgattgaggtttcagggtttgaattttttttccttacaaataccggttgatgaataaattaggttttaatcttatgcatttcaccaatctttctagaaaaactgaatgctactgtatgtgttatatatttattctgtacaatctagattttatgctagttgccacttaaaaagtattttattgttgataagatgatattcaagtatgtaggagattgacaagttcttgtttaccccctttttttttttggttttctagtatagtgg

SEQ ID NO: 22508 - DNA, 325 bp, Glycine max
  Intron number 4 from transcript Glyma07g29630.1 (locus Gly ma07g29630) derived from phytozome v7.0 (chr-ID Gm07; pos 34628375 to 34628699 reverse strand)
caatctcttctgtattcccacatttgagcactcgggtatggctggttttagatatgatgtgtatttaaaaagatattttcattcatttttagtttgttttttatcgagggtatggtgtgctatcttgtattgcttcttctaagtgaaattcccataccttttggttgatgatcatggaggttgttgctatcctcaatcatcattttcttgagcaatcctcatggcatgattatgaaatatgcacgtcgatgcattgttatgtaaattacataatttgagcttaacccatgtttgcaggacttgccagatttgattgcaataaagg

SEQ ID NO: 22509 - DNA, 486 bp, Glycine max
  Intron number 3 from transcript Glyma07g29630.1 (locus Gly ma07g29630) derived from phytozome v7.0 (chr-ID Gm07; pos 34628770 to 34629255 reverse strand)
gtgttcttggagctagtggctacactggttctgaggtaagctacatggcacaatcgttctaagtgtgcttgcttggtttaatgtgtagaagtagaatgattggaagatggaaaatagttatgccttacagtgggaatgagttttaaaaaacaatttcggccccaatgtcaaggtttctggatctctgcgaccataattgcagctgcatcgactgcatttatctgcaatttcccataacatcaaggatcgtgatgaaactgtgactgacatcacaattttaaaaccttggttatgattaatttattttgtttttggcttgttgtgctttttggcatctacaactcaagtgtaaactgtgaagtgtcttttgttctaaattgtttgcattgccactttccatgtactcacccaagcaagtagatgtcactgtcagttttgatctggtgtttctgtgttgtgagattgtgatacttttttgggtaggtt

SEQ ID NO: 22510 - DNA, 978 bp, Glycine max
  Intron number 1 from transcript Glyma06g22840.1 (locus Gly ma06g22840) derived from phytozome v7.0 (chr-ID Gm06; pos 19726718 to 19727695)
cgtcgaccactccgtcaagctctacaagtatcccggtattctactcttttttttttcttatttgggaactgaacaaattggatttgacaaaagattgattatatgaccttgaaattaaccaagtgattgagtacattcgagtagtatctgaattcgatctttgacggaattaatttttggtcagactttacttaattcctgatcgaactctagattaggcagagtctttttttcccgatgaattggagggttaagacaaaaaaaatgaccttgaaattgtatctcattgtcacattcatcctaaattaaccagtttaatttttggtccttagtctaggtgcttaagtcataataatgtatgttcagggatcaaatacaatttgagttttttttttcaattttaagactaatacgaccgcaaaagcagttttagggcctaaattgaccatttacttgcataatatttgactaattacattttggactaatactatgttaatatgttaagaatgtctctcggtatataaaaataaacaatgtcatgagttaattttttaagttctcacaaggtgtttttatgttacctgtgaatataaactgaaccaattggatttgactgaaaatttgaccaatttcatttttgactggtactatggcatatatttggctaaacaaattaatgaagtatttatcgaatgagtgattatcatgtgagtatttatgcacaagatgtttatataatcaaataggaagttcatatactactttagagagtttattgaaaaagtacaaaatagctccttataaatatggtttattttcataaggtcttcccaatgcacctaactcgagtaaatgttctttttttcattttttttttaaaatttttagattttgtttcaatgtttcaatttttaaggattttaggattgatgcttggcaggtggagaattcgagagaaatattacaaggtttaca

SEQ ID NO: 22511 - DNA, 586 bp, Glycine max
  Intron number 3 from transcript Glyma07g03970.1 (locus Gly ma07g03970) derived from phytozome v7.0 (chr-ID Gm07; pos 2809177 to 2809762)
cccctacagattctgaagatacacacaggtatgcttacacttacatcacaactacattttttattttatttttggtaaacactgttcatttctcaagcctgttggtagctttatggttttattagaaacccttttatttcaatatatttttgggggatgcttgttaaaataagtttttttaggttttaagtttaacagtcaagcttaggaatgaattctctgcaaaatttcattaaatagaatatttgtgagagtttttttggagcttatttaagtttataacctctcataagctttttttctaacttaagttttatggataaacatatcaaaataaactatttttttacttattttagtaagcttcatagtcaagattgcgaatgaatatggatataataagttgttacaatagttaaagataaatgcaaatcattggctaatggtcttgagatcttaaaaatatataatttcttatcaatatgaaagggaatataattgtaatggttggaacgtgctttcattgacttattgtatgttcttgtcattttgacatggtctcaattgtgtaggaaaccaatcaaag

SEQ ID NO: 22512 - DNA, 210 bp, Glycine max
  Intron number 4 from transcript Glyma07g02170.1 (locus Gly ma07g02170) derived from phytozome v7.0 (chr-ID Gm07; pos 1506601 to 1506810 reverse strand)
ccttgattaaggaaaaggtgaggtttctgaaattatttcctcttgttctttgtgtgcttctgtctttacaagttataaatttcttttcttattattttttttttcttttttgtatgatgctgttttagttttaaagctgtgtgatatttgtgtcaacaaatgtgatgttttgatttgggatttctgccaatgtacaggtagctgttgggg

SEQ ID NO: 22513 - DNA, 259 bp, Glycine max
  Intron number 1 from transcript Glyma07g02170.1 (locus Gly ma07g02170) derived from phytozome v7.0 (chr-ID Gm07; pos 1507419 to 1507677 reverse strand)
ctacccacactcacattaaaggcttaggtctcgaggtgagttcctcttccacttccacctctgggtttttttttgtttttttttatttttaatcttcgtttgattttgttacgtaaagaaaatattgtgtagtcctgctctgctcaaacggttttcacgttgcttcaatttttaagtgaacagttgcatttgtttttgtttttgtttgatgattattcgttcaggcgagtggaaaagcattgccttttgctgctgggtt

SEQ ID NO: 22514 - DNA, 982 bp, Glycine max
  Intron number 1 from transcript Glyma06g19800.1 (locus Gly ma06g19800) derived from phytozome v7.0 (chr-ID Gm06; pos 16142554 to 16143535)
gaagaaccagccacatatacaactggtaagtttttctttactcatctattttaaaatatatattttaacttttcattgcttacatatttgcacaaattgctgtattttggtagaaggaaaatttatggaacacttattcttttaactcaacatgtgtccctcctggcaagcaatgactttagttaagtgacctaacttaggtctatgtagtgtccttagataatattgcatattcttaaattttttttctttcttaattcttttaaattttttctttctttctcatcaatattattagaaaaaaaggtttgtgataaatggaaaaaaaatgaagttctcattaagaatagttagtcaagttttaagttgcatttttactttattacttacattttccttatgaagttagaatatgcaatattaattgtaaatatgctattaaattatgttctgaatacagttatgtattttaaatgatatgttgaaatatgtaaactcttaccattcaatggtttgagtttttctaggagaccatgagattactttaactctcaagtttaacaatttgtatttggttggcttggtgattaggaacaaaggtttaagggttgaagtgaggaggggaggggagaggtcgtgggttgaaatccccccactaacattctaacaatagctaaaagctaacattggctaataaaaacaaaacaacttttggtgataaattacaccttttactagataaaaaaactaacagaccccagtgctactccttttactagataacgtttattttttattttattgaagacaattgccatcaatgtgctgaagtgtaaagacattagtacttttatcattaaaatatctattcagaattatggtttatatgcatatgcatcatcttactataagtttctattcataaaggaaactctcattcattaacatagaatatgttggactgattacagtgatacttttg

SEQ ID NO: 22515 - DNA, 675 bp, Glycine max
  Intron number 1 from transcript Glyma08g20500.1 (locus Gly ma08g20500) derived from phytozome v7.0 (chr-ID Gm08; pos 15520406 to 15521080)
gatcatcatccacttcttcctaggacctgtctcaggtgcaaaacccctcttccttttttcaactgcttattgatttctctttttgtttttaattgacaatctgttggggtgtgcctttgtgtgattttttcaaccacggaatggtaaagttggcttttttttttttttagttgttactgatcacttgaatttaattggccggggaattttacttgtggggtttttgggtactttgatttgggagtcaagattcaaactttagtgtatttggggattggatttgaggagaagattctaaaaacgagaaattttggtgtaggggaattgtgggagtgtattttgatgggtagggcaagtttattttagtgtgtttgtggattgaatttgaggagaaggttttaaacttagaaattctggtgtaggggaattgtgggagtgtattttgatgggcagggaaagttatttttactgtcatgttttaattattgccagacgttgtgtcaaaaagattaacacaatttgtcttgattgtagtaagtttttttttgttggtatttctaagatgttgataacttctcttatctgaacagactgattctttttttctcattatttttccatttttcttgtttttaatcagattcttcatagaggagtactgctgctgatcactgg

SEQ ID NO: 22516 - DNA, 926 bp, Glycine max
  Intron number 2 from transcript Glyma05g34650.1 (locus Gly ma05g34650) derived from phytozome v7.0 (chr-ID Gm05; pos 38910063 to 38910988)
cttctcttcttcatcaggtactgtactctagcatgcctaaattctccaagcattcaaaagaaaataagaaggtagtagaaaggttaaatgaattgagttttatctataagctataattaatttatgcactttagcttttggagaagttagacgagagacaatttataaaagtttagcgcataagtttattttatcttatgagagaagctcaattcattttacttattttcttttccttcaagtgcttacaaagaagtttatccaaccatgatctgaatctgagctattttgcaaacaatagttaataattgatttagggtctgtttaggtaagcttctctagaagcacttttagagaagaaaataagaagaaaaaaatgaaatgagtttctgcataagctaatttgtagatgtcctcttatttttttgagaaactatatgagagaacttctacaaattagttaacagatagctcatgttaactgatgaagaaactcatctcattattttcttcttttagaagtgcttctaaagaagcttacccaaataagcccttagtagattttcattttgacaagagaaacgaatatacatacctagtcgatctccaacgttaaagttgttccaatattgtattgtagtacactatgtactgataaatttcgatatgcatttatgtgtgtctcttatttttcaattttgaagcacatagccaactttgattttgctgttgggtaatgagagatatgcactttgatttgagtcctgtagctaacactcaaagacgcatttgtaagcaacaccaaaagctgaacttgtttgtccttcatttataaaatattttgagtgctttgcacggacatggagaatttaagtcaatttcacgaggcaggtaaacaaaaggtgtcgatttcttcttgattttga

SEQ ID NO: 22517 - DNA, 756 bp, Glycine max
  Intron number 1 from transcript Glyma06g01940.1 (locus Gly ma06g01940) derived from phytozome v7.0 (chr-ID Gm06; pos 1228178 to 1228933 reverse strand)
gcacaaggccgtaactacccaacaggacctcgcaggttaatttccattgtttcttttataacccaacattataaggttctgattatgacaataaacataattcattctatgattcaactgactggacaaattaacaacatatacttttcttcatttaaaatagcattacatgacagtttaatctgccataatttccagaaattattacataattccggatcaggtgatcataatttcgatcaattttcagtgatacattattgagttttttttttttcaatttatgaggaagagttatttagacttgattatgtgtcacatgaaaccaacaaggtccaacaatgttggtctatgattgagttccttaagcatactaataagagtttgattccctgatggtgcatatgaaagtgacattgttgggagacacaaaacttatttcggtagggatctctacgcctcaaagggatagacttttggctatgggataccatgcttccaaaaaaaaaaaggattatgtgtcacatgaagatcgactgttacgataatagttcgggaccatgttataatttttttatgcataagattatcaggaagtttcttaaatcgtacaagttctgtcagatttggatatgtaggtcgaataagtgggattgcttgctcaatttgatggtggagaaacaaagtgagtgttttatttgttgttggtattttgtgtcagggctgaggctgggtaatttgtactgtgatccgttg

SEQ ID NO: 22518 - DNA, 689 bp, Glycine max
  Intron number 2 from transcript Glyma08g05450.1 (locus Gly ma08g05450) derived from phytozome v7.0 (chr-ID Gm08; pos 3910325 to 3911013 reverse strand)
gtaacaatttgtctcaaaactcaggtgtcaatcatgtataattaattataaatgtaaaaaagtcgtatgttccaattgagaagtatgagcatgtgccaggggtgtgagaaggattcactgagagtattagttagtatattttgtttctagttaatggtagtagaattcatttttgttttctttgctttagttacatttcacttccttgggatgaacttacccatgtagtacttacaattgtcccaatcatttttgctgtatcattggatccctcactcttctagcacaaattttatcacgaaaaaggcatcaacaatctgtttagtcatgaatcatgaaggggattgcaccgtcatgtttggatagctagacttgtggtattctgtcaagctgtcgcaacatggaccatatgacagcaaaccgtagaagctgccataaattcttaagtttccttcctcttaccaaacccctatgctgcaaaacatcgatggaagatcagattggaaacgtagccaatagaaagaagaccaaacaagagaagtaaaagaaaaagtgatgaataggtgttgcatatttatgaaaagagaaaccaaaagtacactccatttctggctgtgtagaaatgtttttcctttgattaaactttgttggcagttggcagactatcttagattacctacacagggcag

SEQ ID NO: 22519 - DNA, 700 bp, Glycine max
  Intron number 2 from transcript Glyma05g24470.1 (locus Gly ma05g24470) derived from phytozome v7.0 (chr-ID Gm05; pos 30651401 to 30652100)
gtgcggctactgtgaaaaggatactggaaagtcaagtaagttactgaagtttggatttgacttggcttacaatctaaactttatagatggttccattattttatgagtttaatggttttcatgcactaaccgtgtaaaactttcattcaattacaaatcattctttatatgacttttaagataattattatgatggtttatgattagatgtcagtgtaaaactatttgacagttgacactgttagcgcatagtcttttttctcttatttgatttgtatgattattggtgtaaagtggacactcatgagcattttatgtcataagtctgtgtatgttgttggagacgattaacatcaaggtggaagaatcatgcttaggtttcaaagcaatggtagtttggtgtctgataattctaaatttgaacttgctttttattacacttgtttataagaaaaaaagtctggtagttagtttgtatgaaagaataaaactggcattctacttggttgttggctgcataaaaaaatataaacaaagaaaaacattaaggtgcataacaactgtgttgaattcttcaaagggaagagcctatatatataatatttttctttttctgtaatctaaatcatgattctttactttttatgcaaatggtcgttggacagcctcaagtgtcatctgctagtgtaaatttaacaac

SEQ ID NO: 22520 - DNA, 837 bp, Glycine max
  Intron number 2 from transcript Glyma08g08990.1 (locus Gly ma08g08990) derived from phytozome v7.0 (chr-ID Gm08; pos 6394057 to 6394893)
ttggttttcaggtcgtatatctcttctatttgttctagtaaaaattatgtatactttagcatgcacattatatacatatgtcaagaggtatagtagcatgagtgaagctaattaatcttgacccttttaccttatgtgaatagtcaagattggttttactcacatcaaattttgaccataagattgatttgatattactcatctcatctctcacgttaccacttagcagttaattcatctcctataaaatttactatcacttataaaaagttgttaaaagtatgagtttgttaatactcacatctagtgtcaatggatactgacataacattcattatgctgaaccgttgattactatgttgttagaaacttaaaaagtaggagtagtggtaatctacgtaagtagactctagtctagagtataggatgtttcttgaaagttacatcatgtcatcattaagttttgatctttgttttacaacataatcataacttcctttaactttagtagtggagtgtacaaaacttttcctgaggatctattttcttttcgaccacaggttgttaacttgttttgattaaccacaatatcatgattatcatttgaacttaactaagtaggagttattataaatttaaagtagcattgaattttctgttctttggaaggctgtatgtacctgacttactactgcctttctaccttattgttgccagcgctttttcttatgaatttctcccccttttagaccacaggttttatatcttttgatgcagtatatatgattttttgcctttctactttcactgtgcacaatctaacatttcatctaacag

SEQ ID NO: 22521 - DNA, 751 bp, Glycine max
  Intron number 1 from transcript Glyma07g39460.1 (locus Gly ma07g39460) derived from phytozome v7.0 (chr-ID Gm07; pos 43935612 to 43936362)
tactttcacgtctctttcatcctaacatagtgcaggtaattaagctcttacaccctacagaactcaactgtgagtctgtgaacatacacataccttcttgtccccatggtttttgtttgttttgctttatagctttttgtctgtgtcggttttggaattgaagcaaagcagtgtttgaactgttttgacttcaaaattctactacaaacataacttaccatggaccctgacaacatgttttagggacgtgttagataatcatgtcctttagttaggcgtatgatgttgagagaaagatgaatcccttaaatgaatctccgtgtcataatagattagtctttgacactcagccgagatataaataaatacccacaggccactgccacttaattaacactttactggaaacaaaatgaaaaaagaaaagagatgagtgttttcatgaatgataggtaggcagggaggaacatctgaaatgttaattagtaaattaccttaataacaaaacaccaacttgctctaaaaaaatatttccttacttttgactttttgtcgtgtatttttacgggatgcaacatgtatagtatgatttatatttatatgtcgtggttatactcgtcaattgcatttagcatttattatgttgaactgcaactgcaggggagtgtgtaattatccatataataatatgaaagggtgactaattaaggtgtgatgtttaaatgaccgttaatttacagtttattgcagc

SEQ ID NO: 22522 - DNA, 694 bp, Glycine max
  Intron number 1 from transcript Glyma06g18080.1 (locus Gly ma06g18080) derived from phytozome v7.0 (chr-ID Gm06; pos 14399699 to 14400392 reverse strand)
ctaacaaggataggttggaagaggagtcttataaggttttgattttacatcacattaatgctgaactttctgctgctttggattggattgagaaaacattttcttatttttttatccgacttttcttttaattattaggaaaaatgttggatttggctcctttaaagtgagggcgagcttcagaagataaagtgcaataattaacattacttagaaaatcatggtcgtgattctaattaactttagagcttatatatgtgtgtgtgtgcgtgtgtgtataccaataccaacatgatgtaatatggttgagagataatcatgtctcttaagtatgtagcaggtttcaatctctaggtctgtgtatggaagtgcatctcttaagagaagtcaacttcataatagatttcagtatctcaagagattagtatctgacttagttagagaatacacttagcataattctccgctattgtgaatctctaaattgcacttcctcattttagaagagctaaatccaaacaggttatcttgtaaggaaacattttttgtaattaaaaatagaaactagaaagtgttttctcaaaataatgaattcttaagttttggctttgtttcttcttttgaatgtggttatgttgatgtcaatgtggttgtgacagcaagaccaagattattaccccggtagaaggaaaag

SEQ ID NO: 22523 - DNA, 1013 bp, Glycine max
  Intron number 1 from transcript Glyma08g16560.1 (locus Gly ma08g16560) derived from phytozome v7.0 (chr-ID Gm08; pos 12123287 to 12124299 reverse strand)
tctctccgctctcctcccgcttgtcccaatatgtactccctccagtctcaatttcctatgctttgtgaaatatgtctttttttcttcttataataaaaagtgctgttttttttttttttaaattttgggcgtttgacatgatgagtcttttataggttaagaagtgttttggtttttttttttttatgcattttttagactttataggttgtgaaagaagataagaagattgcttagttttctaataaatgttttaaaatcatacctaaaatgattttctaattggttgtaacaggatacatatctttgcaatgacattgcatggagattaaattcttttttgtattcttgtgttttttgacattaagtaataatgtcatgagtttgtgttccaaaaagtgtaaaccttctttttagttctcactttaaaaagaatcattcactttcgtagaaaaggaagtgaaaaaaagactaacatgaatggtgttctctaaatcaggaactaaagtgaagtgctaaaatgattgatgcatacaatatcagggagtaaagtgaggatttatgatgagatccttgagtccaataattccagggataaggaaatattacagtttcagcaggtgaactgtgaaactaaggggttaaaagtatattctagaagggaaaaagggtggccatgatggttgagggagagaggaatctgttagagagggagaggaggagtagagagagagagagggtggagaggaaattagtaattgagaattcggcttaggcttgggcaaggaaacagagggttccttgattgttttctgctaatttccttttaggtttctgatactgagattaatacactgtttttctcttcattctgaatattgtagattattgttattactgcttgattgctgtttctataagtttacttgtttggcttttggatagaatccttgagataatggtttccgaatgctgattttgactttcagattgtacggaggaccattgaaccg

SEQ ID NO: 22524 - DNA, 756 bp, Glycine max
  Intron number 1 from transcript Glyma06g28090.1 (locus Gly ma06g28090) derived from phytozome v7.0 (chr-ID Gm06; pos 26450566 to 26451321)
accttcctggtgttgcaccggaggatttccacaaggtcattccctttttctttcaaaatgtggttgtgtcattgttgcatttttcatgtcatgttcatcctttctttgaatttcgagtcagatcaataattttgtcttcttgattttctggtatgtccttccttccatcctttctttctttctttggatttgttggtttgagatataagatccttactctggtttacaatttgggtaatgattgtaattattttggtttgatgccaaattctaattgggtttgtgaaatccgagcattatgatattctaggtatgaaattcttgctaatatgaacttaacgtgttccagtggcaatcttttatacttagatttaccaagggactaaagaatctaaattttgcagttcatgtgatggtattttgattagtgttaaaggtgatgagatagtgtgtgcatgaatatttcaaccgcatttctgatttatcacgaaggagggaaatataggaatttagtcatgtgttttttttttcatacctggtggataaggctatcgttgatgtattttccttttcaaaactgttttacacattttattttccaaagtcatgttgacataaatgacacttccacaatttattaattattgtttgattgatctagaatagcttttttcttaaatttacattaactgtcttatcttatgttgttcattggtgacagggggatctgttgagggtgaaagtgaacaaactatc

SEQ ID NO: 22525 - DNA, 640 bp, Glycine max
  Intron number 2 from transcript Glyma05g27080.1 (locus Gly ma05g27080) derived from phytozome v7.0 (chr-ID Gm05; pos 32973450 to 32974089)
gtttggcactgcaaataggagtactcttggccttggtgagattcgtgtacatagaaattcagtttttttgttacccttccagcaaacaagtaacctaagctcctaaaagatcctagttaaatagtaaccaatcaatagatagcttttattgaaaattatgataagagtgtattggtggtgactttaaattacacttttctaagaacaaaggggtttggttcagttgagtaatgtgcgtatgttattataaatttccttaatacttgtctttgattttatgggtaaaaaaaaaacttacacttctaaaaaggatcatgctaattaatgtcttaaagaatcgataagtagaaagtcttaagttgagattgtattggaaattgcagtgaaatgtactgttacacttttcaatgaagtaaaaaataaaaaaacacttttgattctttaatcagtatcattgaatttgattagcattatgctttcaaaaaacaactttataaagtttccttaaacaggtatctttgagcacaggttacagtggttggcattattcttcattgtttttgtttttttttacatacaaaagttgagtgtggctatttgaacaggctgagcagccagtattggctgtgactggagagaa

SEQ ID NO: 22526 - DNA, 734 bp, Glycine max
  Intron number 1 from transcript Glyma07g35950.2 (locus Gly ma07g35950) derived from phytozome v7.0 (chr-ID Gm07; pos 41336833 to 41337566 reverse strand)
aagtacaagtaagttgatcatattcttaacccaaatatgaattatccttcaattttcaaagctttctctttttgaaatccaaacggttgtgtgtgtttatgatacaagaatatagaagaaaccgaattcccccttttctgtaatttttcattttaaagccgaggaatgtatgctgtagtagcatgtctagttgtctttaaatgggtatgtggaagtttgagtgatctttgtgagtattttttttcagtttctgaattttcataaactgtcgcagacagcgtccgatgctcgatcaaatagtgtatttttcaaattcagtgactttgttcggatttgttcaatttagccctagttctgatgcaaaacgcggtttcagaattcaatatacacctttctttttttggaaaaataaaataaaattgtttaatttgtaaagattttatactcctaattaatacgaaataatcttagatatggtttttaaaatgatttttacgaaaattaacaactttactatacatgtttgtatgattagatgtctgagtaaaaaaactttatactggcgatgcattataattaaatttaaataaaattgtttatctgatttgggatagctcctttgtttttactatgggctagaaaaatatttagctgtttttctgttggcaggttatcagaattgttggttctgtggtagttatctgtgtactttggtgacactagttttgtccaca

SEQ ID NO: 22527 - DNA, 586 bp, Glycine max
  Intron number 1 from transcript Glyma06g15690.1 (locus Gly ma06g15690) derived from phytozome v7.0 (chr-ID Gm06; pos 12354501 to 12355086)
agaggaaaaggtaagttatactctctttctgtcccttagattcttgagacagaacatcattattatatgccttcaaaaatcaaatgcatagttaattgttgcaattgtctttgtttcaccgagaaggtttttaaaaccggtctgcgattgtgaattcggttgcaatgtcaaggtttttgggttctttgcaaccacattattaccacaattatggccacatcaaccatattcgtttgtaatttcccgcaaggtcaaggatcttgaccaaaccgcaaccataatttaaaaccttgttcacaaacaatgacttgtttacagtttcatatatttctggaaattttgatgactgttgaagactccaaaagacaataaacagaaatggagactcgaggaacaaagaaaatgacacttttctttcatgcttaatcatactacatactcattgatgatcatgaaagttagaatgtcatctttacaatgtaatcattgcatgtactactactatcatgtttttgtcattatatttttcttatcatgaagttgacactaaatgaatcggattaattggaaacagagttggtttaca

SEQ ID NO: 22528 - DNA, 459 bp, Glycine max
  Intron number 1 from transcript Glyma05g28870.1 (locus Gly ma05g28870) derived from phytozome v7.0 (chr-ID Gm05; pos 34601126 to 34601584 reverse strand)
acacaagctcttacagcggttttaagaaatatcaggtgcacactccgcgcttctcttcctttctttctaaacccctttatgagggttaggttattatgcatttttttgtactaaaagaggaaatcacgcttctctatcttctccattttaagaaaaatatctataaacggcaaatcttttagtatttatttttgttttaactgggccttgaggtgtacaatgtactacctacttggaaaggttgttgaatatggcactgttcttactagatttgacttttgtgaacatcaattttatgtaagagtagatattgatcattaatgtttcatccaactattggacttcgtttaattatctgtctgtattctgttggtcatttaaattgctcaaaatgtgatttcgtgtttattgctcgagttttcagctaaggctttgctggacagcaacattgggctgaac

SEQ ID NO: 22529 - DNA, 1061 bp, Glycine max
  Intron number 1 from transcript Glyma07g19770.1 (locus Gly ma07g19770) derived from phytozome v7.0 (chr-ID Gm07; pos 20057620 to 20058680 reverse strand)
caacttgttgactgctatagctggagcttcgcagggtaagaccaagtcttgttcatttgttttttagtttaatagagttctattatagaaatatttttctattgtgaaatacaagaaaattggattctaaataattgtttttttataatgttttttttttttgctttaaataagttaattctagttcaattcaattggaataataatgataacatcacgtattaaaggagtatttatttcatgaatagttagatttttatcttgaagctgtgagaagtaattagggtaaactgcttaattttcagtcaaaactaatctttgtttctctaatttaaaaacactgattttggtcttatttactatgatgggtggatttctgccctcaccctacgatgtttttttcttttgtttggttggatagaaaatgaaaaaaaaaatgattttataagacaaaaatttaaactttttttccctttaattttctcttcaatttaaatttcaaaattttctttcctccctaccaaacataggggaagtttcataaagaggatctgaatttaatcaaattgatgatacgaaaaccaaatgattgtttgaggcatatggactaaagtcaattttgattgaaaattgagggacttaaaacacagtttactcaaataaataattaatttttcgaattaaaacctgattaatctaaaacgtgctgaatagttgtttcatagggttttggagtgttaattatgaataaaacagttgttgtttttttttctttttatgttagttaagaaaacatgtttttttttccagaataaactgatgtgaaaaattagattaaataattaattttaagtttttgaaagaacttgtgcaaaaaagaagcaattaattgtagaaataatgacttgtttatcaggaaaataagccaaaaccatcatacccttgttaattatggtttttcctttctagtgtaaaacaagcatgcactaagtttgtttgtgttgggatgattattgtcacgtgtaggaaaatttgaggaaaaaaggtcacaagtttcggat

SEQ ID NO: 22530 - DNA, 715 bp, Glycine max
  Intron number 1 from transcript Glyma07g13840.1 (locus Gly ma07g13840) derived from phytozome v7.0 (chr-ID Gm07; pos 12991115 to 12991829 reverse strand)
ctctgggaaaactttcagaattggtgacaatttgggtaagtctcttcatgtttcttgcctttcagaaactagtaaaactttttttaaaaaagaaaattttagcatatacaagaactcaagtagcaaattcaatttgaaagtcaaattattctatgttcaatcatgataaggttgtagtgtatgatgctctctgatgtagtttcacacgattttatttttaagctcagttttataatgaaaaaattagttcaatttattcttttacaagttgaattatgtgtttaaggttttaggctgtggtttcgttgtcttgatattgtcagaaattacagataaatgcaccacctgatacggccacagaggtcctaaaaccttgacgttgcaagcaaaattgtgtttgcaaactgtattttaaaactgtgtatctaagttactatattatacaaattaatttctatatattctcattgacatagaacatacattaattgttgatctcattgttttttcttttttgttgatttttggtgtagaactcacatgttttggtaaagtgtgggggtaatttatatatatatatatatatatatatatatatatatatatatatatatatatatatatatatatataaagtgcagaattttattaattccttggagtaagctaaccaatttgtgatgtcttgtgtgggaaattaaaacagttttcaagt

SEQ ID NO: 22531 - DNA, 924 bp, Glycine max
  Intron number 3 from transcript Glyma06g12300.1 (locus Gly ma06g12300) derived from phytozome v7.0 (chr-ID Gm06; pos 9481712 to 9482635 reverse strand)
ggaaacaattggtgcaagaactggttggggagctggtaagtacacattgattttgaatgttgatgacaaactgtattgttttatatttagggaatttaaaaacaagtttaacagaatgagtattgtttgtaactttccaattttgtgatgttaaactttgaaacatactacttaaggttaaggcaattagttgttagtgactttactgtactgtcctttgtgcatcagtaccataagtttcgacaagttttttatgcttgtttaccagcattgggcctgtgtttttaggcagttatgaatatgctttcctgtgtctagttgtcattataagtttaacctctcattgtaaaaatagtccaagcttgttattttgtggagagctttctgcatgtcagagttttacaactgcagactatatcgttctgcaatatgtatagaaggtaaacaagattatgcagcattgtacagagggtttgtatttcttcatgtctatttagagaggcaaaatgatagatattaattcttcataaagaagtaaaaagaagacagttttgtcaaagaggattgtgatatcccttttctaaacttctgcaatataggcgcataaattagtatagtaagttagactgatcagaaagtgagagaacattatttgaatgagtaaacacgtatgtaacagaagaaactgtataattactggattttttttcattcatattatgtcattagcattagcaataacaattcaagtggcacatgcagctgaagagatgctgaattttattgtctaggtcactcactctttaaaaggagttgttacatttgaagaacatctagtattgtgttttatgcttatggaaaatgaagatagtaaatttttattttgcagtcatagttgcagaagcagttgctctgattgctgca

SEQ ID NO: 22532 - DNA, 742 bp, Glycine max
  Intron number 2 from transcript Glyma06g12300.1 (locus Gly ma06g12300) derived from phytozome v7.0 (chr-ID Gm06; pos 9482618 to 9483359 reverse strand)
ctagcatcatcagaattatacactatacttggagggtttgttagctctatcctatttcttgtgctcctaaccgtgagttttgaatccacctcttgacttctttctcagctttgaagttttatatgctgataatattatgttcttttctgagtaataagatcaatgatagaatagaaggaaggaaggaaaaaatatttgttatgacatcagaaaatgaagaatgactatcacttttcctttgtcattacagccgttttgatactagtgtttggttatttgtacttgtattatagtctataaacatatttgtataaaggtttgtctctagaaggcatcaaattgtgcactgcatgattctttgtaattctaatgagaagtgccatttctgtaaaatgaagccagacgattttcggaagacttagaaaatccctatttttatcactttgtagttgttggttaatgttcaaatatattgattccttggtcactcatttatacgatccttctaccttgagaaaagcaaagaatcttttgttcaaactagtgctagatggactgtggtgacttattttaacgagatatatgtgaattcttgtacttatctatgtagtcttcttttaattatcttttactcatataattcttccaagaattctataaaagctaaatctttcaaggtaatttaaggtatttacatgtgtctgcagttcattggaaatttgcaggaaacaattggtgcaag

SEQ ID NO: 22533 - DNA, 880 bp, Glycine max
  Intron number 1 from transcript Glyma07g31740.1 (locus Gly ma07g31740) derived from phytozome v7.0 (chr-ID Gm07; pos 36705721 to 36706600 reverse strand)
ataaggttatttttaatttaatctttcttctttctttcttttgcttcaattccctcaaattctatgcttttcttcttgtgaacattccaatagaaacaactcattactcatctcatgttatgatgtggttgccgaatgccaactcatcatttgtgtttctatgactgttgatttgttctacccaattcaagttttaggattagtttggatgagcttctaatgagagctgtttaattgtacaagcttaagacttttctaaagttattatgttagtttctcttaaatttgtaagtgtttatagagaagtcagaaattatcttttgagaaagttaaggtgcatatggttaagagtaattaaatagtctgtgtagtgtgaagtgcttttaatctatcatcttatcataaattgagatgtaaggaaattttgttgattcttacaacaattaccatgaaagtcatatctaacataattcctgattggttaaccgcgtgagtatataggaattaaactctggctatcggttaatcttaacttataccagaagtttgattcattttattttattttatttttttccttttaagtgtttgttcaggagtttatccaaattgggacttatccaatttctagtctatgattacaaaatagtatttgggtcatgagatgaatatgctgcttgtttaataagacaaagaaaaacagaaaataatgaaaatttgcgtttgaactgggagcgtgtcagtgaatctatgtttttgcataatgttttaagggaaattaattgtcaattcatttttttttatgttgatattgcttaatttgagaaaatgttgatgttgtgcaggagcaagcaaaaagttcagaattcaaaggcttcac

SEQ ID NO: 22534 - DNA, 604 bp, Glycine max
  Intron number 2 from transcript Glyma05g32830.1 (locus Gly ma05g32830) derived from phytozome v7.0 (chr-ID Gm05; pos 37638317 to 37638920 reverse strand)
caaacctcaaggttcttttaatgtttcatgagacatactatcatagtttttttaaagttactaagtaattaattgataatttttgttagtaaagagttgaatttaccatctttttctctcccttctcatcttaccaccaaagtgggggttaatcatgacatcgggttttgtttctttataaatacactcttatctttgtttcgggttgatattctaatttcaaaaaatttgactttgttcttcttatcttttgtattaacagtgttagttttaaaatgtgccaaaggccctatctgatgtgagatctcccaaattttcacgtgataaagcaacagaattttgatctgatagagagacacttttaatttttaaagatcaacttaaaacattttaaattttagaactaaattttaaaaataaaataagatgagactaacaatatattttagcctttattttaataaattttgtatgcaagtttgttggtcattttaataaatttatgaatgaaattttggaggataaagttttatgaaatggatgtttgataaaattgtttacttaaacaggataaggcgtggttttggtttggcagggttttggc

SEQ ID NO: 22535 - DNA, 1015 bp, Glycine max
  Intron number 1 from transcript Glyma06g28650.1 (locus Gly ma06g28650) derived from phytozome v7.0 (chr-ID Gm06; pos 27181066 to 27182080)
ttccaatataacattcagagaaggcgacatactaggtgagtaccagtccataccatcatcatacaaaacaacctttttttcatccattagaattgaacacgatataagatgatttacatcactcaccctgctcaattaattgaactaaactccttgtatcatacaaacaaccttaattccttctctgggtcctttagttaacatgaaaagccaaaaaattgattgtatctcatttttttttatttatttatgtaacattttgatcaatgttacatgaatgaatgtgaaaacaaaatagggagaatttatacaaaacttattttaaatttatagaatttatttttttagttatattttttctatccaagaaacttaagaaaattttattaaataattattttattaaaatgtgttattaattaagttgtttacctaaacaattactaactgaattaaaattagttatgcaatgtgcgtaaaaattattataaacgtctcttgacataagaataagaattactctgacattcacatgaatcattttaaaataaataaattgtttcatttttattttacgagcatttaataattaaaaccacatgcaatattccatgtaattattttcattttctttgcaaacatcgattttaaaagtatttcctaaccaatatgattagagatgattaatagataattttatctttaaatatatagtcatgagttcaatctctatcttgtaaatatgaaaaaatatatattaaaaagagattaattcgttaaatgaatttcaattcctaaaaaataatcaaagtatttaactacagatgcagcacaaaaacatatatatatatatatatatatatatatatatatatatatccctaaagtcaaagggaaactttgtctcattctagtattctacgtgtacgcgtagcattattgtacgtgtttgtttatgtgatgatctttgctatttgcagtcttcacattcaccgcaagccacaccgtggccgaa

SEQ ID NO: 22536 - DNA, 687 bp, Glycine max
  Intron number 2 from transcript Glyma05g31390.1 (locus Gly ma05g31390) derived from phytozome v7.0 (chr-ID Gm05; pos 36543994 to 36544680)
accgagcttcaccgtactttcatctctttcttcttctaacataacatgttgctcaacttgtaaactttgttttttcatctcattgttggactgttggttagtgtcactgacttactgacactgttgatcgtgtagggtagagaggcttggttgatttgagaaaaaaaaaggtttttctgtttttacaaatgattataaaatgtcacatttttcacaaccatttgtactgaaacataaagctaaggatttagacagacacagagataacagtgtttttgtgttttcttatacaagtaagaaaaatgaaggcaatatgacattttgaaattagctgtgaaaataagaaatataaaagtaatgaggtgaatgtgagatactgctgaaaaaaacctatttgaaataatctaacaaacaacagtttccatttatttgcaattgccggtgaagtgcattaaagtctttaaccaataacctttgcttcctccctttatttgattgttttccatacccaacttactctcggataaacatctttggggttgaaattatatatatatatatatatatatatatatatatattttctttccagggacttatatttctatgtcaaacatgctaaccacatagcgtttccccaagtacacatttctaaactgcttacttttttgtgcttaaaaggttcaa

SEQ ID NO: 22537 - DNA, 641 bp, Glycine max
  Intron number 3 from transcript Glyma06g30040.1 (locus Gly ma06g30040) derived from phytozome v7.0 (chr-ID Gm06; pos 28915150 to 28915790 reverse strand)
gggtaatttgacacctgagtatttagagaaggtatactctttcctttgataattctatgagatctaatggttgaaagtattctatattacaatgataggggaaaaatacacaagagaagggagcatggtttagtatgtgagatataaatgtagtattctatatttggattttatatcactattatgctactatagtttgtgttatttacatcaaaagtgaaaaagatttattgtgataattgaatccaaaatatcataaataagggtatgtgtaacatttctaaatcagttagggatgtcaaaattgatacattgaaaatggaatatattgtaatccaaaattttccaaaaggctagtcccatataacaaatatcaccattagatatcgagatctaattcatttttttaatttaatttgtatatgcttttcttttcactctcttatttgcttgatgattatattgtttgtagaccatgtaactcatggaattacccattcatccattgatttatgataattttaaaatgaatgtgaattgtgcttgataaatttgatttttgtttttgtaaattttgaactatctataagtgagactctttttaatgtgcttctagagaggcttcattgaagcacaatttg

SEQ ID NO: 22538 - DNA, 324 bp, Glycine max
  Intron number 2 from transcript Glyma06g30040.1 (locus Gly ma06g30040) derived from phytozome v7.0 (chr-ID Gm06; pos 28915813 to 28916136 reverse strand)
ggagcaggttctagttcctacaaggtatatctcatcaaataaatttcacaagtatgtattaacatgtatactaagtagtgtttcaaaattgacatcattacctttaggattttaccatattctagttttcaacaatggatatgtgtttcttccacattcaaagttcaaactctttttttttttcggagttcaaagttcttatagcttacattagtgtgataaaatttgttcttatggtctcattagaggtttgtctcattttaaataaggttatgtcatttgttttcagtgtaagagcaatagttgctctaaatcttcatagtt

SEQ ID NO: 22539 - DNA, 302 bp, Glycine max
  Intron number 2 from transcript Glyma05g27800.1 (locus Gly ma05g27800) derived from phytozome v7.0 (chr-ID Gm05; pos 33668674 to 33668975)
ctctttttgccactgccttggtttttgcttgtattgtatgacttccctctttagttcttcaaataaatcagtagtgaaaatctcttaaaggacttaatattttggttactaattactatgacctgtgatagacattattctagctccatatatgcaccggtaggaatagacattatgttactgttaagaaagcatttgatttcccaaaaacaattaaaaatgcacctagtttagacaatcagaaactaaattaatgctggttatgtaaaataaagttctgaaaaagagattggtggcaggtg

SEQ ID NO: 22540 - DNA, 945 bp, Glycine max
  Intron number 1 from transcript Glyma07g12360.1 (locus Gly ma07g12360) derived from phytozome v7.0 (chr-ID Gm07; pos 10653942 to 10654886 reverse strand)
aaaatcagagaccttcccttctaccaacgcagcaggtcccatttttccaatttctcattctcgtttcttaattcttaattttatttaatttgaccttcatatagcttcatatattttcaatttgtgttttcagtttcattttgagtttatttatttgtctcactgattgaacagaaaatagataaaaaaaacaattggtttaattttgatgtggtccgtgaggagttagttattttattattcatttgttaatgtaaattgaaagtggcgtttgtttttgtagcaccatgggatgaaaatctgaactgggttgttgatgatgttatgtcctgaactacggagtattgcccccgtttggataaacaacttaattaaggtcctaccaataagtgattatttatgtataacttgtttttataatggagcaaaattatagggttaaactgtttttgtataagttataagctgttttcataagttatcctggaaagcttacttaaaacagcttatggacatttcataagctactttcattagttcttccaaactcgtacacaaatgtttatgtcagaagataagttcaaataattcgtacataacctcttccaaatggggcattagtatatttcctgtactgaaaacgatattgaaagggtacctattggttgacctcctaatgctatactattggtgtagtacgtactgttttcaaagttgttcagtttatacaattgtggaagatttgggttggttttgtagatttaattaaagcttacattggtggtcagaatttcattattttgattaatatattggtagttaacaatcgcatggtttattattaattttagctggttttacagcacaaaaatatgttgagaggttacatgttggttttggttgatctctgaaagtagaattattgtgtgtggctttgttgtaggc

SEQ ID NO: 22541 - DNA, 435 bp, Glycine max
  Intron number 1 from transcript Glyma05g37930.1 (locus Gly ma05g37930) derived from phytozome v7.0 (chr-ID Gm05; pos 41405449 to 41405883)
agccaccaagcagaactgcttcaggttgccaactagtaagtttcggattctcttaaaaagcagtattttcttatctgttgtaatttgacttcggattaaccttctgccagttgactttacaaacttgggatactccacatgtcataaacattcaacgttgtaccactgtttttctttcatgtttctagtaatttaccccacactttatttgcccccatgcaattttaaatttgagatcattgctactgaggttaggtaatctttattttattttcgtacaaattcagactatagaactaacttaccttatgcctttgtctttgttgttgttgtatattgattggtaatcatgggacacaatactaaaattggttgtttaatagttagctcactttcatagtgaaagaagaaaattggtggattggaactaaacat

SEQ ID NO: 22542 - DNA, 897 bp, Glycine max
  Intron number 1 from transcript Glyma08g18750.1 (locus Gly ma08g18750) derived from phytozome v7.0 (chr-ID Gm08; pos 14106812 to 14107708)
cacacacttgcatagttttggaaaccaaggtctggtttttgtttctcatcagtcatatatatatagtttgtttccaactttccatgctcaatatgtcacaactttatgtggtctttataatcatgcttctttgtttaagacagactatagcagaaacgaagattgaatagtagtgtttgtgttgtgtgtatgccaatgatttcaatcttggtggtttgttaaactcactttgtgtatgagtttcatgctcactattatttgctgaaccaagttttgtgtttggatagcttaaagcatcaatcttctttgcatctttttttttttttgttgttactcctttttatgtatatatacatgttgttgatcctttttatatatcatgcttttgtagactttttagaaggcttcagctatgtgatgatggggggaatactatgttgaaatattagaggaaaaccacagcatgtagctttgattttttattttttttttggcagaggttttcattatgtatcttatttatatcttatactgccattatttttgcttttaagttttaatttccatttgaagttcaatattgtagcatatccaaagtctttatttttttttcctctttaatccaaaaatctgggaaattttaggaaattttttccaagttccaattatttatttatttgaaaattctcacagctgaaatctgccacaagatttactatttagattattccgaagattttgggttggcatagtagttttcttcctatatcaacccatactagtttcttggaatatcttaaaccttgtagctacagattatgtgaaagaacataattgaagatataagtttttctttatgtagaatttttgaagggtagcatcaacaagaagttctgg

SEQ ID NO: 22543 - DNA, 916 bp, Glycine max
  Intron number 1 from transcript Glyma06g47670.1 (locus Gly ma06g47670) derived from phytozome v7.0 (chr-ID Gm06; pos 50069731 to 50070646)
acaccaccgttactcctctgggtgttcctcagcaggttttgttcttcgttctgctccttctcttttattgaaactgcgtggcttttcatctgggtcactctgcttcatgctcaaaatgataaaaatgagttcttttctcgaaagggttcttttgtgatgctcctgttttcttttgttctctttctctctctcaagttcttttaatttccgtgtctctttagttctttttttccttcttgtgtgtgtgttggtatcttaaatgttaagaatgcatgtgaaactagtatttggaatttggctgctgctaaggtataaaatggatcaaatgtttgatcattttttttttcgttttgattttactcgtggttttctttttcttgcaaaagtcccttatttgaaattttatagattaaaaagctataacttgttcaagtattttctttatgagatgattgaagctggtggaggggttgacgtgtggtccttgcgcgattttaattgagattatttttcacacggtttttgaagccccctaccccaattttacttttctgttattttgtcatcttgcagtcaaatgtatccaaaagttcttcaatttttcagtttatttaaagttaattttccgtaattttattttgggtataatgtgtttcgaggtctgtcaattttcgttcaaaatttgttttagttcctgtactataaaaacgatgatttttattttttatatttggtgaatttcgttccttgccataactctgccagtgaggctggaggttgatgaggacgaaattcaccaaatttcgaaggtacaaggacctaaagtatcatatgatttagataagaatttggctgatacgtgttggaaaatccgattgcaggttatagctatcaacaagaagtttccaggacctgt

SEQ ID NO: 22544 - DNA, 722 bp, Glycine max
  Intron number 1 from transcript Glyma08g04620.2 (locus Gly ma08g04620) derived from phytozome v7.0 (chr-ID Gm08; pos 3293025 to 3293746)
ttaaccaaagcgcttttccaggttcttaagtttttttttttctttttcgcttcgctaaatgctacgaatttcgcttattcaagttctgaacattgacggccatatgcgcgtgcttgatacttaatagttactgtcgtgtagttattttccggtgattagatttagaggagctattttccctaatgctttgtcgtgagattaaacctaaatcgattaattttcgtatttagttgtcgtctggtttaaagaaacagttctcactctttacccgtagttagtgtttcaattgttgatgcccttgacaatgtagttacccagtttgagtttgaggtgatggagatttatttctttgaatttgaacactttaagattcttttaaggggtcccggatgtttcatgcatgtgtatgagtgtatctttttcttggacttccctttaattatatttggaacaatcggattttgtatttgtatgtagtctagcttacttatactatagtttgtctcagcactatttctagtagtcttactaaaacatcactatctgcaactgtatgagaataaacttatttatttttcgtgaagtcccgaattctttaatgaatgcagtagtgtgtgttttaatttggtttttattgttcagtactgaggatcttcactcttcggccacattacactctttgaaattttgtccgttttcttttgtttaatcaggcacaaatt

SEQ ID NO: 22545 - DNA, 837 bp, Glycine max
  Intron number 3 from transcript Glyma08g19110.2 (locus Gly ma08g19110) derived from phytozome v7.0 (chr-ID Gm08; pos 14422073 to 14422909)
tggttttacttctacccttcgaggtatggtattttttttttttttttttgtggttgtccaatgttgcaaatgtcactgtatttggtttttatgaagttttatgcaatatagagagaagtgccaaatgggtgtttttgtaaaaataggatatccatatatctgtttttctcctcaacaaaacaaatgaaggatgttggaaaaggtgcgtgaatattgaggggattttgtagtcatttgattccttttcatgtgcaatgtttgcattattttctcctcaatctgccacttaataatctcctttattgatacttggaacattaataaatgagaatttgaaaatccttctatgttttgtggctggtctaattttcataaaattgcgtgcttcattggtttttcttcgtttcaatattttactcctcagaccatcccattttaacagaactgatagtaaggattcattataacgtcgttgcaatatccgttacctcttaatattactaattaaaatgttagagaacagtttgagactttgagtttctatatatctgtcttaaaactcaacttttcatcactagtagaattgctaactaaatgctatgttgttgctcatagttatacctttgaactgctagatacatgcacttaaaatacataaacatgaaatgtaccaaaagaaaagaacttaaatatgatgatggacattttcttcccttagtatgcttgttgttcacttagcaatcattatgcattttcgatactattatttgatttacatgacccttggtgggttaagtgacagatcaagaagatagcagctgaaggagttcttattac

SEQ ID NO: 22546 - DNA, 528 bp, Glycine max
  Intron number 1 from transcript Glyma08g40950.1 (locus Gly ma08g40950) derived from phytozome v7.0 (chr-ID Gm08; pos 40893269 to 40893796 reverse strand)
acacaaatcaaaacatcgttgttgttttatttgaggtatttgtcaacttgaccctttattttttactcatttgggtatcctctaagatcctcaatttgtttagatcccccaccatttctgggctattcgttacattacagtacatgatcaaataaataggtttttttagtactttgttgggattggataaaaatacgattttgatcctatcccatgtacccctttgtgccccttttaagtatttttaattgcccattttctatctctcttatttcgtgtagttcttgctctttaattttagcattggattgttttctcttcgttttgttcttcctttgatcacagatggtaatagcaattttcttttccctttctcaattgaatacccttttggtgagggcttttggaaaatgaattttatacttattacggtgtaaaggtggatgaaagagaaggggggaagtggtggtttcccttttttttctacaaatcataaaagcttctaattataaagcttttggctttagc

SEQ ID NO: 22547 - DNA, 533 bp, Glycine max
  Intron number 2 from transcript Glyma08g24180.1 (locus Gly ma08g24180) derived from phytozome v7.0 (chr-ID Gm08; pos 18399523 to 18400055 reverse strand)
ctgcaggcctaaggttactgattttattattttaactcggttgtagacttaaattgatcatttttctttctgggaatgtgaacacataacttatttgttttaataacaataaaatgtttctttcataaatgttgtgtgccttgtgtctgacgtttatgaagctttaattgttatataatgaataaaatatttccgtgtttcccttttctctctcacacaatgtgcaggaacacccaggtacagacacaaatgcagagtcaaaccatcctctgatgcactacagttcagtagtaacttattgtgtctaaggaaaaatagaaatttacttgatagtttttcacacccaagtatttttttttctgttaaataataatagtgtcaggatgttacatccatttcttgttctgtttttccagtgtgtaatcttcattttgataggttctaattcagtaactgctatatgcatatgaaaatagaatggttttgaaagtggtctataaactacatagttgtttctccattgatgttgcaga

SEQ ID NO: 22548 - DNA, 831 bp, Glycine max
  Intron number 1 from transcript Glyma06g37760.1 (locus Gly ma06g37760) derived from phytozome v7.0 (chr-ID Gm06; pos 40282340 to 40283170)
gcaactcccagaaataacactaaataacttgataagtgcttatatagctgggtaggtcatcccttcatgaattggtttttaaggggatattttggatgtctttgctgcactatagaatttaataacagaaatacggggttgagtaagttacagctacgcacaacgatcttacagttttttccttttcttctttttgattttttttaattaagtatgtaaataacacatttggtcaaggaacgtaacggtacatcatacatagtgatttagctttgcggatggcctccttttgggggaagcctctattaatcatatcatatggatactatcatgaagtgccttgatggcttaattaagcctctggccagaaggtttggagggcgattcaaagtacttgggagtggattatgaaaggtggtagatgggcaattgcatattaaatgagtgtcaatttaggtggataggtgtcatccaagattattgaatagtatgttgatgagagtggcctacggaatttatctaaatcacatgctgcatataccacccagcctcattaaatttagatgggtaccccctccaattgggtgagtgaaatgcaacacagatgggagtaagtcttctattagacacacacttaaaatgtgtaaaacaactagttcagcaccttttaatttgcagtgtcttatcaaggaagtctttcttgtttttgggccattggcccccttaataccaaaaaaatagtcatatgtatgtatatatggtggcactggcaggagcatgatgaatgtaccggtggatgaggctcaattcctatctattcttctaaaaatc

SEQ ID NO: 22549 - DNA, 919 bp, Glycine max
  Intron number 1 from transcript Glyma08g21450.1 (locus Gly ma08g21450) derived from phytozome v7.0 (chr-ID Gm08; pos 16290006 to 16290924)
ctcatcacttacgttgataagctcccaacagggtattagtgcattgcattcttttcttgatccaatctacctttaatttaagatcttattattgaatgtctttctccttaatagatcaatctaattatctaaatccatttccatattacatttcttcttttagaaaaatttgaatgttgttgagatcttagatttgttactatgaggattatatattattcctgctttttgattattgaaatgcaatgtctataaaaggaagttgtggcttgcatgttgcatatcggtcagtggtatccttaatgatatagacctttgtgttactaatataggttgctagaaagctaagaacatgccatcatggtgtgacatgattgacaaataagtagacaactttgtctcttaaacatgtaattaaaaagttaggtcgaggtatggattatcaaaaaaaaaatccgatggacaaggttagtttcttgaatggatctcagtattcaagatattagtctttgtctcttggcgggaggataacctggatttaaccaaaaggaagaaagttaagagcatgctggatccgacctttaatttgtagtatttgtgctgtttcacttttttggtgtaacactattgaaaaatgatgtggaattgcaaagtaacaatgtttatggtgattaaggagtaattggtttttcatagtcatatttcagatgcagtaatatcccacaaaaatcatattcatgtagtactcgtgaaagagaaccaagttagtgacatttcatacatcaactgctaaacttttctgtggtgaatgtgcttgtttgttttttttattcgtttaggaacattttgaaattttagggggccttgaataaatattatactattcggtggttcttatgcatcccttcccttttcagga

SEQ ID NO: 22550 - DNA, 507 bp, Glycine max
  Intron number 1 from transcript Glyma07g07740.1 (locus Gly ma07g07740) derived from phytozome v7.0 (chr-ID Gm07; pos 6426314 to 6426820)
ggtattttctgggcaccttcaaccactgaagaaaggtacacacacaaccacacccatcttggtgtttttgttttgtttttctagatattgctaccaacttatctcttttctctaagcttcacttcttcttggttaactcttgaatgccaattttggatagttgaaaaactaatatggactaataaacaagagaaggatatgaaggtttcatgtcgctatgtggatgaggaacatgtcactttcccactatgagcgcatgcatcaactgaatttaaattattccaacttagtcggtcatttcaaatactgagtcatatattcacaactgtataagtatttgaagaaaaaactatcatctataataatcatatataactcaaacatatcttatttgactcaaataaaattgtttacacaagatactttagtctcaaaccaaaacataggtcacttgacattgctacttaacataccatatgttattttgatgtgtgacagggtattgga

SEQ ID NO: 22551 - DNA, 454 bp, Glycine max
  Intron number 1 from transcript Glyma07g18200.1 (locus Gly ma07g18200) derived from phytozome v7.0 (chr-ID Gm07; pos 17967288 to 17967741 reverse strand)
aaatcttgctgtatgataagtccttagcttgttcaggaatcgaattaaacccttaaatttccttttagtctacgtgcaattcttttttctttatttttttttcaaagaagaaactattgtactaactcccttttcaaaattgtatgataattcttggcgtacagattttgtttttttttttttaagaaaccaaaaatattatgtacacgttaagtgtatttttaatttaaaactgagttggcgctcattgacagttctgatacttcctttgaattgttgtaaacattgacatggtagtttaaacaaactacatataattaaattaaggttgcggttttggataagaaaactttgacttagaaaaaggaaaacgtgtgtaactactatatatattctcagccccattgtattggtgtgtatttaatttgttgtgttttgtgtttaagagagaaag

SEQ ID NO: 22552 - DNA, 821 bp, Glycine max
  Intron number 2 from transcript Glyma08g11850.2 (locus Gly ma08g11850) derived from phytozome v7.0 (chr-ID Gm08; pos 8622294 to 8623114 reverse strand)
ctaaggagtctctagcttagttggttgaacctgtaagttctctaatacttgagtttgattcctatgagttcacaaaaaattgttgggatatgggctagttgtcccaccagttccttggttttaagcagtttctgcctaaatttaaagtcggaggtagccattgatcttgtcttgccgccaaggggaagtaatgttatagagttcactctccctggggttcattaatgacttagggtatgtttggataaacatgctgaaacatttctaaaagaagaaaaaatgaaatgatctttttcataagttaaaattagagaagctaatatgagagaattagtttaagcataagttaattttagtttatagtattttttctataatggcttagggtattttttttctataattgtttctatagaagtttatacaaataggtaatggtcagtgtttggtgcagaataacacctatgctaatagcttgagtttttgacatgctgacaaacgctcttgatcatatcaccgaatatgagttttttgtgtgtgcaatatggtctgagcatgggaggcttaggatgcttaatgagcttttcaatcatctgctcccttgtaaatgaacaaacaaattcccaaaactaccagttttccactaattagaggcatacactagttgagtttgtccatatgatcatacaaattaatatcatctgcaacctttttcccttgcatatccttcttcatttagtcttgacattttttctaaatgcagtcagagaaatactaacttgtagaaatcttttgcaatttgcagcttcctgctccggtcg

SEQ ID NO: 22553 - DNA, 533 bp, Glycine max
  Intron number 2 from transcript Glyma05g11410.1 (locus Gly ma05g11410) derived from phytozome v7.0 (chr-ID Gm05; pos 11656219 to 11656751 reverse strand)
gcatatcactactcttacatctgtgttggagaagggtattcatttaattcacattcttagtggttttctcttcctatttatttccttgcaccttctaattgtgatgtatgctgactttgcatactgaaatctgaaggggggttatgagttatcaattatgatgtaaactctgggttagtttgggatagtactgtttattgagatacataggaatctatgtgaagggggtaggactagtttttatgttcttgtgtgtgtgtgtgtgttaatggagtattctagctgagacctggggactaatccttaaagatttgagatatatctaacgggatgatttcttctgtcagatgttcttccatacagaggactaataccttaaagttttgaaagtttgaggttttaagttatttaatttatgtggcggttaatttactaaaatttaaaaattgagggtttggtatattttgattaacagagaatgattactttgttttgcagagttgcttggttgattggttgggccttgatactgg

SEQ ID NO: 22554 - DNA, 597 bp, Glycine max
  Intron number 1 from transcript Glyma05g11410.1 (locus Gly ma05g11410) derived from phytozome v7.0 (chr-ID Gm05; pos 11656889 to 11657485 reverse strand)
gcaattggtagttcaactttatttcttttttcttctcttctacctttatttttttttctggtgttttagttcatttttaatcacctttttcatctgagtatgtgtgtggaaaaggttttaaattacagtcatggtatatatttgatattgccggaaaatgatagataaatgtgaccacaattgtggttgcagagtccccggccgaaatcacggtcgcggcagttatttagatccttggatgtggatccgttcaagatttagtttcaacagtttgttttcacaataccaaattttctgtgtttactttctttttcttttatggtttttaattccggttatgagtactttttttcataagatttggctattggccactcactttactgtctgaatctcttcaatttttgagtcaaaattgaaaaaagaaaaaaatatatataaatgacccattgaactgaattaatgtgttcttatttcatttggtcacaaacatgcactaaaaaaatatctggtcataattttttttttctatttttaatattctaattttgtggtgatttgagtcaggtgttggtgcaacaattggtgctggtgtgt

SEQ ID NO: 22555 - DNA, 384 bp, Glycine max
  Intron number 2 from transcript Glyma05g36800.1 (locus Gly ma05g36800) derived from phytozome v7.0 (chr-ID Gm05; pos 40564450 to 40564833)
gcagctccatcatccacgacggggttatcagcaaagtaattaaattaagttcatatgttcaagctaaaacatgcaccattacatcgacgctccgtatgacttgttgaaatttcacacgcacgatacatatctttatctttttaacgcttacaatgactcttcttatggggatatatggtagtacgtatacatgttaaacaatattacaacatgttaatagcgtgtgaaatttcaataagaaactactggttgaatcaaattaatttgccctttactatatatagttaacattaatgtggcagaggcttaattatcaaacagaaaaatatatatcatgaatattatgcaggaagagtttcagcttggcttatttggaagcagcga

SEQ ID NO: 22556 - DNA, 488 bp, Glycine max
  Intron number 1 from transcript Glyma08g40860.1 (locus Gly ma08g40860) derived from phytozome v7.0 (chr-ID Gm08; pos 40712817 to 40713304)
ctactttgtggtggaattggagtaatcgatctggggtatctgctatgaatcccagctttgtgattgtgtgaagaaagttttaatgggtgtttggaaactctcgattcttcttttttcttgttttgggcttttaaaaggcttgaattagcgtatgcacactttgttgtttcagtttctgagtgaaatgaatcttttttttactcactggtgcttattaggttgttcagttttgattggtaatggaaaattctgaagtttgttcataaagtattagtggcgtgataattgttaagctctcagaatgtaaatttagctctattgtcttgtgtttgcgttctttgaaccttttgatgtattctctgatattttatcaaaggttttcttgtttactcactcactctccctttctatctcaattttttttatccgtgcacatgagctgattactattgtttgaattgtacttgattgggataaaggaggtgaag

SEQ ID NO: 22557 - DNA, 651 bp, Glycine max
  Intron number 2 from transcript Glyma08g36450.1 (locus Gly ma08g36450) derived from phytozome v7.0 (chr-ID Gm08; pos 34371655 to 34372305)
ttaaaattgattatatcgtataaatatgattttagcctatattttttaattttagatttagctctttatttatttatttatttattttacttttcaaattttttaattttagttttagatcccaccatcgttcatatgataatgctatcacttgtatttagatgtcctgttagtggatcacttgtatttagatgtcatagtggtcactttgagtgaaatacatttaatataattgtatacatattatgtggtcattaaattttctttgataattatgatataaaattactcattaaaagtagttataaattttcatcaaaattttgagtgcatataaggtggatattttcttcttaacatgatttatttcatacttaagaattaatcaggatcctaaaccacttgattaagagatataaatctttaccacgtatgattgttgattaatgtcgtcattaaataataataaaaatcattttcaatttttttaaaaattaaagctaataaaatataattttgaaggagtaaaggtaaaattggtgctagctaacaaacttatttattagttgtaggtatattattcattgaccatattagttgtacgatgaccatattatactactactctttgtgaatttaaggtgataggca

SEQ ID NO: 22558 - DNA, 621 bp, Glycine max
  Intron number 1 from transcript Glyma05g31830.1 (locus Gly ma05g31830) derived from phytozome v7.0 (chr-ID Gm05; pos 36870756 to 36871376)
cactctcttctcgtctcttttccaaatccaaattggtatctctcatgccaattccttctctgtctactttaattcttcatggcgttttttttccttttcacgttctcacttttgattttattgttgtaatctcgggatctgcattgctttcaatacatttcttttggataatttaaaatcaaaattactcgaaaaagagataatattcgttagatttcgagggttaacatttcgtttatccatttcttttggtcaattaggtttttctttcttcgcttattctattgtttggatttgtgatatggccacccgattaaaaaaaatgtcttggtgcttgttacttatctgtcatattttgttgaaatgagtgatatgaaactcgtgttttaatgatggttaatatgcataaatctggtttattaatttaaaagtgacgatgcttgtgatttatctcatgttgagttgcggaatggtgtgtgaaaatgaatgatatgaaactcacgtttccatggtcgttaatatgcataagttttgtttattaattagcaagtgatgatgttagtggtttatccacttttttttttgtcatgtgctcatttttcttcattttcttacagatct

SEQ ID NO: 22559 - DNA, 754 bp, Glycine max
  Intron number 3 from transcript Glyma06g41200.1 (locus Gly ma06g41200) derived from phytozome v7.0 (chr-ID Gm06; pos 44485790 to 44486543 reverse strand)
cagacaaggcagtggatcaataccaccgatttcaggtgaactataggaagacacatttgttgacttcaattttactctatccatattacttgcttcaattttctttttctgcctcaatttttggtgcatgtggtcattatccattttgaaatatgccttgagttagaatattgtataaatcgtaaacaatttgaatgagcaccgccatggggatgatgatgagaacgtttcaccaaccttgacgaataaaaaaataaaaaatcagcgtaaaagtaactcatgacataaagttccatagcgtgtaaagagttgcaaaagatctttttattactatataataataataataataaggtacttattgtattttttaatataaaacgccccactactttgttaattgacttcaattctttttttacaaaactgttatgttgatgtgacttcagttttgtttttcttttaatttaagtaaaatgtactgataaaatcatttttttataacatccttcagttataaattgtagtattgcatatgaaaaatgaaaaaattgttgattattgtaataataagtaattactaattttttgagagatttttttatcagtaaccgtgtttttcttttatatttttaagtgtatgaaatgaaattaaaatctttttttccctctttaatcgcttcgcataactttgctcaaacgtcaaaaaataaattttcacattgaagctcgcacatattccatttcacacaga

SEQ ID NO: 22560 - DNA, 344 bp, Glycine max
  Intron number 1 from transcript Glyma08g01710.1 (locus Gly ma08g01710) derived from phytozome v7.0 (chr-ID Gm08; pos 1075716 to 1076059)
accattcaaagtccgtctttgattttactgtcaaggtttctactctgtctctctctttgctttgacttttcgatcaacttctgttcccttaaatcgctactttttcttctattacaaccttgtttttttatttacaatcttttttatcagtaaatattaatagttagaatattagttttaataagtgggatccaagtcctgactttctctctctctttttttcttaatcattgaacgcatcttatacctgattttatttacaattataaaaaccatcattttaatcatgtaaattcatagtgatattaaataacgtgtagcgagtttttctgttctcttgcagg

SEQ ID NO: 22561 - DNA, 904 bp, Glycine max
  Intron number 2 from transcript Glyma06g11020.1 (locus Gly ma06g11020) derived from phytozome v7.0 (chr-ID Gm06; pos 8397786 to 8398689)
aaagtcgtggagacctacccgtactatttctcaaggtatatttagtacgaattgtgttattcatacaataactcatacaacattttatataatactaacacttcatgagtttatcttttttcacagcatcattgttacatctcgtaaaatttcactctctttcttcatagtacttgtataatttcattaatttgttgcatgaattgttatacaaataacgtttcttggactcaggatttttgtaacttcactgtctggctaacagcagagaaattaaaagaaatgagatatgcatgtttaataggagagaaagagacaaaataagtgaggatctaattctctcagacacgtttcgtacatcaaagcatcactatcctaaactccaacagtcatgattttgtgtatacctaaattacactaagtttaagccaaccaatgttataaatctgtctcacgtgttattgttttatacttgaagtgatgatgtgtgttattagttattgtatttgtctattgagtaagctactcacctcaatccaaatttttaactcacttaaattaaccacgcatgtttcctgtttaaaaataattgtatgatatcagggatttaaaaaaaaaaccctatcaatttgcacttttaacagaactatagcatcagcttttccttttcaagcacaaagaataagaatgatgattactactatcagggaaggaacattttgttttacatcttaagacacccgaattcttttccaatttccatattatgcataagtataaattggtcaaattaacttccaaagtgattgttcatatttcctcactaattcgtttttgcttcttgtattcatgttgatgaacaatggcagagcagcaagaaaccgaaagaatttgcggaaagcct

SEQ ID NO: 22562 - DNA, 954 bp, Glycine max
  Intron number 1 from transcript Glyma07g06830.1 (locus Gly ma07g06830) derived from phytozome v7.0 (chr-ID Gm07; pos 5508308 to 5509261 reverse strand)
gaagccagttcactccgtcctcggcggcggaaaacgtatgactctctctctctctctctttatggacactttttagtctacttgtgtttttggttagatctgtgatgtgagatgattaagtggagttctctatatatatgcttcgctgatcggtgttaagttgattttaaatgatgctacattttcttaaatttctcaggatttttatttaagaaaattattaggaagtcgagttaatgtgttgaaggtttgcttatgtcgatgctggaaaagtaggttttgaatgctgcattattatttggaaggggaattcgagttcacttcaggtttcaaatattttagtgtccaatgttcactgatactgaatctgaagagcattttgtatggttctctagtggtgtttttcattgtgattatttattgattgagtcctattcatgtatggtattaccatcaattaatttgtggttttaacatgtagatcgatgatatctttgtattgggcaacttgtggaaagacgtgatcatattttcactgcctctgctatattgcattttattttgcataaacaattcttatttatttgttgtgaacttttgatttacttcctgagatgtaagacttgatttttgtgcccatttgttacagtcttttcataaaagaattagttataagaaatattcattttatttttaatttttcatgtgtttgtttcagcttttcaaaataataaaaaaatattttaaattttttgtttaaatcagaagctattgaaaaaaaaaagtgattttataattgtgagaaaacatgaattagtttcctttagatctaaaaaaataatccctgaattaattgaaattagaatgagaaatactttatgtttaatttttaatctgtaaccaactagtctttatttttatttttttaataataatcttcaattgcagctgctg

SEQ ID NO: 22563 - DNA, 554 bp, Glycine max
  Intron number 1 from transcript Glyma06g08430.1 (locus Gly ma06g08430) derived from phytozome v7.0 (chr-ID Gm06; pos 6140099 to 6140652)
attagatcaactcaattccaagatccaaattctcggtatgttttcatcttctatgcgaaataaaaacctaactatttttttaatctcgtttttttttcctttcttagatttcaattttattagtagttgcactgttccgttacgaaaagtccacgtctaccattttttttgtttatttatttctgtgctatttttgtttttgaaataaggaccgtgttataatcgcgagtcgttgtgttgtcgtgttcacaattttcaatttgttgcagcctctgagtaggagaaagcgttgtgttttaaaaacaatttttttagtttatttattttgttggcgaaagtgttgttgattgatctctatacaagtcatttttttgcgtaatggctaatgatttatgattgaagtgaccctatatatactaaggagttataattccctaacttttttcgtctagatatgtggtagtttctgatggtttctttttatggcttatacatgtcgtgcctaattttattttgaagagtctcaaatcagcgaaaagttggaagaagtgaag

SEQ ID NO: 22564 - DNA, 245 bp, Glycine max
  Intron number 2 from transcript Glyma08g39170.1 (locus Gly ma08g39170) derived from phytozome v7.0 (chr-ID Gm08; pos 38596660 to 38596904 reverse strand)
gcgttgaagccgatcccgaactcgacgagttcgtcccctccctcttccttccctttctccttcttctctctcatacctgcacacgcacgcacgttttatatattattacatattttcacattcatacacacacattaacccaagccaagtaataatgcgagactttactcaatgatttatttattttactttgagtttgtgtgtgatttttgttttgtatgatgtttcaggaaacctactgtgac

SEQ ID NO: 22565 - DNA, 980 bp, Glycine max
  Intron number 1 from transcript Glyma05g35400.1 (locus Gly ma05g35400) derived from phytozome v7.0 (chr-ID Gm05; pos 39442798 to 39443777)
cgaggacaagaaacaagagtttacaagcaaaactggtaggtatgtcttccccacccccacccctttttttgatttaatatgacgacgatcagctccatttaaaaagtagaaatagctcttgtttgacatattatttggccctaaatatcacatatactatataggacaggacaagcaagtattgcttatttaaattcaagttgtttcttacgttaaactagtgttggattaagaaaccgtgtctgattgtgatcgtacttttaatgtttgtttgatcattgaaaaatgttctgcttgcccagttcccccctttttttgttttaaaaatttatattttttggtcaaaatcgtttatatacgttagtagaagtacaattcttggatataaaaccctacgtgtattttgaccaagtaaatctttgggttatgtgtgcattgcccacccttctcttctgaggggacaagttacatataaaaccattcatgtagaaaaataagatttttagctattcattcagttagcgactatattaatgacatgcagagagctattcaagctatatataatacccttgcatgctctccaacttatccattccgcttaatcacattttgcaaagtcgttgattagttctagctagttgaattttgcataacgtgtgtgcttcttcaatctgccaagtaaaagactatgtatttatgtctatccccatccattacttttttggccagttacccaatgtagtttggttgagagaaagaaaacttctgaaatttggaaagttctattgtgtagttgaagtgaaaatggagaaaaagtaaagaggaaagaatatttctaaattttctctttggttcaaatttcaaatttttgttccctccctcattttcctactatcaaaaggacaagcattatgcataactggcagaagattaaacatgattagatcatctatgatatccaggttcttcttggggac

SEQ ID NO: 22566 - DNA, 792 bp, Glycine max
  Intron number 1 from transcript Glyma07g30980.1 (locus Gly ma07g30980) derived from phytozome v7.0 (chr-ID Gm07; pos 35953217 to 35954008)
aagaacttcaacgtattgtcttggaccacctccaggtacagcaatatttactgataaggagaaatgtgttattgtttgaaagcagatattttaaaaatgttcatgtcaaatagcttcttattgcaccctgtcatagtttttttttcctagatcaatgaagaccgtgttaaggtcttttaatgttcatgtcaaatagcttcttattgcgaccctgtcatagttttttttcctagatcaatgaagaccgtgttaaggtctttttgctttcttctataactttttgttgaatcccaaatcccaatcccattagtggtgttgaactaggtcatttttgccttcctaccatgtgttaacaaagtaggcattgaaggcaagcctgctcctagcacaatgatttgggacttcagaggctgtcacccagtggccagcttgaaggagctcaagttcaatgtcttctgaaagaattgcaattatagttctaaaactaagttccagtttagttgtcacagaggaactttaatataattctctaacctttctaaaagaaaatgtgtagcctcacaaaaggtgtatggtagtgtgttgtataagttgttacaagatattaaacattcatgtgcattcacgtaatcgactgaagttttactcttccattattgacatggtatcagaacttcatttgcttttgaatctactcaaaaagtatttgaacaaacttcaccgcaagctctcatatgaaattttaaatgtttgttagcctgctgtagaagtgattggattcagaataggaga

SEQ ID NO: 22567 - DNA, 674 bp, Glycine max
  Intron number 1 from transcript Glyma06g01700.1 (locus Gly ma06g01700) derived from phytozome v7.0 (chr-ID Gm06; pos 1080298 to 1080971)
actctctgcaatattattttccttcaaagtcattggtaagttaaagacattttctttttttaatttttccccatcttagcactgctcattttattagtcttctacatttttctgctgtttattttttacccgattctcactgccaattaaaataataataattccatttatcgaaaactgaatattcaatgtaaaccacaaccttaattgaaaaattaaatccaagatctccctcatgtaaaacctgtaatttcatccaatttgtgaagttttttttactgcttggctggattgcaaaaactagggtttttgaattttgtctcttgtttttccctctttccgtaggcgtttagattttgggagcgagcgaggtaatttttttttttttttgcaatcagagcctcacaggagagtaaaaggatgcgtgagtttcatttatgttgactgatagtagaatttgaaatttgaatttgaattgtagacgtaggattagagtagaaaaaggaaagatgatgattgtattgcggcgtgtagagagaggatttatccaattccaactttgatactcactcataccataataggatcaggctagggtttataataagctgctgattgaaacaaatgttgaaattgcagttgttgaatcatctgcaccagacaccgattcattc

SEQ ID NO: 22568 - DNA, 922 bp, Glycine max
  Intron number 1 from transcript Glyma07g14800.1 (locus Gly ma07g14800) derived from phytozome v7.0 (chr-ID Gm07; pos 14640911 to 14641832 reverse strand)
aacattccccacctttgttcttgttgatcggggaggttagctataccctttagtcttttcaatactcttgagttttccaatatgccaacaaaggaaaaaaagtacacgataaaacttagatttagtttaagtatttttaatattgttctccaaccagaattcgagtttcacttcaataacttatattgaccataatgtaaacctttattacgtaaattaaccgggtgaaactccaattgtaattagaaaattgcaacaaaagaatataaggagctggatctaagttttgttcaaaagcacaagttttgtcaaatatgtggtttatttagtatttgttttgtttatatgcatgggcttttctattaagagggtaaatgtgtactgaaatacagtgtcagtcaggtacaatggggtgtgtattagtttttcttggacatacagttccatggaatgttttagttttgggagttttgaatcttctgtgcattgcaatgcattcttttcttttatgcactttatggcatgacttggatactttggggtaactttcccaatcgctgatgatattttagttcaattgtctcctattgatacggtggtgatgtgacaaaagaaaataacaaaaaagatcttaatcaatcgatttagtgtctagacattagttttagaaatattctgttttttagtaggtatcacaaacttagaaggtcctctgactcttgatatgatgtaaagttcaatggaagttgttgtgccagattttggaaaattttggtaccttttattcatcacattattgtgtggtgattggtgccactttttttatatcattggttgctagaaatattccaataatatggctcaagtctgtaaaatttattttctattttggtagattgctacttcactttaaaggcgtgga

SEQ ID NO: 22569 - DNA, 391 bp, Glycine max
  Intron number 2 from transcript Glyma06g16590.1 (locus Gly ma06g16590) derived from phytozome v7.0 (chr-ID Gm06; pos 12975838 to 12976228 reverse strand)
aagctgaagttggagtagctgctaaagtatgcttatttatattttattttagttttttttatttatcaaaaaaaaaatttaacttgcttcttgctagatattggtttttctgactgttttaggtggtctcatgcatcaaatttaagttatgtgattttttagcctaattagtgtctgaaagattttttatgggggagttctacttgtgttgttatttgattgcctgattaatgttaatgcttatttgaatctcatgcatcacttgtcttgtgtggctttgtaagcactaagcaagggattattgtattcttcaccaaatttacatcattttgcaattccatgctaccttgagacagagggaggattctgctcagctgcatcaatttatcct

SEQ ID NO: 22570 - DNA, 565 bp, Glycine max
  Intron number 1 from transcript Glyma06g16590.1 (locus Gly ma06g16590) derived from phytozome v7.0 (chr-ID Gm06; pos 12976284 to 12976848 reverse strand)
aatcgctcgcgatttcttcttctggaattctcaaggtaatccctaaacccactctagcacttaatttgaatctgctagcttcggactttccgcatttgatctcgatcacctaggtgtctgtgcaatgcttcgcattttcattgcgcaattttacttctttttcccctttcagttcatgatccttgatcatttcttcttttttaatgtttaaaacttctcttttacgctgagagttttagcctgagggtggaattaagcttcaggggtattgaaacacctaattagtgctttcaactatacaccacaatatagcaatccctccactcttttctttccaaattgaagcatattgacagtattggacaacaccatatgatttcgttttcctgttccccgatctcgtgtcattagagggtttcatttccgtttgtgctctatttgagcttagatccattcctgaatttctatttctcttttgagatttcaattgttgtaataagcataagcataataattatatgtattttctcctcttttgtgttttgtgggttcaggatctcgataa

SEQ ID NO: 22571 - DNA, 437 bp, Glycine max
  Intron number 2 from transcript Glyma05g28170.1 (locus Gly ma05g28170) derived from phytozome v7.0 (chr-ID Gm05; pos 34070119 to 34070555)
tgtctgctgttggaggtacttgctttccttccattttgtttttcttctggaacaactctatcaaattatcaatgattattaattaagtggagatgacgtgacataaatagtgcatcagtattgaaaactcttcttgaagattgtcctcttcatccaatttaatttctttgttcatataaaacagcattctcctgtttttcattttcaagatatcccttttttcactcacttgaatcacctttttttggagatgacaaattttgatgaaaaatgttggtctaggatgattttaatcttaactctcgttttaagcatatttgaatcattaagttcgatttcagctccttattatttttgagtcctgaaaaacctgaaggcaaaagcccttgtattgtacgtcagaaaacaaagagccagaagtgaagatagtgagcctc

SEQ ID NO: 22572 - DNA, 546 bp, Glycine max
  Intron number 3 from transcript Glyma08g02020.1 (locus Gly ma08g02020) derived from phytozome v7.0 (chr-ID Gm08; pos 1358641 to 1359186)
ctggaagaggtacgtacatacgtttctcgaatattcttagttttgtttggcttcatttaagagtttaatttgtacttggcaaaggaaatatctcttttgtgtgattgattgttccacctaacatggaaaaagtgagtaaaaaccatgcatttacttcaagtgaattacccgtcacaatccatgttcgtaacttttcgttggtgtgggttgatgggattgggatctttccactttgattcctgaactaattaagcagcgggtgcggccttttcatcaatgccacctcgtaacaatttagctttttttttaatatatattgatcttcacaatcaaaactccgaatcttttgccttttaccttttcttagcaactttgttaatttagtcttgtttcagttactttaactcatatctttgcatatagactcgttcaattctaaggtggctataagtttgaaagtgaaagtgaaatttatatattacttttgtttcacttttttgttgttgtcaaggttgatagaagatacaaacactaccgtgaccaaat

SEQ ID NO: 22573 - DNA, 442 bp, Glycine max
  Intron number 3 from transcript Glyma06g09230.2 (locus Gly ma06g09230) derived from phytozome v7.0 (chr-ID Gm06; pos 6790566 to 6791007 reverse strand)
atattccttataccattggtgtggtaggttaactctttgtggtttattcatgcttggaattctgttttaatttttctatgaaaatgaatgtggtgtggacatgcattcgcctttagattcgaattcaccgggatattgcaactcgtaggactaaatcagcaagcattgggacaactgcaggggtatttcagaaatggttttgcaatgtacaatactttattgatctatgcttttgtccatttatttatcattattattatatttgtaattgactgaaatttagataatacaagtcttcatttacttttttttaatgaaaactttattattgtataaacaattcaaatttttaaaaaaagtgtctctgaattttggctatttattgtgaaataaatactattcttagaataatgactattggttgtgttgataatctgtagat

SEQ ID NO: 22574 - DNA, 477 bp, Glycine max
  Intron number 1 from transcript Glyma06g46000.1 (locus Gly ma06g46000) derived from phytozome v7.0 (chr-ID Gm06; pos 48727038 to 48727514)
tcatcttcatcacctttcactcttgcccaggtcggtgcttttaacttttcaccttctctttcaactcttttgactctcttaccttctcttttttttttttttcacaattgtccacctctttaatttttcacccttttttcattaaaatttttgaaacaaaattgacccatctcaaaattttcacttttttaacgatcagtcgatcacatttgcatcacaaattaaaccaaccagaccaaatatccttctcgatattacaaatccgcgtttccccaaaactgcgttatttttctccataaaaaagtcaaaagaaaaaaaaaattaaactttctttaaaaaaaacaagaaagaaagaaaagaaaatgttgatatgtttgttgtgtctttttctctgagagagaaccgtactatactacatgtgtttgaattgtgtttttgttagattgagaaactataatcctctctccggaaccttaa

SEQ ID NO: 22575 - DNA, 312 bp, Glycine max
  Intron number 2 from transcript Glyma06g46000.1 (locus Gly ma06g46000) derived from phytozome v7.0 (chr-ID Gm06; pos 48727744 to 48728055)
gaagcgtaagtttttccaaacaaatcccaactccatgttttttttcagtactagaaacaattttgtttgaggcagataaagataatgtagatgacaaagtgcttctttgagtacttaacacaacaacaattttgttctgagtttacatagaaattatatagataacaatgtgtttctttgagtatttaaatttgaggcatctgattaaactgaaacagtctcttgtatttctttttcttcttttgtaattctttaatataaaattggatggattttgtttttgcagttttttcaaggagtgtccgcacccag

SEQ ID NO: 22576 - DNA, 179 bp, Glycine max
  Intron number 1 from transcript Glyma08g20520.1 (locus Gly ma08g20520) derived from phytozome v7.0 (chr-ID Gm08; pos 15539674 to 15539852)
atcaaagaaaaagagaaacctccctggcaacccaggttttttcttcttcttattttaactattcaaagtctaaacctcatttgttttggtttggttagtagtcaatacatatatgtcatttttttgtgtagtttaatgtgttttttaatttatttttgtttttgactattcagaccctg

SEQ ID NO: 22577 - DNA, 1044 bp, Glycine max
  Intron number 2 from transcript Glyma05g29730.2 (locus Gly ma05g29730) derived from phytozome v7.0 (chr-ID Gm05; pos 35252360 to 35253403 reverse strand)
ttcagaacaaattcttttgacgtaccccccttgctttcgttctcaattgtttattagaccacatatatgatcatatgacacagtatatgcctagagtttctcgtaggctaagctctatgttgttgattccatatgaagttatacataacatatcaaaattatcattgttattgaggggatttaattactttatcctaatattgaattttatgaatggagagaatttgattactctattcagactaacaaattttacaaatgaagggaattcaattgaagcaattgagtgagtttcctaggattttcaaatgtaccattcaaatacacacctagatttttgtttaatgaatttagttgcctctttttgcaacattttgcatatccattgtgacagtgttcacagagcaaggaatctgaaaaatatgctagctgtagctgcatattcaagccaagagttgatgatttcttgtagagtgatcatggcatcattataagtattttccactgttcagttgatagaattgacttcaaatttgaattatcatagcttccatttagcacaataagtcaagttgttttgaactagttgcatgatttgtaaaatattttctgagatgcaacaaattgtgttaagtgcatgttgtaatggaattgttatacatagacataggataaacttcttctctgcatgtcttctgggattttctaagaagaaaatttctgtagcgtaaaattgaattaggaactctaccaaacccaaggttgatcctagtttacacagaaattgaagatcctccttctatacgactttctttatcttttctttgtttctttgcaccttcttaggttgaaattttgcactcctttttctgttgtaatctttctttgttctctatagtagtatttctttcttttataccttctccctcccatcatttaggtttccaattttaatttttctgctaacaaggttcctataaatgtttatatttaaaacttgccatcctatgcaggaaagtaggtagtggatattgatagaaacaa

SEQ ID NO: 22578 - DNA, 245 bp, Glycine max
  Intron number 1 from transcript Glyma05g31330.1 (locus Gly ma05g31330) derived from phytozome v7.0 (chr-ID Gm05; pos 36455706 to 36455950 reverse strand)
ccttgagaaatcaacagaatcttatttccgtttttgttatttgatttcaccctcaaataacataacgaaatgataatttcgttctattattttactttcgctcttcatggtacaacaaaaatttgactttgttgtgttactcatcctatagcacatgtgaaattgtatttccgttgtgggtttttttttttctgcacattggtttatgctgttttcttcccagcatcgctccactgctgcggccc

SEQ ID NO: 22579 - DNA, 768 bp, Glycine max
  Intron number 1 from transcript Glyma07g38300.1 (locus Gly ma07g38300) derived from phytozome v7.0 (chr-ID Gm07; pos 43082157 to 43082924)
ctaacgtcggtggatatcttccaattgtagaacaggtatattcttatccttttgcaaaccctccttcaaaatagggagacacaacatagagttaagtgtctgctcaacaaagacaaacgatcccatttataagttaaacaagtgtagtttagtaaataactaaaaaaagaaaaacatataaagaatgttcccgcaatacatttactttttgattttcgtaaagttaatactttttcattttttatgttttgtaagttttttttttaaaaaaattttaattcctataaattgacgttttttcagtttgaattcatgtgaatttctaaatttttttatttataattgttataagtttatatttactaggatcaaaataaataaaaaatataaatttattgaaactaaaaataaactaaatattttaccggaattaaaattaaaaaacataaccttataatgactaaaattaaaatattaaacttataaaaactaaaagtgagaaaaaactaacttatatagaaataaaaaccatatttaaatataatatatttttaatatatctttatcaatatatttttttattattaattaaaataattaaaatttatgaaatgatataatttttatgctctatttaatgaaattattaataaattttaaaaaatttaaatcaataataaaacatactagaaagaacatttttttatgagtattaagaatttctctcttatatttgtcaatgatattgacgtgtgaattaagcaggga

SEQ ID NO: 22580 - DNA, 921 bp, Glycine max
  Intron number 1 from transcript Glyma08g40180.1 (locus Gly ma08g40180) derived from phytozome v7.0 (chr-ID Gm08; pos 39890318 to 39891238)
gtctcgctgattctcaggctcaagttggatcttccgtaatttctcttcccaacctcatcatataattatgttgagttcaatttttataacactatgacgtttaaatgattattgaaaagtcatcaatcttatcctacctgattaaatgtgattggatgatactattaggacactttagttaaattcaatttctttttattttttaatcttgtttataagatgttggagtgattggcatgattaagtatttattttttgtgttgagtcagagactacgggtgtttcctaaacctactggattagagactaatcatggtacgtggctgccgctggcccaaggaaatttcgcatgattaagtatttttgactgtttagaaattttattaggtagcaaagttaaaaagtgaggaaaatgtttgattgaaagttgaaactgcatagtggtttgattaacagctattttgtttgttgggtaaatttcattgatacccgtgatttcttgaaatttcacaccatactcctgcctttttaatgcaaataataaacctcttacacagagtgtaatgtgtttcttgggtaacaggatacgcagtataatgtatttcaaacaattaaagggagttactgaagtcagggatttcaaaactcgcattacaagaggtgtcagtgtaatttgccattatgtttctgatctttgtgagcttgatttttctttgctagcatcaaaattcaaattgcctttttttgttaatatgtttttaggctacaacagtctcacttcattcccatgcatgataattatcgtaactgcttgattggatgcagtggctacattctgttttgtgctcttgaggatgagttattggttttttctgttgtaataggctaaatgtatgcttcctttcttgtcacctggtaggt

SEQ ID NO: 22581 - DNA, 828 bp, Glycine max
  Intron number 1 from transcript Glyma06g47070.1 (locus Gly ma06g47070) derived from phytozome v7.0 (chr-ID Gm06; pos 49585379 to 49586206)
gcacaagaaaatttacaaacagaataaagaaacaggtaactttctttttcttattttttttaagtgatttctcaaatgagtgttgagaagtttggatttttatgttttgacaattttgccgattttgttttgtgagatgggaattctgattggggtgtttgattattatttcgtttgctgggaaatagttaaattagctgtgatattacattctaatcgatctgaaactttggtttttgatctaaatgtttacatgcttaatgcattctaattaaattcttaagtttatattaatttatcattttattaaaaatgaattaaagaatttttgagttagagaatatttattatatatgaaaattttgttctcccttttcttccccccaaatttagactccaaagcataccttagaagttgtaggactaatatgactatttacagttactactaaaccaacaaataagaaattgtacagacaaatccaaaaaaaaaaagtattttttttataaagtttctggctgtaaatctatgacctcttagagaggctctattgattgttgttgttgtgatgatcatctgtgaattgaaatgtgcaaactttgatgagttaaggttttccattttcttggaataactaagctgcttgtcccatatggtgaatagtatctcgaatttagaaacttgtgttaaattaactatgttgtctgttccagtggtgttgctacccggtacccctatatcatttttctgactttaagtgtatatgccatttattgattttgccttgttttttattttattttttaacaatatatttttcataggtg

SEQ ID NO: 22582 - DNA, 824 bp, Glycine max
  Intron number 3 from transcript Glyma07g01520.1 (locus Gly ma07g01520) derived from phytozome v7.0 (chr-ID Gm07; pos 989789 to 990612 reverse strand)
ccaatcggtgcttccaaataaaggttgttgcgcaggtaaatgtttctatttctaactcttttactttggtttctcgtgttatgcatttttggtttttttaacttcttgtttatttaagtccgaagagtcggttttttttactagtggtattgtttgatccatattccgtatagctggccatacctggtggaaaatactttaagtctttggcatggataactatgatggttgctattatgcagcttatttatgatgggaacgatttgtgtttatgttattgcgatccatatattttgattaatagtttacttttctttttctatgtaatgaagttcctttgttgttgagaagaagagatgaacattttcctgttgtatgcagtgtcattcattgaaattatttggaataatatcgatgtcttcttctggtaaaaagtagcttgtttgggtttatttccgttgcttttcctcctcctttgattggtgccttatacttagggaactgagatgtcttccctaccaaataacttggcaaaaactgttaggaagttccacatcaattctcgggtgcagtttcacttagtgccaattggttttaagttgaaatataatatggtatcaaaacctatataacacatcttggttctcgcctattctggtaggcatttgggggggggggttaggaagtcccacattgcctacctcaattatgagggtacaacttatatatctattggacaactttactttgtgtcaaatggttttaagctaaaaactaacaaaaactatccttatatttatctaaatgttattcatttgaacagg

SEQ ID NO: 22583 - DNA, 876 bp, Glycine max
  Intron number 3 from transcript Glyma06g22130.1 (locus Gly ma06g22130) derived from phytozome v7.0 (chr-ID Gm06; pos 18878700 to 18879575)
atcaagtggaaaaatcatccgtactcaacaatttggtatattccctgatttaaacaatacttccttagcctgtgctgtgttgcaaatgtttgatttatgtatttcttgttcatggctatgtttagaactttttctttccttgatttaaacaatacctccttagcctgtgctgtgttgcaaatgtttgatttatgtatttcttgttcatggctatgtttagaactttttcttttgtggtagcaataacacactcgttagtttcttgaggaaaagatcagcctttcaatatgatattttttagattttttggtatcatgtttagttactgtctcctcctgttttgtgagaatgaaaattgtaaaggaatcttgttttatttttctcatggattaagttataaatatagatatttgatatttctatgcaatttactaatctttgagaatgaggcttataagttatattaaaatggagtggcttctaaactagtttaaacttcaaattttaaagtcctttcatattggagggatattgtagctttttgtttctctattcacgacaattgataatttgatattgaaacacaccatagagtatctcattcttcctttgcaaatggatttttcatgggaactgaaggtggaatgagcaaagggtattattatctgatctttaatgttttgattaagcctaactttctaaattctaacccaaaaatatcttctgcattgacaactgcaaatattgatctttgaaatgaattaggttgctatttatttcatgggtggacaacatgtattactttgataactacatttattaacacatctgtattcatcagataaaacatttctcttcagtcttgggatttctttc

SEQ ID NO: 22584 - DNA, 693 bp, Glycine max
  Intron number 1 from transcript Glyma06g37470.1 (locus Gly ma06g37470) derived from phytozome v7.0 (chr-ID Gm06; pos 39938002 to 39938694)
ttttctcctgcaaagaaaaggaacctgtactcagggttggtggtgatttctttcaacttctctcagtccattttgtcttctttctcttgctctcaccactattaatgcacatctatcccctttataaaacatgcaaataattacctatgttgtttgtaattcaaacttatttttgtgctagccatatatggaataccatatataatatgtcatcacaatatgtatatgggatatcatatttgcttcaaatgtttacttggatgatattgtttgtaatttttttaatataattaaactaccaacatatattatcaaatattactattagctcgtgcttcagcacgggcgaggttctagtttcatgaaaacaaaatattgtttggttttatttagaattttttttaaaagaaacatgtactcagggttggtggtgacttctttcaccttctctcagtccattttgtcttctttctcctgctcttatcacacgtgctctttgtccgcgactcaacacattggaaacaaaagcgcaaaatataaaaaaatacataccgtgatggggacatttttgggcaagaacataaagttttcatatgccaacacatcagcaaagtatgggcattttggttatttccaatcattgttagggccttgtttgtataaatataaatgattgttaatgataatcaggta

SEQ ID NO: 22585 - DNA, 537 bp, Glycine max
  Intron number 3 from transcript Glyma07g18120.1 (locus Gly ma07g18120) derived from phytozome v7.0 (chr-ID Gm07; pos 17859545 to 17860081 reverse strand)
tctgtcacaccctagtcacttcaagtcttctaaaggtacgtcaatcttgctcaaactgctgattttttctcaaggatcttttcactgggaatatttggtaagttatatgattcttgtgcatttggcatgtctagtgttgaaatttatagttagttcacagagcctcgttgtgtatgtcattgaggcttaaagtcaaatcttggaaatcattagagatagttctgtcatctacttgatactcaaatacattttctgatattgattaaagtttcctgatgtatgtttatagccatcttctttacaagttatctctgttcctttaaattttttaataaaaacttttacttcttgtttctatgtgattgggatgcgaagttttgtgcaattatatgtgctccataacagtgtcatcttctatttaaaactatttgtctactacatgaatgcgaggaatgatgattgtgcttctgtcttttgtgtcaaattttctacttaactacaggctgttggtattggctctttcactggaaccacagc

SEQ ID NO: 22586 - DNA, 758 bp, Glycine max; identical to SEQ ID NO: 18338
  Intron number 2 from transcript Glyma08g01960.1 (locus Gly ma08g01960) derived from phytozome v7.0 (chr-ID Gm08; pos 1286624 to 1287381 reverse strand)

SEQ ID NO: 22587 - DNA, 565 bp, Glycine max
  Intron number 1 from transcript Glyma08g07220.1 (locus Gly ma08g07220) derived from phytozome v7.0 (chr-ID Gm08; pos 5188164 to 5188728 reverse strand)
tcgacgagcaagagcgcctcctctcgattttcaaggtacacggatttcaatttgcgtcttctcgcgtgcttttaccgatgtttttgtgaaattctgaatcgatgtcattgcgtttctttattcgtcgaaaaaagaattcaatttattagtgtttctgaggagttttcatatgtggaactcttgcatgttatacttatgacactgtttcgcttaaaataggaaagagtgtgtttctcctatgctttgatatttcttttaattaatgaatggaaatcgttagtatgctcgatttcagttaacagttaatagttttgaaggagtttttgtcaaagtttaatggcaattgacaagttcttaatgttacatgaagaaaactattgttgatgctatcaaacttactttgcatgtccatggtaaattttatgccacgctttaagtaggatttctttgaacgtttatgtaagtaaaatcattggctgaccttttagtttagtgagaattaattactgacattattttgtgcttgacagtctcagttaagccgtgccgtgtatttggagaatta

SEQ ID NO: 22588 - DNA, 882 bp, Glycine max
  Intron number 1 from transcript Glyma08g26380.1 (locus Gly ma08g26380) derived from phytozome v7.0 (chr-ID Gm08; pos 20707897 to 20708778)
aattgcttccaccttcggtaagttcttccgtttcctcccctgctttagtgattatgcctcattaattcttccaatctgatttcacattttggtttcccattcttctcgcatttcctttaattagggtttcttttttcttatcaaataaaactggagttgtaattgattttcattttactcacctggtttggttttcacatttataagtgttctcatttatttgttgatttggatgctgtcatagattgattgaatgttataatattctgatatgatgttataaaggttcaaaatcaattccacaaaactctaaactgaacaggcacgttgtaggcgaatggcagtgatttataacgaaaatgatttatgtttttaattttttttattaatctccaagatgcatcttccgagtttggatttatgttttataaatattttatacatatctatatatatagttcatggctttgtgtctttcatgttctaggaatagccatgccgatatatcgaatacatattgaatccaatatgtgtatcttatctgtgcatcatagttgagaatgcttatagaaactgtcttaagtgcatgttcaagattaacattagtgctcatgtttatgatcttaggcatgtgtttatcattttactttaaggaattgtttcatttctgttaatacaacattcctcagtattgtgaaggtgttacagggtgtgtgttctgacttctgacacttgttttgatttaggtttaaacttggtacacctctgtcacaaatgatatgtttcaaacttgatgctttgaccccgtcattagtgaccacattgaggtccaaatgatgcgtgtttcctgactatttctatagtattgtgacttgattcaga

SEQ ID NO: 22589 - DNA, 962 bp, Glycine max
  Intron number 1 from transcript Glyma05g34570.1 (locus Gly ma05g34570) derived from phytozome v7.0 (chr-ID Gm05; pos 38857433 to 38858394 reverse strand)
ggggttccaccaaaaccctcggaaatttcgtcaaggttgttaacttctcttattcttataatcatttaatgtctttcttttgtttaattgattgtctgatatagcttcattatcgtggtttataataagttatcaaatgtgtgtgaatttgttaaatgaataataataatgtttctgtgaacgtgaattctctcaagtacttgtgatggcgtgcttgcgttcatgttttccttcgttttgttttaagcttttttcatccaagttaggacccaccctttgaccttttgagtgtgcgctgcatttttttagtcttttactgatgctgctatatgtatctttctctttgcaagttgataacattattgttacgcgactttaatggtgttggatgtctatatcttttatttgattggattagcacttggaattgtgcacaattttacattaggaatgcaaatgattttctttacttctttatgacgtttatttgtgtctaatgcttaattgtactggttgtaaagggttacgaagaaatacaagttctatgttaaatgtaaaccttgtttaaataaacttctcagcaatgtacaaagaaataagaagttaaagtgaaataggattctttcgtaagttataattcgcttatgcactagttgtaacgtcaatctcacctagcttcttcaaaagataattttgccttgatttcttttttataacagtgcttattgaaaagtgaattccttatagatccttatggtatttattttggtagcatgttttcttagttattattatttattttggtcctttgaagtataaatcctttgtatacactctgaaacaactactcaattgatgataatatgaaacttgttaggtatttctaatttatccgtgttcataataatgccacttgtgtttttacaggctacttttgactgtttgctgaaaacctacggttt

SEQ ID NO: 22590 - DNA, 813 bp, Glycine max
  Intron number 1 from transcript Glyma07g34280.1 (locus Gly ma07g34280) derived from phytozome v7.0 (chr-ID Gm07; pos 39175728 to 39176540)
cgacattgctagccccaccactatattcaatcctggtaattcctctttcaaaaattcataaatttgaattttaatatattaactcttgttgttgttaattcaattatactgtgatcacaattataattgtacaaattttaagtcgtgtgagttgtggcgtaagtggttaaggattcggagttaactctcatcttttttatggacgcggttcaatcgtcgctagaattgcatttaacaggcaatcctcttcagaaaattccttagcattaagagactagccagttaagtagttgcaattgaataaaattgcttacatattaaacttgtacattagtctctcttttttattgatataaatctaatgataagtatacgagaatttacaataactaacatatcatgttcaattatctaagttagattctttggttgtatagtagtcttttaagtatttcattagggttctgcttggtagaattagggatttttccatatgaccactttctcagtaaaaaagaaattgtacagatttgattttgtgattaaatttataagttttattttaagtttggtgttgtcaatttgattagattttgagagcatgtggttatagtaatcttttgagtaagtatttgctgagagccttagcattctactgtagaattggatatgtcttcttagttctgattatactacttttctcagaaaaaatattgtaaacatttgataatatgattaaattattaggtttgttttaagatggctgttgtcaatttgattgatttttgagtgaatgtggttattgcgaagggg

SEQ ID NO: 22591 - DNA, 549 bp, Glycine max
  Intron number 1 from transcript Glyma08g18280.1 (locus Gly ma08g18280) derived from phytozome v7.0 (chr-ID Gm08; pos 13737706 to 13738254 reverse strand)
tttcctcaggtttcaaatctcgttttttcttcttcttacccttttctttaagggtgtctttttttgtgttctttgattcagcttggtcttgtagatctggtgttgtttaatcacttgttttaatttgaattatgggaaaagatttaagatgcatttcaaggtggttgtttggttttcagcttcagctcccagaagcttaatgatgaagctttttaagtttcttttttttttgagaatattttttgttatgttcaggtttatgccgttgtttgctgctttagttgattgagcatagtgtttcatgactgcataacctctctctgtattgtgtagtgtgtttgcttactctttgttgatgattgaggtcaaagaatgttatttgcattgatgtgtttcccaatttttagagtgaaataaacttgttgtacttgcaatgatgtttgctattttccttggctttacatatctaagttttgttctgagatattgttaggtctttgactggaattatttgtcttgcagaaggtgctgtttttgacgcatcgcaat

SEQ ID NO: 22592 - DNA, 926 bp, Glycine max
  Intron number 1 from transcript Glyma08g42160.1 (locus Gly ma08g42160) derived from phytozome v7.0 (chr-ID Gm08; pos 42115153 to 42116078)
aagttgatatctataaagcgctcactctgtcttaggtaacccgcaaaacccttcgattcgcttaaaaatgccttttttagatcatagcacgaaattctaagtttctgcttctgggtgtttctttggaattctttttctttctacccacatttttagttacctatttcccccccctttcattatgtttttattttcttttttgttttaatgtttaattttttttatttttttaaacaaccaaaaagaatccctaaatcaccaaacctgtgaggaagaagaaccagcaaaattttatttttattttattttgttgttcccttttgttctttctattggtaattgttatgtaatcttccaacattttagcttgtttgacaacggggggggggggggggagggatgaagcaaagaccgtgtttggcattagcaatagaaaagctgggaagagaatctaagaatcaaaaggtgaaattttgtaaattttatgaatgtatttctttgatagggaagggagtggtgaaaatttgaaataagcatgggttattatttccttctgggcgaagactttgtagtgaagctacttatgtagcaggttgtgttcttatctttgtggtcacttctgaacagatgatgttcatcactctatctatgtccgttgttttctcttctcacacctgattatggtgttttcctaaacagcttaacaaaagcatgtacttaagtgttggtcatactcatacataggcatttgatagttgatatattgttgtgtctatgtgcaccaacaagattttgaaaactagcacatgctatagttttgacaagtttgtttgtttatagtgttttagagtatcatttagaatttatggtttatcaaactttatggtgcaggtggggttttaagtgttgtgttaataacagaactt

SEQ ID NO: 22593 - DNA, 964 bp, Glycine max
  Intron number 6 from transcript Glyma06g02750.1 (locus Gly ma06g02750) derived from phytozome v7.0 (chr-ID Gm06; pos 1853298 to 1854261 reverse strand)
ctgcacaatcaacaccttcaccacgccctgctcaggtagtcattgagcttgtctttgtttctctactattacatttgaggtgtggcttaactatactggaattcctatgcagaaaaactttcagctttcctatgtttatcagacttggtgtgttcatgatttagcatttggagaaacaattgtttttgtatttttgtcaacttaagagaatatctggaagaaaaaaaaacagaaataagcttttcaaatcatgtgcttggtttgtgctgcataccattcattcttttgtttatatacatattcaacatgtgttaataattataggcgtgcatgtcagctcagaattcaacgaatgatagttaaatgattaatctaggaaggagatttattttgcacatgtaaagaaacttatgcctagaatgacttttttttaaagaggtggggaaaatctagatatcaaatatttatttccaatggtgttgctgctattgcattccatgttgtagggattgtttttcaaataaactctcaatttcatcctcaaagtattattctctctcctaaatggtcactaaagtaagaatattatctaagtaatctctcaagtattagaaatcataataaatagtccttcaagtattgaaatccatctaattgatccccaaatcgctgctagtaaaatacatcaatttaaggtctaaactgatagatattcaatacttgagagattaaatatatagttttattactttagggactacatatgagagatggtaatatttcacagattaattgatggtttattcttattttcccaaaataagttgttttgtggatctttgctgcatcaaatttcattttctttgtctttatcccatttccttgctgacttactcagacataaaaaaaacattctctttaattcacagcaacaaccagctgtgagggtgcgtcaacccgcatc

SEQ ID NO: 22594 - DNA, 546 bp, Glycine max
  Intron number 1 from transcript Glyma06g02750.1 (locus Gly ma06g02750) derived from phytozome v7.0 (chr-ID Gm06; pos 1855101 to 1855646 reverse strand)
ttttcatttctcttacttacactacacagagacaggtattttcacttctctcacttcctttcattttgcgatgcgtcaattaaaaactgaacaaccttcactgtatcgttgggttattgactttgatgttccaaactgatcgttctattacttcgccctaattcgagttgtgtgctgtttagagacaactcctctcaacttcaacgtctttgctatttaaatttaaattactatataacctatttattgtatacctcatatggtttcggtttcaatttgcgctgcacaaggtgatgtttcctcgtaagtagcataacgttgtgtgaatatgccttaaattggtctccaccctaattttctgcataatcctcttttaatcaaaatttctgcgtgatctctaatattaaagcatgcttaagttatgattggtgtattttgagacccatgactcttcttcagtttcagtttcttggaagttggacgttatcttgtttggtttaactgattatctcttctttctttttttcccaatggcagggatacgca

SEQ ID NO: 22595 - DNA, 769 bp, Glycine max
  Intron number 1 from transcript Glyma08g36760.1 (locus Gly ma08g36760) derived from phytozome v7.0 (chr-ID Gm08; pos 35060693 to 35061461 reverse strand)
cctagctaagttccctgctaccaaggttcaattttgtgtagtcgtgtagtaatatacatgcgtgtttattgcgctgttagatggggtatttgatgaggaatttttgtgggtcataagattatatacctgtagtgttgggggttgatgatcactggttggtatataactaatgaataggggtatggtgctgtaacaactctcgggttatggtatatttatatcaattttgatgttaatatactataacctattgctgggtttggcaattgataagaacgttttgtaatttgggttacttctggtaccaccttgtttcaaattttctatcaatttaagaatatcagtttattttaaaacacttaccactctaaaaataaatttatctaagtatcattatttcacctaaatatttcattattcacaacaacaccatttttttagtaaaggtgatttttttacaggtttagtaaaggtcattattcttataatataataattgatacaatgaataattatttaaagatatatgttttactttagatgatgtataatttgaaatgaaaaaagtctttttttttttacaaaataaacaagtacttcgggatatttttttttgagagggatgagggacggcaaatttactgtgcagggatttttttataaacaatttattaaaggaggtctcatttataacaaattgcagagggggtttatttttttacgtgggtgccgccattgacactgcgagaagcttgaaccgccagtgaca

SEQ ID NO: 22596 - DNA, 848 bp, Glycine max
  Intron number 1 from transcript Glyma06g40730.1 (locus Gly ma06g40730) derived from phytozome v7.0 (chr-ID Gm06; pos 43891779 to 43892626)
cctgccaaagtttatattgtgtatgcagtatgctcacattttaacctttgttgtcttctttaattgattctttatatatgtgtgcactcgtgtgttataattataacttgttaatcattatctgacatgcatgatgcatgcttctcaatatggaatttcgttcattgggtttcttttatttcttcaatgggttcttaaatttgaaatcttttagatttcaatgttctttgaagatcttggtgtctaactttgaaagatatgatgcattcttgctctgcttctgtttttccctctgttctgtaacgatacaatggtttgtttgatcattggggatgttgagagattttccataggagccttgaatgctgaaagtcttgtgcttttctattttcccaatttgtaagaaaacttgattgtgttcctgattcattgactttctgaatcattgaacatcttctttggtattccatcattgccattttctataatgaaagcacatttcaaaattgttactcaattagaaaataggttttcagagcttgacaagttgtaagctgtgtacagataatatccatctacaatgatttgcaaatataacaatccactagttcttatttgatatttaactttccttttgtttttatccttttactgataaactataaccttggtgtttgcagtatctaccttttcataatgtgattttcatttcctctttctgttgtattgtccccaataatattgctcaatttcccttttcattttcatcttgtactgaattattgacgatgtttctatcagcttcatttactgaacgattttttttttttttttgcaggtattactca

SEQ ID NO: 22597 - DNA, 389 bp, Glycine max
  Intron number 3 from transcript Glyma05g36530.1 (locus Gly ma05g36530) derived from phytozome v7.0 (chr-ID Gm05; pos 40364843 to 40365231 reverse strand)
gaagtattcacgagctagctgccacttctgatcaggtaagtgtggccactttctttgcagatccctgtttggataaacttaacttctctataaacacttatgtaggagaagtaaataataaagagaaaaggaattgagcttctccaataggctaaatcaacttgcccatttaaacttttagagaagttagatgagaggactgcataagttgattttaacttatgggataagattatttcattttacctttttattttcttctaagtgcttgtggagaagtttatccacataagatccactaatgtgctttcgtggctggtctactcttatgtttttgtttttgatggtaatgtggtttcagaaaagttctcaacggcaattagtgcatc

SEQ ID NO: 22598 - DNA, 559 bp, Glycine max
  Intron number 2 from transcript Glyma08g26950.1 (locus Gly ma08g26950) derived from phytozome v7.0 (chr-ID Gm08; pos 21284053 to 21284611 reverse strand)
acaagccgaactttcaagtttgaagggcacatcaagttggtttttgtcataaaaaatgaacgatactgaaactattacaacttacatgttgattgtctttagtttcagtcctcacttggtacaacaaacctgagatatgaccctacacagaattgaagcaatatatatatgaaacaatgctaaattcagagtttatttgtcttctctttattctctactggacatctggttttaataaaagctctatgttttagttataagattttgatattccctttaaattaatgggtatcttgttgattctcctgaaaagttattttagatgaagatgaatttttggatacttggattttattgcaatagctggaaatagttgatatatttttggtggcattgttgattcatgattcatttctgcatcatcttcagttatttcatggttgtggactttttgaatatgcatgatgattggctttacccttgctttgaattgaatgttttcaatgtatttttctgtaatgcagttgttatactggtcccaacctgagaattggcattg

SEQ ID NO: 22599 - DNA, 938 bp, Glycine max
  Intron number 2 from transcript Glyma05g36900.1 (locus Gly ma05g36900) derived from phytozome v7.0 (chr-ID Gm05; pos 40639643 to 40640580)
gatttcaggagcacttgctcttcctgccgcaggtttcgtctatactcaattaataataacactgttcaaacgatacgttcactttttccactactgtttagtttcatcgtcaccaatagtacatatcatatatcctgcattccactatgtttttctacaatgcataaatctgaaccatacaactaaaatggacagttacgatcagatttaaaccaatacatccttgtttgtctatatgtaaaagaagatgccgattggggtgtcaatatatatatatatatatatatatatatatatatatatatatatatatatatatatatatatatatatatgcatttttgttgtaaaggaagaggagccttgtccattgcttaacagtagcattgtgacttccggtaccttttctacatcaatatcactgtctgtgcctggggatcaggttaaatttttttatgtaatatattatagactttattacttcccttagtatcccctacaatattgttaaactttttcaaaacttcaatccgtgcttattcttttaatttttaatccagtcctgttagtttttaacaattgacaggggttccttgatctccatcatgaagtgtattacattctaacagataaatcataaatcacttggaaaaaccatgccaatttttcattctgtttgcctttgccgtgtctatcagtcctcctacaagattgcattgattataatatatatatatatatatatatatatatatatatatattattttgatatcatggtagtttacaccagttaactttgaacaaagtctcaacgatttgctatatttgtcggtgggttctcgatgttacagaaatactattacagtgtgcgtcctttaaccagatattttcattctgctgctaatttgattttatttgttttgtctcgtagcttac

SEQ ID NO: 22600 - DNA, 525 bp, Glycine max
  Intron number 1 from transcript Glyma08g21300.1 (locus Gly ma08g21300) derived from phytozome v7.0 (chr-ID Gm08; pos 16173573 to 16174097)
actatcctcattgagcaatctgatcactttggtaaatttttttgtttgtttgtttgtaatctttattttttttaagcaaaatatattattattactattgttaatattctctgagaattatagaaaaaattctatattttagtgtaatattggcaatataggtttggtagtttttcctgactttacaaggggcatgtcttcatttaagctaaacttttttctcataagaaaagtgtaatctttgtaattatcagttaatgaccgaaaaaaaagaaagtgaaaagaggtttcgttcctttaatttatagtttaagaaagaatggctttatctgtgtatttttccatgaattttgtaccgttgtgttgtgatagtaattggtgcaaaatctgtcttttttcggcctgaagcacacgtacttttgatttggaagtgcaaaaatgtcctccaaattgtgtgctttttcagttaataggtttttaaaaattgcaggggctgaagtagaggcaaagactgaaccaataaat

SEQ ID NO: 22601 - DNA, 311 bp, Glycine max
  Intron number 2 from transcript Glyma08g08280.1 (locus Gly ma08g08280) derived from phytozome v7.0 (chr-ID Gm08; pos 5923900 to 5924210)
agcatcttcttttgtttttaaaaaaagtaggaaaagtaaggaagacaaaattgagagtccatttttcttttctatcctttagttaaaaataaaagaaataatatggggtgggaagtaacttcaagtatgattcatgattgtatccaattttccatccattcccacggccatgttggaaaaagagggaaattctctacaatactttaatgcttgctagggcattagaaaggaaatttcgtcgcgatcttattttcttcaatataaattttggttttatgcacatttgtttctttttctcctacacatgagtg

SEQ ID NO: 22602 - DNA, 972 bp, Glycine max
  Intron number 1 from transcript Glyma05g20930.1 (locus Gly ma05g20930) derived from phytozome v7.0 (chr-ID Gm05; pos 25133956 to 25134927)
tgcagttgctcccatcaaagatcagggaagttgtggtgagttttttttttttttttccctatcattttgccttttcttttgataaagtaatgtttgttagctaaggtttaggttagtaaatcagataaggacttgttttaaattcaagcgtaacagcttttttgcttgctaaggttacttaacagataaggatttgttttacattcaactataatagctttctctaactctactaaaagatacttctttttttttaatggtttttgtagatattttacattgtttgagattatatttttaacactataaataactaacttcttttcggtgtacaaataactaacttgattgcaaagaaaggcgtgtgattaaattttaaaactctaaattgaaaacatatataaaaaataaataaaagtggcatgtcttactttaaaataaaaaactacaattgaaggaaaatatttcaatttaatgtgcctgaatagattttatgtgtttatatgttgattgacgtgctatattatttatgttttatgtggttcttgagattttcttctgttagaataatgttacctaactttcctaaaccaaaaaaataaatgtaacgtaagtttcttttaaacaattttttttattaaaaacttggaatgttatggtaggtttgatttgattggagtttgactttgaagggtagatttggatcttgcaattggaaagactgttagatcctatttatttatctatgaataattttaaaccttttatttatttttcaacattcagataaatattaaatacgttttatatttttaagacattaaatatataattttttatttgatactttttttataaaagagtacgaagattaattaatagaaaatataatttattaagttattctttttttattttttaattttactttatgcaggaagttgttgggcgttctcaacggtggccacagtg

SEQ ID NO: 22603 - DNA, 398 bp, Glycine max
  Intron number 1 from transcript Glyma06g14530.1 (locus Gly ma06g14530) derived from phytozome v7.0 (chr-ID Gm06; pos 11414160 to 11414557 reverse strand)
tccatcagttagcggttcaggtgctgaatattccggtatattatttctcttcaatacttcaccatgtcctcatttctgtttttcttttttgctttcttttatgtaatttaatgtttatttgtcagtacccttaaggggttgttgcctttcttttcctttttcttttgatttgatgggaagaaatatcaatgaattataggagagaagaagaaaaaggcctacctaagtcctctaattttctgtattttttatgctagttcctagaacatactagtaaaaataaaaggcgatgaaaaattgtcaactgagatttttttttttttaattagggaaaagtcattatggttgttaggttacttacacaagtgctttatgttgaacccatttcttcagagcag

SEQ ID NO: 22604 - DNA, 321 bp, Glycine max
  Intron number 1 from transcript Glyma05g29680.1 (locus Gly ma05g29680) derived from phytozome v7.0 (chr-ID Gm05; pos 35222718 to 35223038)
aaattcataaggcttttagtactcaaagccatccacatttaaacataggtcttcacaagttttgattcaggatttgcatgtgactagtttgaacagtttcttctaaatttgacatttgaatgttatgcaatgcaattataattagagcaaatggtcttattagttgaagattagagtttgtttaatgagtaatgacatatcatgatttagtctctgcaagttgtaactccttgcacacgtgagcaaattacgtatttattccttttgaaataatagttataaaaccatgcttttctttgtatacagatcctttcaagtttg

SEQ ID NO: 22605 - DNA, 398 bp, Glycine max
  Intron number 1 from transcript Glyma06g07060.1 (locus Gly ma06g07060) derived from phytozome v7.0 (chr-ID Gm06; pos 5102325 to 5102722 reverse strand)
tttcgtacatacaagctagaagacaaagtaaggcaaacaagcttgcccaattcataatttgacggtgcacaatacaaaatcaatacaacattatttagacacgtacagtagcacatgaacaacctccctctataaataaaaaaatgaaaaacacaacaatattaatctatatattgtcaaagaaatgcttacgtaggcactcaatcaatttcatgttaagtgcatatctaaacatttctctgacggcagatcgagacgatgagagataactcgacctaatttgattaatatcttaggagggacattggaaaccaggaggaacagttttttgacaagcactaaggatcacgctgagcgtgacaggtacgttcaagtttattccaagcacattggcctta

SEQ ID NO: 22606 - DNA, 599 bp, Glycine max
  Intron number 1 from transcript Glyma08g23720.1 (locus Gly ma08g23720) derived from phytozome v7.0 (chr-ID Gm08; pos 18076007 to 18076605 reverse strand)
ctgttgtcagatcaatccacaaccctcaattgttggtctgcttcttctccctaaaaatgctttctttctttcttttcccttcccatttaatattttccaactataaatttcgtgccttctttcctttcattttcatcctctacacttggatgttttgtttttctgattattctttcttctgatgcaaaaccaaaactattcctttacctcagggattcatataaagtctatgctttcactcaaatgctttaagtgcctgcaatctctttttgtcttatccgttgcaaagggaggctttccttgctgctggtttgggatacttttacatttttgttttgatatgcttatcacgtttaatttcctagaaatgtactttaattagaatataatgctgcacactatcctttactagttatggcattatactttctgattttatgtgtagtttgttttgctagaagaaattcctgctctccctagtccagagttgataacttgtttttactatgtggttgttgttgtttttactgctagttttctatggatacttttaatcatctttctgccatttcctaaggtgttttggctcttcctgtatc

SEQ ID NO: 22607 - DNA, 568 bp, Glycine max
  Intron number 1 from transcript Glyma06g27640.1 (locus Gly ma06g27640) derived from phytozome v7.0 (chr-ID Gm06; pos 25700832 to 25701399)
aaaattgagctttgaaccagccttttccttttgaggttgcagagcctctctctctctctctctctctctctctctctctctctctttctctctcgttttccacaatgcacaatggaatctcagagtttcgaggctctgtctgcgaaactcgtttttgaaacttatcagcaacatggaatgctacccttttttggctccattttgaacccctaaactttctttctggtcaaaaggtgaacccatttttacaaaccccctattattggattcgagctttcttctgggtttggggctgatttgaaattttgagggttaggtgttctgttacactggctcttaaagttgaggttttgagtgtgtagttgtgtgatttgaggattttgagggatacccctaacacagctcttacttcagttagttcattttggatatgaaattttgagatctgttttgggagtttggggagctcaatcactgtgcacttggtgtttgtcaaaagtttgatattggtttccttaaagtaatgggaaaagaaaatgaggttttaagtgaattttgtaggtagctg

SEQ ID NO: 22608 - DNA, 644 bp, Glycine max
  Intron number 2 from transcript Glyma06g27640.1 (locus Gly ma06g27640) derived from phytozome v7.0 (chr-ID Gm06; pos 25701932 to 25702575)
caacaagaggtgtgcttgggtcactcctaatactggtttgttcttgttcttggctttttctatattagtacttattgtaaaataacataggccatagatatatttatgacaacgtttatactaagttttcagccttttggcagatgctttagtttcttttgaatgtagaagtactctaaaaaatatgtacatggtagttcattttaatttggcatgcgttaatttagttgatcttgtgaattgtgctgttctcatttaatttaagttttaattcttggatattttggtgttacataaagtaatatagctccatttgggtagcctactttttccatataaattatcaaatgagaaagaactctggtttattaaaggtgctttttaagataaagttccttccatttgcttgtgttacatattgatgcattaaatgtttaccttgtttttaatagatgtttttgcacattgaagagaaattcgggaattctaagctgttagatgatatgaacctaatatgttgatggatatggagtcaaccatatctttcatagtattccaccatgataccgagttctaagttctgaactaaactgtttttcattattgttttattttctgaccaagtttatctttatactagaacc

SEQ ID NO: 22609 - DNA, 1047 bp, Glycine max
  Intron number 1 from transcript Glyma06g19320.1 (locus Gly ma06g19320) derived from phytozome v7.0 (chr-ID Gm06; pos 15539042 to 15540088)
atttgtctcatcttgctcttgacattggaggtattatatatagtgcttatttattacaattcatgtttcatgatttttggtatgtgaggtgaagtacatttttttggtagtttcttttaaagttttgttttttttttgtttgaaaattgtttgcccttattgcttcattcttaccacgtatgtatgtatgttatatgatgatatttagttcggttcctgttgatgccaagtggtttttgttgggtttctgttttggtgggagtttagagttacaattggcaatttctgtcatcttttgagaccttcccttattaaaccttaaagggttctttgttatctttcttctcgttttatatcattcttttgggttttagaccttgttgtatcccttattactggtatttttatgctcttctttaagctctgtctcggggacagtgtctagaacagtttgttttttttctatttgggttcttcacagttttgttttatacttaatgaagtataattggtaaattgaccaaattctgtattagttttaaggaaaataaatggttggtagcatgtgaaatatgtctgaactcggaaacttactcttatttgattatatgcgcaggatctctgataaagttggtgtacttttcaagacatgaagatcaatcatgggatgataaaaggaagagaagcatgaaggagccattggggctttctaatggtaacaggagaagcttccctattcttggtggaaggcttcactttgtgaagtttgaaacgagaaagattaatgagtgcttggatttcattcattctaagcagcttcactgtggtggtatatagtcttgcttagcttactacttttatcagtctcttctccacatttgtttgttaaaatagtactattcaatatcattttacaatcttcttagtcctatgctaatcaactacattcagcaatacatctctaaaaaattttttagcacatgactggatgaattggtaattttgaacttcatttcttgcttatagggttggagtcacattattctg

SEQ ID NO: 22610 - DNA, 569 bp, Glycine max
  Intron number 1 from transcript Glyma06g03760.1 (locus Gly ma06g03760) derived from phytozome v7.0 (chr-ID Gm06; pos 2650203 to 2650771)
ccgatccatttttcttagtttttcgctttcctcaggttcgtaatcttctattctcctcttctttcctttatcgtttttgatttcatcttcttcgctgtaaatgcccccaatctctaaacccttatttttcttctaagtagaaattcggaatttttttttttttttgtgacaaagacgttgttattattatctagttttcttcttcttctttgttttccctacaaaactatgtgtggctattttgtcaccttcacctattcctgtttgtttgattctctctgcttgacatgactttatcatttttctttagagattttgttgcatttgtcagtttctctcaattccgtccaacaattgggcttcgttgtttacttgtggctgtgtcattgaaaaacgcgttttttgtgtgttatgaagcgacgcaatagccttttggttcacgaataccacatgtaaaatattgattattttatccctaagtgttctgtgcgaggattgtcgtgtgtaaccccgttatatatgttatgatggatcacttgttaacttgtgttatgatttgggttttgtag

SEQ ID NO: 22611 - DNA, 1047 bp, Glycine max
  Intron number 1 from transcript Glyma07g38570.1 (locus Gly ma07g38570) derived from phytozome v7.0 (chr-ID Gm07; pos 43281549 to 43282595)
tacaagaaggctgaagccagtttctggactggttcgtacttatttactgtttcattaatcattccataaactaaacttcattcctttcattataattttgttccttaatttccactttttcctctgctctgctttaataacatttcacttccacgcatgggaattcaacacagtactgatgttatcgaaattctgagtaatccattcccagcgccgaatttcaatttccatatttatttattttgtatgttgcctgagtactctgtttgtgtcacacatgtttcatgtcccgtcttttcaatatgggagatttgtctgtcacttctagatttcatttgcattctttttttcaacctctctgtctcaacgtcgtttggaatttgaatgaaacgagggtaggtatttaacatccatacagagccaattgactttttcgaaatagatttttcttttttttgtaggctctgatgctattacaaaatattgtgggattttgtttttcattctcccttatatatatatatatatggagaggagaatggggcacaaccaatgaagactcattcatgaggactacggcgtaaattttaaactgtatagagatgatgcaaatttttcaaccattaatttgagcattttaatatctattagtaattaaatcatattgggtttagtttgtgcagattaatgactacgtttctgataaaaccaaaaataaagtagaatatgatgctatgtaatatgaaatcatcacatgcttagattgagaatagagttgatcaaggtgcatattacactgatactgaaacagtattgcgtcttgcccactgaacaccttgaaataatactgagcattcgatttatgttttataatgtgttttatatatatttgaagtatatggtcactttttttttggcaaagtgagccacccttcaaagctgtaattgagccatatagtttttatgtgattggctggattaagcattctgatcattcaattttaataacttggaagttggttacagctgaagaggttgatctctctt

SEQ ID NO: 22612 - DNA, 632 bp, Glycine max
  Intron number 3 from transcript Glyma08g04890.1 (locus Gly ma08g04890) derived from phytozome v7.0 (chr-ID Gm08; pos 3487760 to 3488391 reverse strand)
gtcgttatttttcaaaggaagctattcaggtactttttcactgtccacttttcttgcttttgaatgttgtcttcttggcgtctcaagtatttggtttatcaattactttattcataagtgccggcaaattggtaacatttctttggaaaacttctcatttgcataacttagatgccttacaattctttttttgttgttgttgtcattttggaattgtgcttcttttctttggtttaatttgatttgtactacatctaacataggcaggcattttgactaatctgactgcaccacttatggcattttagatataatttatgatttcggccttgaaatttactagatcttttaattaaacaaataaaagtatacaggttaagatcttgtaaattataataacaaggagatggaaactaaaatgccattttccaacttcagagttttgtactctggaatagagacttgctttgtttcttttaacttcatacaccattggttacgcatctcttcacttatgactttcttatatgagaggatattcatttcatgctacatcacatgcttgtcttctaatgtcgatatcatatttcacatcactaatgattttaatgaatctgcagattataactaaa

SEQ ID NO: 22613 - DNA, 1053 bp, Glycine max
  Intron number 2 from transcript Glyma06g12140.1 (locus Gly ma06g12140) derived from phytozome v7.0 (chr-ID Gm06; pos 9376413 to 9377465)
tgccggatcatcccgcagctttcatatttcccctggtaggtaccgtacaatactatactatgcatcaaccttcttctttcttattaattaattgcctcttatcaaaccttagttatttgttatcatctttttatattatgttttctttatgtagctcatgtgtttgttatgttcattttatttgtaaaacatgggagaaaaggattaactttttttaagcacagtggtaaagttctattccttttttttttttaagtcaaattatgtgtttttcctgtgggggggggggggaatggtttggtcattggtgaaggattggctattgcatgaaattagggaaatcactttcattcactgctgtgtgattggctgactgctattggggaatgcatcccaaaaattgaagggtgagtcagaattagtggtaaatgggtaaatagtcctctggttacttctaagaaagataaattgcttaagttattcgacaaattatgatttagccatcagggccagattagttcagtaaggaaggctaattatgattttaccatcagtaccaacaccattgacttgggacttcaaaattatggttaccaattatcataagttgcaggatctgcagaatatagttacaaattgattttacaaatttgagaagtttcaacctaactatgcaggttttttttcacacatttaacaaatctactgaaaattttacgccaatcttgcctggccccttaattcgagtcaacccgtatttccgaatctgtttatttgatcaataaggccttttttttttcatttacacctgaagttctgagcccgacgataggtcttccttgtcttcacctccttgtttgccaagaagaaatagggataattgcatattgcaatttgcattttgcaacacaaattggaaaaaaaggagtttgaaattgcaattacctataggtatagcagtttcaagattatatagtggaatgttgacccaggtagcaacttcatttccttttgcttgtaattctgcagttcaagaaaagctgcttaggacac

SEQ ID NO: 22614 - DNA, 615 bp, Glycine max
  Intron number 1 from transcript Glyma05g24620.1 (locus Gly ma05g24620) derived from phytozome v7.0 (chr-ID Gm05; pos 30781692 to 30782306 reverse strand)
cttctaaagttgttgagagagcccacctcaacggcgtaagtttcaatgttctctcttcaatcattttgttaaagttggtgttttttatgcttagccttatcggaaagtactatctttttctagcagctagttacctttctattcgccagaaacaaaacaaaatactatcagaatttatttactcagcagaataagtgagtttgttattaacagatgagaaataggttgtgccctcttaatttcattgtcttttgttttaacttctcattttggtattatccgcaaatcaaagaatcagagtcagacaatggatcagtgtttatttctctatttgggattttctagaaatatgtgcattttcaaccaagatgtttgctaatatccctgtgactatttaatgagagatggtatggttgatagaaagtcaactgaaatttaaggttaatttcaatgtttattattcaataattctaaattgctgttacccatgatggtacaagaggattgcctaaggcatcaactgctgtgcatagggtttccttttttagtgataggctccttttttaattaatgttatttgctcataacaggtgaaagttcttgctctgacagatc

SEQ ID NO: 22615 - DNA, 316 bp, Glycine max
  Intron number 4 from transcript Glyma06g17940.1 (locus Gly ma06g17940) derived from phytozome v7.0 (chr-ID Gm06; pos 14267031 to 14267346)
taagtgcaaatttgtgcaagatcaagcacacgcaggtacataaatctcagggagtttgtgattgtgcttggaatggaagagttattttttttttgtctttttctttccgagcacacaccttggcactatgattttttgttttttttactgggttgttgtttgagatgtgaatgagaatacttgagtgaaggtgtgtgcttggttgggtttttttttttttttttttctttctttatagttgtttgaggtaaatattgtaggatatgtatgtgcagtatgattactgttgtttctggaaatgatcagcgcgagggaa

SEQ ID NO: 22616 - DNA, 770 bp, Glycine max
  Intron number 2 from transcript Glyma06g04730.1 (locus Gly ma06g04730) derived from phytozome v7.0 (chr-ID Gm06; pos 3347442 to 3348211)
gtcatcgggtgcttctgcattgtctaaaacaattctctggagaagacaatgaggtaatgtttgttcatggttttcttatgtactttatttgaattcgcacattcatttcctttatacaaataggaaattttggaaacagtgtggtgaaatcgtgtttggtgctaactataggaatcaaagttattttttagagatttttttttaatattttccttcatccatattttctcgtctgaagtaaattaacagtgatctgattacatagcagatttttccactcgtgtttaaggggatgatacctgattacatagcattttggatttgactttttatgcgatttaagttgaaagctattttcttggtttctttttttcccgttggtaggtctcaaattaagtttcttagtagaaatgaagtctatgtttaccatatcagattgtataaagatcttcaataccttcatgctactttattttatccattttaaagaaattttcttttaatattttccttcatccatattttctcttctgaagtaaattaacagtgatctgtttgttcttgtttggttaagtcctatcaaagtgatggaacttatgtagttttcatacaaaactcagtattctacttgtttaaagaaatccggaagaaagaaataagacgtattactcttattggatggatataaggcctggtttatcaaattaatttgctctggttcctggtttcattaagttctgattgtagactttttgcacagaatcttctga

SEQ ID NO: 22617 - DNA, 1029 bp, Glycine max
  Intron number 2 from transcript Glyma05g14290.1 (locus Gly ma05g14290) derived from phytozome v7.0 (chr-ID Gm05; pos 15057108 to 15058136 reverse strand)
ctttttcagtggctttcaagttatcaaagacaaaagttgatgacaacatgcgtgcacttcatagtatattgatagggaataaagcaaaggtgatacactaatttagttcctcggatggttttgcatttttttaacacatttcgtctttgtttttcctatgttttattgttttaattaagggttgatgaacacctgtgaaacctagatacgagatacgatacggatacgatacgacacagatacaacaaatttttaaaattaaagatacgatacgtcttggatacgttaataaaatatataaaaagttatatatagtttcagatttttttttctagaacagttagatttttcattggaatagcttcaaaatcatattaaaaaaaaatctagatatgtctagccttagatcccttaccttgtctatcctaacacagtaacccctaccccatcctacacccctaagatcccttaccttgtcctaggatatctttctatcctagcaagaatctagatatgtcttttctgctgtttatttaaaacaatttcgcataacacttgtgttaatatttaattgtgatttaattttaaaaattataaaaataatattcgaagatacaacatagaaacaacttgaaaaaggacaaaaacaagttccaagaacccattgtttgttgtacccaataactatttctattttcccataattataataatgcattaatgcccctatcccttgacttacaattaacaaaaacacaaaccacaaaagaacaaaccccatccatcattttcatttcaaaacttgtcttccacccttttttttccatcactactactcacagatccaccattcctttccacctccctcactccccttcaaatcagttcacattttcctttcacacattacttttacttcttccacctttctctctctaatttcattcaacaaaaccattttttttctctcactcactcacttcacacaatgaagcacccaaggggctgacttcgcctgccgtgacaccg

SEQ ID NO: 22618 - DNA, 576 bp, Glycine max
  Intron number 3 from transcript Glyma08g01180.1 (locus Gly ma08g01180) derived from phytozome v7.0 (chr-ID Gm08; pos 687837 to 688412 reverse strand)
aattttcagcacttggtgctgattcccttgacacggtaagatactgattatcctaaaaatttgttagttttaattcaaatgctaattatcataagcctttataccttgtgatataagctaagatctatcgttgactcaaatcacttgtcctatgtcctgtccctctaattgaagaagtttaaagtctaataagaattattatcttattgtcacattatatgaatgaatatgatttttttcttctataaatattagtttgttaattttgttaaaaatgttagttgagagatttaaacatgcaatgatctatttcttcctttctcctatcacttaaccaaatttatatctccatatgaatgaataggatattgtgatgaagtatttaaatcttagagcttaatttttatacaatgttcgtataaataattttataatgtcaagcaataaaagaaattattatttgcacgaattttaaaatattaattataagaaaataacaaatttattattattataaattgtgatcggataaaaatcaacatttgattgtttatgttgtggcaggtggaaatagta

SEQ ID NO: 22619 - DNA, 556 bp, Glycine max
  Intron number 4 from transcript Glyma05g09040.1 (locus Gly ma05g09040) derived from phytozome v7.0 (chr-ID Gm05; pos 8877887 to 8878442)
tgactgaaggtaggttgcctctttagttagctaattccttgctgcttgactccgaggtgtcaacaaggggggcacattacagcaccttaagagagcaaactccaaaatatgaggacagtatgggcataataaactatcttagtttcagatcctagatttgaatactgctttacatatatatgagagtaatgtttatgatctgtcagaggttagctcaaatattgtacatggacagaggtacctgaagttattgtgttgtacctatcaagatttcttctactagaaattcttatgaatcacttggccacatgtaatttgcatttgtgctgatgcgaatgatatgttgtgtttgtatgatggtgtgcaagtaaattgactattttcattatgactccctttctccttctagagctctgttaaaattaattttagctgttagatcctaaaatcattttttgatttcgaaagtaactagtaaatcatagaatagctgtggcgaaaatggaaatttttctttggatggtattgtttttaatccagagatgcacttgtgcag

SEQ ID NO: 22620 - DNA, 643 bp, Glycine max
  Intron number 3 from transcript Glyma05g26970.1 (locus Gly ma05g26970) derived from phytozome v7.0 (chr-ID Gm05; pos 32862257 to 32862899)
ttggcattggcaccttttgcttggttggcttgcaggtattagtctatatatacaatcttaaacttttttcgtgagtactcgcgggagaaaaaataaaataaatcgagttttttcataaattaacatcaacttatgcgtctcaacttttaacagaattagataataaaacttctattaaaattaactacacgagtttgttttatatgaaaaacaaaagtttaatttattttatctttttatttataaatgcttatgaagaaatttattttaaaaaaaacatttatgtacatgatcctaaataatgaacagatatgattttaactgcagtgacaatctaaaaatattgagtaaattatatagacactctctgaaactcattgagattgtatatagtttcatgcttttttaatatttacaacattctttttatagaggtacactatgtaatactatttttcgaataattaataagaagtgtcatgtgtaatgtttttaaataattaagaagagctagtgtgagagtacaaaaacaaaagacatcagaacaaatttgacaaaaccttagagataatttactcagtaatataggtcatataagtcaaaactttaataattgggtcgtgattgttgggtgcagtggctt

SEQ ID NO: 22621 - DNA, 570 bp, Glycine max
  Intron number 2 from transcript Glyma06g47840.1 (locus Gly ma06g47840) derived from phytozome v7.0 (chr-ID Gm06; pos 50225508 to 50226077)
ttattgacaccccaggtgaaacataatcgtgcaagtaatttgagttaaagaagtgcgattgcataactaattttgctattgcatcatccaaattttatcattataaatttaaggcttaagtatattctagattcctagaaaaagtagtttatggttttagttccaacaattttctttttggtttttgttccttgcaaatttcgttgctacttgttttggtctctaccatgaacattagcaaaaacatgattttacatccttgcaaatataacaattttgtttttatgttctagcataatatggtgaattttgttttagtccctataaatataactattttttgtttttagtacaagccattatgtccttgtaagatatattgatttctatttgcataagggccaaaacaagtgatgaagatcattgaagagatcaaataccataaattattattgtggttataagtaagaataattatatttgcatgaacataaacatatttaatcctaaatctgaaatctaaaaagttttgtaggactatttgctggaactgattctgctgggaaggaa

SEQ ID NO: 22622 - DNA, 991 bp, Glycine max
  Intron number 2 from transcript Glyma06g16110.2 (locus Gly ma06g16110) derived from phytozome v7.0 (chr-ID Gm06; pos 12671546 to 12672536 reverse strand)
cgccattatcagaatatttggagttactaaggaaggtttgatcgtgtttctgttttcttccatactgcaaaatttggctgcatagacaattgcagataagcattgctggtttgtctgcttataatcttgcatggcgttgtagggaaggaagtaaaaaagaatgcttgcttgaggatgtaacgattgaccgatttagaaattagaaacaaaacactagtagttgatgatacatttgagcgtttctgttgttgggtttctatcagtaaaccagtcagtttgcttttaattggaggaatggattaaaccttttgttttttttacttgatccacttatcaacaaatttgccccaaaagtcttattaaaagcataatcaatagatataaataaaaaataatgtatgaagtttcatatattagtagaaaactaataatctataaatatgtgaattgtaggcaatatatgatgcacgactaactacacaatttcagtctgggtttcataattgaaaactgaaccaaactatatttacgtaaaggaaaccaaacttatttgtgtttgtttggccttttgattgccaaattaagatttatcaacctacacatatagtttgtttgagtccagatatgaagtgaccaatgcttcagaaaggggcaaattgatgctctgacaaacttgtgctgaatatatctggtatagctgaaatcaaacccaacatcatgcttggattttactttcttgaatactcagttgccttcttacataattcatgttatgattttccaattacattacatgtatgaatttaagtgctcagaaataatctgttttaatagaaccaatcaagtgtttatttgaaaaaggtggtgtaaaaattatatatgattatcattgtacttatgattatggttctcaagtcaaccatgcagtgccttacaggaattatataataaacatattttgtttgtttgtcaggacacagtgtttgttgca

SEQ ID NO: 22623 - DNA, 489 bp, Glycine max
  Intron number 2 from transcript Glyma06g47800.1 (locus Gly ma06g47800) derived from phytozome v7.0 (chr-ID Gm06; pos 50192030 to 50192518)
tcaattacacgctccaggttttttccagtccttttctgtaacaagtaattttgtgtttgcttatactattgtttccagtacttaatgtttccttagaagattggatggtattatgccttgatgacagaagttgtataagaattgagtccagaaagttgtatcccctttggccagctgatttttgtctcacattgtttcttcatttctggttttagttcaattattgtaccattcttctggtcttataagtcataaatgcaaattattagatgacatagattttatatttttaggtattaaaggttttgactttcagtaccttaagtcctgtattttcctttccaccacattgatttattatataccgatattagttttgcatacaattggtatatgtggtaatgtgcttgtttgataaagcagacatccaattccatgtagttgattgtttgattgaataattacagaaagcatattttaagtgtgcat

SEQ ID NO: 22624 - DNA, 822 bp, Glycine max
  Intron number 2 from transcript Glyma05g22320.1 (locus Gly ma05g22320) derived from phytozome v7.0 (chr-ID Gm05; pos 27403282 to 27404103)
tcattaagatcctgaaacccgtgaagaagaagaaggtgagttatgtgtgggcgttgacgttttattctttttgtgacgttttggaatttttgttccgatgtcttggttgtggttacttttcgattcgagtttcataaatgaatgtgttttatgccaataatcatagactagacaagtcatgttattatattgggggaagcgtacaattgtagagtggtattttatgttgtttttgcagttgaaaatcaaacgtttctcctgccaccgttaatgtgttatttattttattttattagttgttattgtgtgtgtgggaaggtggcttgggttattttattttctgggaaatcaaattgaccataagtatcacaaacttgagagaaaaacttggcataatcaaattcaaacacaaaagcattagcatcatagtcttttgacaattctgatgatgtgggtgaagggtctggcaccgaagatgagctatccttgatcaccaaacgcatcagaaagatgtggaaaaggaatgacaaaggataacgacctttcaggaagaatttcaagggaaagacagagttagtttgtgtatattatcggatgagaatgtcatgcaagtgaccatagtgctaaagagtagttctagttacttccatttggttactcagaataaagatgctctagtagcagagggctatctagttgtttattttaaagtataataatgattgtcttccatccctctggttatatatatatgtaactttgacaatgattctggttctgaatgcagatcaagagggaaatcaaaatattacagaatctttg

SEQ ID NO: 22625 - DNA, 428 bp, Glycine max
  Intron number 1 from transcript Glyma07g16810.1 (locus Gly ma07g16810) derived from phytozome v7.0 (chr-ID Gm07; pos 16488597 to 16489024)
ataaggtaactcaacatttcaaaaatcttcttagttttcatgatttgtgctgatttgtcagcaaaacatcacgatgaaatctatatatgtgaaatctttctggtgtggaatatatatgtgaaatctttgaatatgttagagaactcaaaagtcaacagccaaccatgatttttttttaatgtatcaactttttgtaaaacaatattagtgatttgaaactttatggaatcatatactatgattttgggagaaattttattttattttactatttttatctggggtggggggattctgtcacgtatttgtttctatataactcgatctaaattctgtttgtcctaatcactttatgaaataattactaataaatattgtgatttgcgaaatcagattgtgggtgctgtatcgaaatctgttttcacggt

SEQ ID NO: 22626 - DNA, 649 bp, Glycine max
  Intron number 6 from transcript Glyma07g03890.2 (locus Gly ma07g03890) derived from phytozome v7.0 (chr-ID Gm07; pos 2729307 to 2729955 reverse strand)
attctaccatcaattcctaaagagtatcataacaggtagtagttattttcttttatgttattacagaatgacctttactttcattatttagaaattatgtttgatatgttttgagaaaggcttttttgtaagggatatgtgttataacaaaatgggaatttacttcccaaaataacaaaacttctatatatcaataattatcatgcactacatgccatttttttattttttgcgagggaagatctggtctgatcccatgagtaaaactgtcaaccagcttataaatggaagtggatcatttgtggttgagtggagaatctgacactcacatggtcataagttttttgtttgcttatgaatgatactttgcttcttgggtactttgatatttcattctggactcgctgtagtcttgcttgttcattatatatctttgcttcgacgcttttatcaagttaatgtataattatatgaatatataatgcattttttttacttgtgtccttaattcagaatatttttctatctgcatatggtgttttcttggctttcattttcaatgtttggtgctcagatgtcacatatatcctaattgcaattttttacttgtttttacactagtgtggctcgtttcctggaatcacgaggg

SEQ ID NO: 22627 - DNA, 600 bp, Glycine max
  Intron number 2 from transcript Glyma06g14940.1 (locus Gly ma06g14940) derived from phytozome v7.0 (chr-ID Gm06; pos 11723768 to 11724367)
ctttttggagcaggtatttgatttaattaatatttgtgtgtgtttttatttctataagcttaaatatcactcgtggtactttatgtttgcacaatttatgtatgcttaaaattgatagttaaatgtatcttttatgttgttagtcttagttgcgattgtgggtatatgaagtgttagaactgtcatttataatatatatatatatattgctcttttttgtgtttcaaatgtcatgctgacattttagactcattttcctattatgtttttatatatgtatatgctttgcttccccttatttagctatgtttctagggtcctgcaaagccaaaaataatgtgaatgattgtgaagagaagaacaaaaaaaattgtctcgattcagtcaacttgctttttagtggcctcaatgtttaagttaattattcatttagccactttccattttcttgataaatgtttgttgtcaattctctctcttcccctataatttatctatttattattgaaatcaatttttctattcaggctttgctaattttttttaatcaacaacaaatttttaggttgaccaacttgctggaaagaaccatattttcaa

SEQ ID NO: 22628 - DNA, 847 bp, Glycine max
  Intron number 1 from transcript Glyma08g24980.1 (locus Gly ma08g24980) derived from phytozome v7.0 (chr-ID Gm08; pos 19187590 to 19188436)
cttcaaacactactcagatcaacatttcaagaaaggtcagttttcaacatcggtctcatccattaatgtttgaatatttatattcacagtttaaatttacttatcatatatcaattagtttaatatatgctgtaaaaaatacataataatattatccgaaagcttcaggcaagaaatatgtataaaaagttagtatattcaaagccagctcatctcaatttttcatctctacttttaaggtataccaaacagaaattactcggagtattttttttgttttaatactcagaatttgtctatatacttttacacatgtatagagcaacaactagtacgatgatggttttaaagatgttctatcctagccacgcataattatttttcacataaatatatttttttgtcgatctccacatatttagtttttttttgtagttttatttaaatttaattaatttaaatctctaatatttaatagaaatagtgtatttctagtcgctcactattgaagacttcgaacattgtaactaaactggggttgggtttagtacaagaagataatctcccaaaaaattatgaatcaatgtctaaatttctgttagtggtgatatttacattcggtatccaacattatatactttaaacaaggttgtctgtctacaaataaaatttaaacaaagattaatttctaaattaaacaaacaagatatatactatcacaaatattttaagtaatgaaaaacatacttaaacataattttttatatatttttatttcagtaccaagacttactaattaatttattaattacattccaatggttgttgtacgtttaggtgtcagaga

SEQ ID NO: 22629 - DNA, 434 bp, Glycine max
  Intron number 2 from transcript Glyma08g39290.1 (locus Gly ma08g39290) derived from phytozome v7.0 (chr-ID Gm08; pos 38800891 to 38801324 reverse strand)
ctttccaccttcttgcttcccttactcatcttgaggtgttttggttaccttttcaattctatgttttttctttatcattagtagtacttgttggtgagttcattgacccacattttaagttgaaatatgtgcttttgatccatgaaaaaaaaaacatcacggtttttagttttagcttctataaaaactttaatattcttcatctctacatttaacaaaagaaataacatgtctcttactacacatgtttttatctctacattttgttaatgtagttgagtctcttactacttatgtttttagtacatgacaagggatgaaaacaacatcattttgtcatgtagaaattaaaaaagaataaaattttgatgaagaataaaaaaatgtgatattttttcaaacaacaaaagatatttaaaccttagtttaacttg

SEQ ID NO: 22630 - DNA, 646 bp, Glycine max
  Intron number 4 from transcript Glyma06g37080.1 (locus Gly ma06g37080) derived from phytozome v7.0 (chr-ID Gm06; pos 39471405 to 39472050 reverse strand)
ttacatcctgagcctaatagtcgtccaacaatagggtaaattctcttcatcacatgccctttacatatgaaatatccaaattattttcacatgttccaattaccttccacttgtatgcattgttttctttttcctttctgttatgcatcatgcttaactgttgattggaaggttgacattcggctaattggctaataattttgaataaattaagatcttcaagatggtttttcataaggaccaacactgaatttaggtcttgagattatttatagtttagggtttgtgatctgcatttctccttgatggattcaatatggagtttgtcttttagatgttcgatcatggataaaagtagtacaaccaaacacacagggagaaaagatcgaatgtagagattgagtgggaaacaaaacaggaaagagaaactgattttgcataattgaagatgagatgcaatcaatcaaatagcatgtagtacaagtaatctcaatcaaatgacacttttcatccttagtgatgccatctgagtgatgtctcaacaatgttcatctaaatttctgtgattgattctacatcatcatcatcgttatcatcattattattttattgtgctgtagggagttgttgcagagtgagtttctta

SEQ ID NO: 22631 - DNA, 660 bp, Glycine max
  Intron number 1 from transcript Glyma08g01390.1 (locus Gly ma08g01390) derived from phytozome v7.0 (chr-ID Gm08; pos 863215 to 863874 reverse strand)
ttcacatcactggtgcttcctctggcattggcgaggtatctataaatctgtcatcttcacccatataaatctgtcttctaaaccaaaaaaaaaatgtcaaacaacttttacttatttttttaagttctaacttttaacttaaactttaaaatcacttttaagccaaaaataagtttgacaaacataccctaataatctactaataaatataaatatgcaaccggtcagaactcagaaacatacttttcagtatgtaaaagtcaaaaagcttgatagcttttttatgtaaaataataatatatattatattcattaatttagtatataattttatatataaagtaattctatgcaaagttgaatttcttgatcagcgctaaggcactaacacgtatccagcttccaaaaccaaaagtgctacgtgttgtttcccctccatgcaaagttaaatggctacgttaaagctgaaaacaaaaactatctccagtttctgtttgatccgtctcaccttttcttttcttcaaccgaaaccatggttttcattcatgaaatgttgaacattctagttccccctcttggcctggttttgctgctcctcatgttaccgccctatctgttattcaagattctccgcttcatcgtaagatcaatttttagtga

SEQ ID NO: 22632 - DNA, 623 bp, Glycine max
  Intron number 2 from transcript Glyma06g45360.1 (locus Gly ma06g45360) derived from phytozome v7.0 (chr-ID Gm06; pos 48106982 to 48107604 reverse strand)
tagctttcaaggtgcggtgcatatggctactattgttttattcttgtgttattggattcagaaagtggtatttgactagtagctttgtcatgttacacataagataaaattggagactgattgtgcttagttagtttggccgtgttggaaatttagaatgttgccgacactatagtcaatttgtgttgacattcttgggaaacatttagctttgattcaactttctacaatgacgaaatgtgaggtcaaaagtgtcttagctggactgcttctccaactgtggcaagactggagaaacatttctttagagaaactagaatatttcttaaaaattaacagttttcattaaaattttaaaacagattcaaactcttgtgaaattttgctataattaggtgatatttggatagataaaaagtttaacattttgcacatgattatcttcatatttggtgtccctgcttttattttgtagtataagtacttctattgttgtgtattgactttagtgaaataattataccatcttgttgcttgttctatttatcctccgttgaggctactactaatagtgttgttttcttttgtcttagtttcaaacaactgcacccaagagttgttat

SEQ ID NO: 22633 - DNA, 550 bp, Glycine max
  Intron number 1 from transcript Glyma06g45360.1 (locus Gly ma06g45360) derived from phytozome v7.0 (chr-ID Gm06; pos 48107665 to 48108214 reverse strand)
ccgtcttgatcctcccaacaagctctactttccttgtatgtctctcattattaatctttttgctttttttttagcatcagtaatctgttttgtgtttttgtttcattaactaattcaaagtgtggtttgttgtatcttgtttccatttgattgcttgagagtggattggtcatgactaatgtgcccattgtgagtttagtttttggttaaattattcatttggcccctataattgtctccttataagagaaaactaaaagttttaatctctacacatggataaaagttaaagttttggtcttgctaagtccagagaagaatttctagtagtgtaaaaccatttcaaaaactttctagctgtgacccctaccaaaatagtatgtgtagggactaaaaatgaggatgagtataaggactaaatgaatggtttaaccatatttttttgtgtgtgctttgttgtaatgcataggaagaacatggatgtgtggagtttgcactggatgttggttttgtctcttgtctgatatgatctgtgacctttgttttgaag

SEQ ID NO: 22634 - DNA, 860 bp, Glycine max
  Intron number 1 from transcript Glyma05g35590.1 (locus Gly ma05g35590) derived from phytozome v7.0 (chr-ID Gm05; pos 39574088 to 39574947 reverse strand)
gtgttattgctctcggaatagtcatcgaccttgttgtaagccaatactactattcctacaactccttattgtgcatgttgaacaacttatttgcagtttaactacgtaggtttatcttaattataacataagcaaagttaaaaaaaaaaaacttataatatgttcataaattattttgttgacggattcaattcatctcaagtaataaagttaaaacaaaagttccattatcgaatttaaattgactttatttatttttaggtagatgaataaaaaattaaagaaaattgaattgaaaaaattatgagaaaaacaataatttaaattgacagaaaattaaatcaaataaaaagagaaattaaacaagaatttaaattaattaattaaaaataaaaagaaaaaaaaacaattataaaagttaaatttagaagatgaaaatattgaaaacttaatctattaaagctactccttgatatgtaatattaatgatttttctctgttaataattattccaatttatatatatatttattaatatactctaactttgaattagtctgatttttttaattattcttgatttcttgtattttattctactcattaagtatcataaattcatcatttttaatattctctatacaaaaatttaaataatgttaatttaacaattatttgctaaaaaaaaagaattagaaaagaaaaaattataaatttttatataatttaaccccaaaatatattcgattattatatttttaacttatttcaataaattttctaggatgacttaccaaaataacttacaacttatcttcattacagggcttagttgtgttgtggctcactgctatttttag

SEQ ID NO: 22635 - DNA, 685 bp, Glycine max
  Intron number 4 from transcript Glyma05g34900.1 (locus Gly ma05g34900) derived from phytozome v7.0 (chr-ID Gm05; pos 39095443 to 39096127)
gctgaggtacagatgttgccgcccccctttttttccatttttttttatcagacatccaccgtaagtttggaatattggattctgaaatctgaacgaaaaatctctgggactttgggtctgtttggtagagaggagagaaatagagtgaatgaaaataacaaggatgagtgaaaataggtgaaaataaagttgaaataaagttgaaatcccaagttgaaaataaagaagagacgaagaaagagatagaaaaataagtggaaataagtgagaaatagtacactaggtcccgtcatttttaaaattatttgcacctttttctcctccttcaaacacccaaaattatttccatccaccatgacaaacaagggggttagagatgatttttcttttttttttttttgaattactgaattctcttttgaaaataatgttttaagtttttattagaatgtgtaaatagagatcagataccatttttgagattgtatagataatctgatgggttttaaactaaaaaatgttgtagttttgtagtaaagcatggaagcaaaaattggtgattcttattatacatgtgacttgggatattgagctgtggatattcctgtcaattttacatgttattgtataactgtattcttattataatattttatctggtgattttggtgtttcagagagaatt

SEQ ID NO: 22636 - DNA, 962 bp, Glycine max
  Intron number 1 from transcript Glyma08g20250.1 (locus Gly ma08g20250) derived from phytozome v7.0 (chr-ID Gm08; pos 15318468 to 15319429)
agttcagtaataaattaatagatcatacttgtcagttggctatttcatactccacaatacttctgtttttaatttgttattttttctaatggtttcaatgaagtctgagacatatagaacccgattcaaactattcattcccttgaacttaaagatggcttaataaagagtttttaatgaactaaaacaaggtttttcttgttctctcattttaagaagagcatgataatcgtacatcacattttaaattgggttattatatctgtacactttttcttcatctcactcttatttcatttttttcacctcttttattttcccatcaccatttgtgagtgaatgttatagtaatatttttcttttaagaaaaggaaaaacaaaaatattatttgaaggaaatttaattacgacctcaactacggtcatgtgtgttaaattaatatctttctttatcattttttattttaagataaaaataattttttatctagatcacagtatcttttatttgagacaattctagataaaattatatatatatatatatatatatatatatatatatatatataaaagtgatattttaacaactttttccttaaaaaaaattgttatatatgtatataattttatgacaatctaaaatcagtttttataatcaacggtttataactataaattgtacctctaaaagtgtgttagatacttagattcatacacaagccacttggatgaacggaaatgaagtaggaggaaaaaacaacttacacattttttgtaattgagctgtaaaagacttgatttgaatagctacatgattagtcatcagaagtgttacatgacaatcatccttgctgaaaattgaaaatcaacttcaataattaagaatttgacgagtgcaatttttttttttcttattttctgtaggaagtggaaaagggaaagttggaaagcaaacattt

SEQ ID NO: 22637 - DNA, 1039 bp, Glycine max
  Intron number 1 from transcript Glyma08g09810.1 (locus Gly ma08g09810) derived from phytozome v7.0 (chr-ID Gm08; pos 7019398 to 7020436 reverse strand)
tcacgatatcgaggctgcagaactatccggtttaggtattttcatccattttctctcactcacgcgcctctatgttgtgtcaattttaactttcctaatttcaaatgcagctagtgggacataggtcagtgatgatttgattaccaaattttctggggaattagaatctatttatagaaagctttgaggggtgatgtgattgtggtcctagctgatgtagggtatagggtttatagactgatgcagattgcttcgcaatcatcgtagacttcgaagttataaagcctgcgttagtgcaatttataatgtaattttcacttaaattggggtgatttggctataacgtaagatgtatcaaactcacccgaccgtagctatttccctatggatattgaatttttctattaattaatttatgctgtatattatgggatgagttactaatcagatagaaaattatggaggcaattcttgtatttagaagtgagataccacttggtaggatgagggactgctagcttagctccaattagctggatttccaggatgtggaaaactctgtttgtttaaccgagtcctgtttagaagatcgtgcttacagttttccttgtccaacagagctgcaattggagtaattcaacttgagacataccacttcttcaatacttattcaacttgaatgctcttctcccccattaagcttgtgcagatttctgtccattaaaagcagcctcctttaagtagacttttcatcttagtaacaggaaatgaaaagtcccattcgtaatgacatttggaaactattacttttgtatttggagattaagattatatttttcatgttatcttcttcagacatttctaatagaatgcaattcccatataacatttatatttttggataagaaaacggacaacaatagcataagatgtgtgctgttaatgctattctagctttctggaagctcaaatctacagattgtttcagatttgatatttatatagttcatttgtttttttattttaggcctttggttga

SEQ ID NO: 22638 - DNA, 227 bp, Glycine max
  Intron number 5 from transcript Glyma07g05410.1 (locus Gly ma07g05410) derived from phytozome v7.0 (chr-ID Gm07; pos 4084805 to 4085031 reverse strand)
gcagcgcatagaaggtgatagtgtgtttatcatttctacttgaagatcttctctttttcttcctttctaaacattggtgtaacattctagtagaaaatggatcttcatatttgatttattcttgattggatctgtctttttctttattccatggcttggcccccttcttggtgtttcacttctgctgtacagagcatataggaacaaagactgccgtgcaaatcagg

SEQ ID NO: 22639 - DNA, 299 bp, Glycine max
  Intron number 3 from transcript Glyma07g05410.1 (locus Gly ma07g05410) derived from phytozome v7.0 (chr-ID Gm07; pos 4085403 to 4085701 reverse strand)
gtttgaaaggttttggcgctctcgagttcgttttggtgaggattctgattaaggaaaattttcttttattctttggaggagaagcgtctctctctctctcactttctcccgcggatgatttttgaaatttgttgaaattttattttcctttttcttctatgtagtactgttttatgtgtgacatgtgaattggaatgcttattccagcttatacaaaacagagacggatctcttcctattgttctcgctttgtttcttttgcagtaacatcatcaccataccttgttcagattctgctc

SEQ ID NO: 22640 - DNA, 594 bp, Glycine max
  Intron number 3 from transcript Glyma08g15920.1 (locus Gly ma08g15920) derived from phytozome v7.0 (chr-ID Gm08; pos 11604647 to 11605240 reverse strand)
cactgccagtccccacctattgcacaccggtaacaacaccatctaaattttcttaatgattgtcaaaatttgtgatctctttatattcttataaattctttaatttctttcttcatctgatcatttgaagagtattatgttttatgcttgtatttgtttttttcccccctaaaatttgttccataaggaaaattccttgttgtctgtctatccccatgagtaacttcttcagcatcattgtttgctaattttatatctcatttttaactgctagatagtatgcccatggcccatggccatattcttcataatatatgtacgtacaatgagatgattttatatcttcagacataaatgcggtgccattatgttctgtttttcttatgatctaatttattcacatgtgaagaacatgcttatttcaactattcgattctgttagactgaattttgtctttttcttttgacatcattgaaaaattatgacaaatcagatggaagcctataaggtgctttctttattattaatttcttctattttcctctttgtgtttcctagagacttgaaagcagagaatcttttattaggttcag

SEQ ID NO: 22641 - DNA, 1045 bp, Glycine max
  Intron number 2 from transcript Glyma06g20540.1 (locus Gly ma06g20540) derived from phytozome v7.0 (chr-ID Gm06; pos 16940856 to 16941900 reverse strand)
ctagggttcttatcaagcagagacatatcaggttcgttaaaaaaaatgccctcttttcttcatatgcattgtggatgtcattgtcggttataggaatctgtgagtttatagtattgtggactaattatcagaaaatgttaggtggaatttcagattttgatgttggttgtgttagtttctgagttaattgtgttggggactaattggaatttgtttagtgaaatttcatattttcagggatactatggggctgctgtattttttaagaattaaattgtggattttcgttttattcttgcttttttgaactgtatgcactttttgttatgaagccccatttcagtgatttagggttgatgtttgtttgtgtaagtagcataattaagtgacttgttgaataaatgcctgttttatgcaagtatttgtgaataaggttttgtttggataaattacttcaattgagtgatttagggttgatgttttgtttgaaagaatttgaacttctttcaaagaaaatcaacattatgtaccacagattttgggaaagttagatgacaaattctataatttttgcaatgttattctcttgacttgtggttcaagtttaatttgctgtaccttttgtttttttaagaagtatctatgaagaaatttatgcaaacagggcctaggttgttttcataattggatgagttgtatgatcttttcatagagttcataattggataagcccaaaactacttattaatatatcataagctgttttcataagcgctctcaaaaacttactaaacaagtctttcatgtcatatgataaaccagaataagatcaagcaaattaggaaaaattcaatttcaattttctatggctaatacaaggatcatttgttttgctagaactgaatgcagatttatcagccttcttttttgtattttaaagtctattcacttcaagatgaagttcaatttttggagaatgaccttttgattgtgtgatttgggattggcagggttggtaggcaagtggtgaacatcccatctttct

SEQ ID NO: 22642 - DNA, 942 bp, Glycine max
  Intron number 1 from transcript Glyma08g00470.1 (locus Gly ma08g00470) derived from phytozome v7.0 (chr-ID Gm08; pos 180493 to 181434 reverse strand)
ccggttccattcactatcctcgcagcactcctcaggtaattgtaatcatgcctttaatttcctcttcatctacggcatttcattcaatccccctaatatgcaattcattcatcttctatattatgtatgtatgtgcgagggttggaagtgtcctgaagccaattttctcaaaaacaccccagtttactaaaaaattctgagtttgaaagaagtttataattaaggatggaaggaaaaaaggagagagagactctttattctaatcttctatcaatattttaacaaaaatgatcgattaatattggttggctgataacaaaaatgatcgattaatattggttggctgataacaaaaaaacaaacaaactcacttttgtgctgaaatataactttttattagaagaatgacagtaacagtagtaagcagtaagaattaaacttacataagtggaaactttaatacaatgtcataaaaagctgaagctgttagttgaacataaataggttttaagattgcttttcttacaagatagtagtatatatttggttgatcggtgatcggtaggtacatttcagacttttcctgcttttatgaatatatgtccaatagttcagacggtgaattaatggaggcttgattcctgataagacggccttaaacaactggttttatcatgtgttttgtttggtacttggcttacgttaatgccaaagccacatttttggaaacttgtttatgaaaatgtatagttaattatgcactaagaacaaagtctagctggcataaacagctgtattaggtacataatcgaattatgaaaattattggaatacaatgaagatgtaagcataatactatcaattatttagacagaaaagagcggaagagaaagacaaagaagagagaactttgaggaattttgataaaaccattatttgcag

SEQ ID NO: 22643 - DNA, 695 bp, Glycine max
  Intron number 1 from transcript Glyma06g09820.1 (locus Gly ma06g09820) derived from phytozome v7.0 (chr-ID Gm06; pos 7370456 to 7371150 reverse strand)
gcgcgctgcgctcagtgcaaatccgttcgctactggtgcgttttcaaattgtgcttaaaaattcgagttttttttcctatctttctttttaaattggcatgggttgtggttgtttgtgggggtcgttttttcagactttatgattacaatttgctgtccagaacttttagtaatttttgcttacggttgaaaatgggaatattggttttgatttccttttctggagtgtatctcttctggtttcgtaaaactccacactagtatgttagttttgtatttacttattaattattaatattatatgccactaagataaacatgcgaaaatttaggttcgttttagtttatgtgtactagaggatctcttcgacaagtgtctgttcctctctacaaattggtggttattgttaatggaaagaaaaatcatgcatcaacttttgctaggtgctttagattgtggtttatttaatagttaataatttatcttctttggtttggagaataaaacaatatgtttcgttttttgctttcgtgaccccatttacattctctgtttaataatttagctgactgtgatattctgtattagtggttccgattcattgcttttcgtctgcatttttccatgtgttcttttttgtgaagatattgtctatagtatgcacgtttggtttgatgtgtttcagttcttttga

SEQ ID NO: 22644 - DNA, 401 bp, Glycine max; identical to SEQ ID NO: 18756
  Intron number 1 from transcript Glyma08g09890.1 (locus Gly ma08g09890) derived from phytozome v7.0 (chr-ID Gm08; pos 7079479 to 7079879)

SEQ ID NO: 22645 - DNA, 535 bp, Glycine max
  Intron number 1 from transcript Glyma06g10020.2 (locus Gly ma06g10020) derived from phytozome v7.0 (chr-ID Gm06; pos 7561079 to 7561613 reverse strand)
gataccaagccagcatttccaatcaaggttatctttctctctctctctcctgtgtctctttctcgctgtgttcctgactcctcaaagttctcgttctccttctacttcctttctttcatactatatctgattggtaacattttttttttcttcttcaatttttcccctttcagtaatcgagatagtgctccaactagctaatagagtgaaatatatcaacaaattaaaatcgaaccccaccaatccaaagctatcatacccttgcatgttcacgagcttccttttgattggtaggttattttttctgtttcccttaaccagatctgaaactgggcgtgccttttattaggtttttttttttctatctatgttacgcaagaacccagtgtttatatcattccatatatatccttatatgtcatatattattattattattttgttttaagaaaagtgtgagagaacgtgtttaattaaaatagtttttttttttttttttttttacttcaggtttgtgcagctgctaattattaaa

SEQ ID NO: 22646 - DNA, 637 bp, Glycine max
  Intron number 1 from transcript Glyma08g10830.1 (locus Gly ma08g10830) derived from phytozome v7.0 (chr-ID Gm08; pos 7878044 to 7878680 reverse strand)
attgctttcaccgcgactacgtcgctcggatttcggttagtttccttttcgctagcttgattactttacttgacacgagttattgatgaaaaaacgtgtttatttttctactgtatttggtgtcgttacggttgttgctcgaaaccagaatttttcgctgctttttcttttagtattattatgagatgagtcaaatcatggaagattattgtgtaatgtttcagttctttctatttcatttttattaacatgttattattctgtcaattttgaagatgaaagttaactattccccattaaggttccttgatgtttttgctgatgtttaccaatcaaatttagagtttcattttgggcaataaaggtttgcattaaatgtcaacataaatttcccaggtgaaactccaattctgattggagaacagtagcaagcaaagttaagttttgttgtaaaataatacttacatgcactgatagtgtaatccgatcataaactgccttataaggttagctcgttaccttctataaaaactacctttcaagtcataccattatgatttctgattaattcacagtacattttttttatgcctattaaactctctttttttttcttttttactgtcactagggatct

SEQ ID NO: 22647 - DNA, 998 bp, Glycine max
  Intron number 1 from transcript Glyma06g44750.1 (locus Gly ma06g44750) derived from phytozome v7.0 (chr-ID Gm06; pos 47601103 to 47602100)
aacaagctttcaaggtagtgttttgtagattgattttgtgattattttttcatgtttttgttgtttgttgttcctccttggattatttttcttgtcttggtgtaattttattttggtttttccgtgcttgactatggatgctgacataactagattttgatgagagtccagtagcggggtgttggatattttggttttcttttcttttgctttgatttgttttttgttttatgtatcgtcttctcactcacttttattcctttttccctgaaattgagtttgtggctggaggcttccaaaactaggtttgtaactttgtctgtatgattggtgtccacgatttatgcattaattgctgtggttcatagggggctgggattaaagtttgcagaatttgtggtaagcacttttgaattgtgacatgagccgtggtgacatgcttgttgtagctaagctgaatggccacggttaccattgttcttgaaagtgatataatatcatatgtggtaggatactgacaaaaactgagaaacatttatgtatgatgacaatcttagtagaataaagttgaagattgaatttgctttgtttgtttgtatgcctctacaatgcgctcatgattgaaatggaaagtatagtgtgccagactcatgttatttctcttcttgcttactccatccttgatcaatctatcacgtgtgaaaaattctccctaaaatgcctaaattgaaagttatatgtgtgcttacattttgaaaattttctatgcatgcttttttaatttagtcatttagaagtccttcataattgtcttggatatttttgccttgctaatgtaccctatgagtcatgcttgatagaaatgaaaaaaaatgctttatgttgcattactgctaatacttttggtccatggattaagctagttgtttactgtttaacattactgtatgatgaatgaaaactatgttgaactttggttgggtaacaggccttggact

SEQ ID NO: 22648 - DNA, 787 bp, Glycine max
  Intron number 5 from transcript Glyma07g29720.1 (locus Gly ma07g29720) derived from phytozome v7.0 (chr-ID Gm07; pos 34801636 to 34802422)
cttaaagataagaactaccccacgacctactgtgcgtaagtatctaaaatgcttatgtctttttcttgtttgagttgtgttgttgataaacatggcaagaaccaagagaggattgtcaaaaagtgagaaactgaaattgtacttggattgaaatgagaaaggtgtgtgcaaaaagccaatattctggcttatgtagaccatatttatcagaatctcacgattctctatttgaatgttacgattcgatgctattcagctacctaccaatatgtttcctaagatgaatcttaaaagacttaatatgttatgatgaatgaatcatgtgaaaaaaattgaaaactatgaggatttattgtttttttttatttttctttcacaattctcatgaaaaaattgaaaactcataagcttaaataaagggaattggaagaacacttgtaaacatatcctatttgattactccactactttatttgttgctcactcatttaatgcatgtactctatttagctatttaattgcttcatttccatctactaaaatgaaggcttcacaaactcagatttaatagaactcatgcatcatatcaaccttgtgttgttaggagctctacttactcccgttgtagtaaatgcaaaacttgtatgcatataaggaattcagtgggaaatctatgatttttcaattatcaattatttcaaagatacatttaaacagttttcagaaatccaaaatatcttaccctatttgttacttatttttggcagttggtcctaaagatactcca

SEQ ID NO: 22649 - DNA, 907 bp, Glycine max
  Intron number 2 from transcript Glyma08g23840.1 (locus Gly ma08g23840) derived from phytozome v7.0 (chr-ID Gm08; pos 18159956 to 18160862)
tccagtccaattgctccctcaacgataaggttcatttcattttcctctttacattacgtgcatattcaatgatccacgttgtttgattttcttcctttcaaaccccagctttttcaattgcattcgtgcctcattcaacatatgtagtttatccctgcttacttcattttttttaattctctcttgataatagcattttaattccattcctaaaagccagcaagtcaagagaggataagctcttttttagattgatgtatagtgtctcacaccctggcaacatctgatatcctttgtaaatcctgttattcataaaagtaacagtttgagatcattttttattcataattgaccattttactgactgaaaagggtttcctaccttcactatgctgtatatgtttattagacacatgccttcttcagcatttatctaagactcatgtacttgttaaatagctttgatgtgctcatcatatgtcatgtagtcaataaccacttagtcataattttatttcaattaggggtttgggtaaacttctccacaaacacttctaggagaagaaaatatgaaggaaaaatgaaataagcttttccataagctaataagtggaaaattaagtttttgattaagctaatatgagagatcttttgcaaattaacttatacgtaagctgctttagcttttggagaagcttatttcattttttcttcttattttcttctcctataaatacttatggagaaatttatccaaacagggacttagtcatttgtagtggtgaaacctgttattggatacgtctagttcacatcaggtagagaaaaattttcgtgttcttcacattgagcaatgctactttattcttcaggaaattaagcaattgtgcacatatttggtggactt

SEQ ID NO: 22650 - DNA, 666 bp, Glycine max
  Intron number 4 from transcript Glyma08g26900.1 (locus Gly ma08g26900) derived from phytozome v7.0 (chr-ID Gm08; pos 21223971 to 21224636 reverse strand)
gtcaggtattatctgttttctgggctaacttttgaaattgactttcatgacactttcacatggtaagcatgatgttatatcctcatatatgaaaaaattataaagttgtcttcatattatataaaaaagtagtaaaaaaaccttgtgtgcatacctggagtaagcaattgctgttatttggccgaggtaagacagacatgttgaatgccaaggtgataaattttggtgcatatgcaagtggcttgagagttcagattcagaaattaagcttcaaactcaaaagcatttattctgaaacggttaaggcttcttgaacttcagtgtaaataacttgtgctattgttacctacataatagtattgttatcaagaatgcttttcactaactattctttattaaaaaaattatttattccaagagtcggttttaaaaattttacactgaaattggatttcaaaacctagattgataatttgaaattttgaattgtataaagatttactaaaatattttaccaattaaaatttaatcttgtctatttaaataaggaaagaaagaataaggatacaattcttcagtaggttaatcttgctgatgtctgcaaattttagaaagtaggcaatgtttctttaacatctctaataatagtgttgttgcaggatcttc

SEQ ID NO: 22651 - DNA, 479 bp, Glycine max
  Intron number 3 from transcript Glyma08g26900.1 (locus Gly ma08g26900) derived from phytozome v7.0 (chr-ID Gm08; pos 21224728 to 21225206 reverse strand)
gagaagtaataggtattttcttacttactcagtctcctttttttttctttttttttcaggtaaaggtaataatatcatactaaaaagaaaataagaaaaatctaattgtgaacttttttccccaaattccacaaagtgagccaaagaatcccatatgatgctcactatgtatatagtttgttagagtggttatcattttttgttttgataaaatagaggttactcattttatagttgtgtacttgtgtcgctgtttcttttgtggctgtactttactttgttccttttaaaattaatttcacaattgtagttgttggtgatgatagagtggtttaataatccaccagcagcattttgtgactgactggcaagtgccaatcaaatttagaagaattaaaaaaattggctgccaagcattcatatttcataatatgaagctgaaactgtttgttttggatattttaccagtcaaggtcatt

SEQ ID NO: 22652 - DNA, 838 bp, Glycine max
  Intron number 1 from transcript Glyma08g26900.1 (locus Gly ma08g26900) derived from phytozome v7.0 (chr-ID Gm08; pos 21225471 to 21226308 reverse strand)
gaacagaacagaaccaccagtgcttttcaaagacggtgagatctcaacttcctttcaattttcttatttccatcataatttcactgttgttctctgaaagcttctttggttcgttttttttttcctcgcaacctcttgttattggctttgtagcggttggatgttttttctccttggttattatttatcctgtgaaagatttgatttttaaggtccgcaagagttctttttgtttaaaatacaagtgagtattctcaattttgtttctgattacttttttatgcctttctggcttgtgggcttttttgcttagaattttttggcatatatattgcacatatgaacatatattaagcataaatagagttttgctgaagcagtgtcattctattgtagctaaattttgagtgcaagaggctatcataagtttgtaattttaaattggaatgaattgcttccaatgatgatgtgtaagaatttattcatgaatctatgactactgtgagatcatcgctgctatgaagcgaggatgcttttttctcacctaggatttgatctctagtctgtctaccaagtggaatgaaccagacaccccccctcagacttgatgctgtggagagtggagttcaaccacaagtccaaaacctttaatggtgacttttaatttttgtgctgtagctaatttgaaattagattgcaattgtataaatgattctttataatgtgtaagaatgtgaccgggggtggaacttctgtatgcagaagagcacaggttacattgaacaattaatataatgtatggactttttgctttgtcatgcttttataggtttcagca

SEQ ID NO: 22653 - DNA, 462 bp, Glycine max
  Intron number 1 from transcript Glyma06g06200.1 (locus Gly ma06g06200) derived from phytozome v7.0 (chr-ID Gm06; pos 4452701 to 4453162 reverse strand)
ttgatccattccacgccttccatttccaggatcaagtatgctttctgtcttttcacttttattcccttttttcctttttaaccgttatgttccgttagcgtgtagttttttgttctatgctcaattcgacgtgtgcttgttgttaaatatgttgattttatattcatatactcatattatgactttttatatatatattttttgatttttggtaactacagtgttgcgcataatatgctatgtggaggatagccggtgcaaattaagtgtgtcatgagtttaatatttaattatttatttatggaactcactgtcaagttcagtacaaatgtgatttgaattttatgttgattgtcttcatgatttgtagattactcattaagtcattgcatcctgttttctcttttttctttttcttatgttgcagtgcagtgtcaatccgcgggagagatctcttctttc

SEQ ID NO: 22654 - DNA, 763 bp, Glycine max
  Intron number 4 from transcript Glyma08g25590.1 (locus Gly ma08g25590) derived from phytozome v7.0 (chr-ID Gm08; pos 19908020 to 19908782 reverse strand)
aaggaattgggaaatcttacagagttaaaattattgtatgttatttactttgaattttcttctttgtttataaaggtatcaatggttttctttttaggatcaaatagtcaccaagagatttagtgtctaatttaagtcttacattgattaaaataagaaatttaatgtgatactcaagtgatgagatttttccaccaaataaactagtttttttttgttggatgtttaagtcataacaatgtcccttgcagtatgagtcttgggtgttagcaaagtgtttaattaatggtgtgagtagattgatccaaatggcctgatgtaggtcaaagttcatttcggccattaaattagaatgacatatatgtgtaaaaaaggatacactggtcttatgatggatcttttgataatttttgtttgtttttctagtaatgtgattaatgaagtctctaatagataagggatgagagtataagtgatgaatttaattaacattgtagaaaaaataacgagttataaactaaatagttgttccttttgacaaacaatgactagttatttatacctaaatggctaagagaaaaactcaaatttttttagaatttatttatacaaaatagtttgttctctttaattaatcttaagattgttttgttttggacacatgatggtatgcatgggaaatttctcttgacggcattgataagatttataatttattaaatttgtagggcttttggatcaaacaagtttagaggatctcttc

SEQ ID NO: 22655 - DNA, 984 bp, Glycine max
  Intron number 1 from transcript Glyma08g19670.1 (locus Gly ma08g19670) derived from phytozome v7.0 (chr-ID Gm08; pos 14861222 to 14862205 reverse strand)
gccgttcctacattcggtaacctctccctccctctctctctctctctctctctcgcgattccagctgcgacagtgttcgattcgtctttaaactctttacattgcttcattttgacttaatgtggaacttaaaatgcaaaactcgtggattacttatgcctgatttagctggattcgtgaactcctatgaagtaggagggaaaataaaatatggactcaatggtttaaaaatgagacggcgagaaactacactaattgatggactagagttaaattagtcttactcgtcgtttcatactctccagcttggactaattaattaatctgttagaatcatagatacatctttcttttatgaatgactctgcaaacatcagatatgaactcttagttaggataagtttcttcattagtttcctcaaacaatgactctaaatcctcctacaaaatcttcctcctaatagattaagaatgtagagtaatgttagcaattctatctaacactctctttatcattgattgaaatttattggaaataaaaaaaaaattccacttcgtatttaatgacttttacttgtattttgtagtttctaataaattttaacaatgattgagtgtgttgttagcactcttcacgaaagtattgaatgtattctaagtttccaggacgtgaaatgtgtttattttcttcataaattagtaggaggatatagcattactctttctcaaaattctgttgtgacctatatgaaccaacagattaataagcagggtagatatgcatcgatgaggaaacactaatattgaagcatgaaatatacgcatcaagtattgttctttgaaattttagaatttgtatatgaatttaataatttatatctcttacatcatctttggttatgtgtcaaatataccacacaactccggcttttttctttgggggggatagattcgagaatataaccttcaggagaaccaaagctt

SEQ ID NO: 22656 - DNA, 948 bp, Glycine max
  Intron number 2 from transcript Glyma07g11650.1 (locus Gly ma07g11650) derived from phytozome v7.0 (chr-ID Gm07; pos 9859088 to 9860035 reverse strand)
ttgggacttggcagattggtagaagagaagaaaaggtgtgtgtctttttggcattgaattcataataattaggaatctgttttgtttttcttcacataataatttgttctcataatctcacttgtagaattttgaaccgttgattttgatgaaatagggggagggaataggagggaggaaaggaatgatgttgattgatactatgtgaatgatggaagagaagattatgtgaaacgtgaaagtaacatcaccctaataattatacttgtattgcttttgcaacaaggtgtttgtaagtgaatggggggtatataacaatgtgctttgtgatgaggatcaagaaaaagaactacagtctacaagcttggtggattgtggtcttaaatgtgatctgtggtgctattgtaatttttttttttgtatatgttacaatttgtgaactttctctgaactaacatggcttaaaacgtgtattattatttgtgactgtcaaaattttgagactttgaatcaatttctgttgacattagtgatctaggtaacttcaaaaaatatgatgcatctaggtgatataatgttttctcattttcctcttcatgttttgaatttagtaatatttcatctgagaatgtcactcatttcttaagtcttaaccatttaggagatttctaatcgaaggcttattgcttatattgtggaatggattattgccttcatttccatctctatgatacatggatgacttgaatacacgatgttataagaatttcattacaatcaaacattattagtttactaatagatggagtattttgttgtaaagatttggaaaaaagttttggggattgagtttattttatctgaactcatgcgattccatgtttggatatttgctgtgcatatcagctaattgaaaatttcttccatctttcaatgttgcagattaaa

SEQ ID NO: 22657 - DNA, 900 bp, Glycine max
  Intron number 1 from transcript Glyma06g44530.1 (locus Gly ma06g44530) derived from phytozome v7.0 (chr-ID Gm06; pos 47432146 to 47433045 reverse strand)
aggtatgtttattgtgttgtaattagtttttggttgctttgtttgcgattggttttggaattagctcctatattggttttttggagtgttaatcagtggattgtgattgtaaatttgaatctagtttgttatgcttttgttttggccttgaaattgatcatttcttgcttcaagtttagtttttaatggtaaggggtttgcttaggtgttactgtttttttttttgttcttttatttttgcctgttgtaaagtggaaacataaaatttgatgttcaatgtcaagctataataaaataaagcaatgtggttttaggaacgggcttatggcatttgtgtgtagacaaatttgaacttatctttcttgtttaaccctgaaagtggttgagggtagacaaatttgcccagaccacatggccaattattgctatcttaatgtgcttataatttatatcatgtgttatcataaatccgttgattggaattcaaacaaataacaataatgatgagcacttgcaaacatcattacttcatatttaaacaatttgttgtgtacattttttgtggttgcccacatttgcagaatgtgtatttagaaatagatgactcatgaaacacattgaatcatcaaatgagaaacaaattgaatcttttacaattaagtttattgtaatggaccatttatttttgttgtgtgttttagttgcaaggtccttagcattcttcctaggactatcattttaccacatctccacaatgcaatgtaaattatcattagaaactaaatattattttcagtgataaactggtatttaaatgcttgtgtcaaatacattcatttacttgtattgacattgcttctttcagtgggtttttacaagaaaagacgaaagtgacttagg

SEQ ID NO: 22658 - DNA, 637 bp, Glycine max
  Intron number 3 from transcript Glyma08g09950.1 (locus Gly ma08g09950) derived from phytozome v7.0 (chr-ID Gm08; pos 7134137 to 7134773)
ttggcattggcaccttttgcttggttggcttgcaggtatgtctaaagtctatacaatcttaaacttttttttgagtactccatcgcgggagaaaaaataaaaataaaataaattgagtttatttcataaactaaaatcaacttacaaattaaataaataaaaaacttctattattaaagtcaagtatatatatgagtttgttttattataaaaaaattattttattttatttatatttatatataaatacttatgaagaaatttatttcaacataacatttatgtacatgatcttaacaataatgaatgcctatatatgattttaactgcattgaagacctaaaatatctcgcattctctaaaacttattgagatttttttaatattgtacagcattctttttatagaggaacactatgtaatactattaattttttgaataattaaggagtgtcatgtgtaatgttttcaaatgatttaagaagaattcgtgtcagagtagaaaaacaatagacatcagaagaaatttgacaaaatcctagaaaatgtaagcataatttactcaataatatataagtcatatatatgttaaaacttgaataactgggacgtgactgttgagtgcatgcagtggctt

SEQ ID NO: 22659 - DNA, 810 bp, Glycine max
  Intron number 1 from transcript Glyma07g39810.1 (locus Gly ma07g39810) derived from phytozome v7.0 (chr-ID Gm07; pos 44179433 to 44180242 reverse strand)
tcctcagagcttcaatttcacactggaaacaactcgtgggttcttcacttcttcattataaataatatcctccccctcattttatttattgcattttaaatattgcatgtatagatagttatcgtatttgccccaaatgtctgcaaaaggaaacaaaataagcatactaattgagtttatgcaatgtggcatatccattagttagttatggtttttcttcatgttatggttgtcaaagaaacaaaatcagcaaaacaaatatgattcatggtttttttcatgtgagtcttaatggctattcctcccgcctccttttcatggtaatactgtttctccatcattgatgtatacacacataaatgtagtattgaagactagctttttcttttccattaacctgtcattgattatgcataacttcatgtattctctttcattttggtaatatttgaatacacccaaatatatcattcattttgctaaccctaaatctagcaatggagtgatctacaggaacaattttcaattcaaatttacatcgacttttctggtttacctctatctataagcaatcaagttttcctaaaatcgttgtgtttgagatggacttcaatttttagaaaattaaatatatttctcatatttgtgcaacttaattgggtcacgaactcatgatagttcacaataagaacaatattgctgatttattattctgacatttttttttatcttcactactactgggaatctagaatttgtcactatctttgttatttgagttattgactcgacgttttctggtagggcaat

SEQ ID NO: 22660 - DNA, 745 bp, Glycine max
  Intron number 4 from transcript Glyma08g03120.1 (locus Gly ma08g03120) derived from phytozome v7.0 (chr-ID Gm08; pos 2202295 to 2203039 reverse strand)
gaatcaactttattgggcctaacgtgagtagattatgcagtttgtttgtttgcttgtagtctcgtaactacgctaatttagagctttacagttggctcgactggattgaataagacttatttaaactggcccattaaatcgtacaattgactttgctaattaagaggctacaatttcttctgtctaaagtatcttcaagcccggtaatttgattgctagttactataaatacaccaagtcataaaaatatcgttagtatatagacacataaaaaatgtatgaggatttctatttagtgtttaaccccggtgaccaacttgaaagattgtaactagtaagcaatggtcgttgagcgttacatgactaaattaaagtagcaattttgttaaccagtgtgcaaaatgttcttgcagagttgtgtttgatatctgttgtctgtcttttaattttgaattttttgttgaaaattgttggtgtacaggtgaggttcagtttttaagttttttcatagcataggcgggcctagtctttggcttgcagttgcaagttaccatctgttattgcattttttatttgattttaatggatcagtcttaatttttagtgttttccctgttgaatgtatatagcttctataattcataaagctgtaacagtatatcaattattctaatatttccctttcaaattatatggtaataactgaatatttagttaaaactttcagcctgacagtattcgggtt

SEQ ID NO: 22661 - DNA, 742 bp, Glycine max
  Intron number 1 from transcript Glyma07g07850.2 (locus Gly ma07g07850) derived from phytozome v7.0 (chr-ID Gm07; pos 6503471 to 6504212 reverse strand)
tgccattggagaaggttagaagaaggttttaaaaggtgaagttgtagacttttgagtaggttgcaaaaaagttggtgctttttactcagcattttggttttgaagacttgagtgtagctgagttgactctgaaataaaaaacaagaaaaattatagatgttaagatattagtaggtagactatcatatgaagttgaatcttcagcatgagtgtttgtgttttactttttacttacccatttggaggaatccagtgaatcttcatgtctgatgttctttagcttttaatgctaagatggtagtagttagactgtcatatataaagagcatcttaattggggttgttgctctcattagttgtggttgtgagaacatgaactggccaacaaaaaaaagtacttatattccaccttatgcttaaatgaggaagtagtagtacttttaggtttgttttgtttttattgattgttagtttttctcagctacttattccttccaaaggattcctgatgctggtaaaatctggaaatcaagtacagtatctacagatttattctgtttcgattggttggttgtttgtaataattgaagaccatgttgacacataatttgtgctaagatcaaaatgacttttgttgctttactcttttaccttcacttaagcaaagcttttgaagtgattcccatacaattctggctccattgcagatacattagctttggtagccagtcatcaaagccaa

SEQ ID NO: 22662 - DNA, 959 bp, Glycine max
  Intron number 2 from transcript Glyma06g00980.1 (locus Gly ma06g00980) derived from phytozome v7.0 (chr-ID Gm06; pos 557541 to 558499)
ccggtgttaggtacaaaagcctttttactttgtttcttacttctgtatgttttaaggtcttattgaattgcaatattgcatagtgacactcaactcttgatccactgacttttacatgaaagacatctacatatatttatacattattgccctgtttgaatgaatttatcggtcagtacttgtagtgaagtaacaagataaactgaattaggtttctcccaaaagctaaaattagctaatgtacaagtttaaattaacttttgctgaaactaaatggttgagtttctccaacttagctcatgcataagttaaagtgatgtctgtttcaatcggtattgttaaagttaaggactacattgtgctgagttgctaaaattcacattacattgatgaagtgcttgagataagttctcagcatctcaataatcaaaatacatatatatagccaagttggtttacaaaggtagaagaaaggctacagcctacataaagtaggtaaacacaagcagaaaatgcagctttaaaaaaactttacaacagatataaaaacagcttcattaaagctgaacaatatatataataagacaactattttaacaggtattaatgcataatttatgggaaagcttaattcattttactttcttatttctttctcgtataagtgcttgttaaaatgtttatccaaacagagccatatgtgtgtgtgtttactttttagtaaagcaatcaattgttcaaactatatttctttgaggacatgtttgcattgcttaacaatgcttccaggaagtacagttcaatatgtctctagccttttcaactgtcaaataaaatatgatccttcatggaacatatatctttttgcctttactagcttgcatttgttgttgtgaatttgacagtggattttccttttacaataatactgattaagtcaatctacttctacagagcca

SEQ ID NO: 22663 - DNA, 262 bp, Glycine max
  Intron number 1 from transcript Glyma07g12070.1 (locus Gly ma07g12070) derived from phytozome v7.0 (chr-ID Gm07; pos 10330228 to 10330489 reverse strand)
aaagtgaatctctcttctcttctctccctcttttgcatatgtgtgtgtgagttcaatagtagtgcgtttggaaagttgtcaagaagaaaaacaaaaacacgtttgagatgtgaaaagtacaagtattaacttcttaaaattacatctaagatgtaaccaaactcattatatattacttatgtagttttactatgtttaattttgaactcttgtatttgttggatatgttgtaggggctactcctaagtcagttttggagctc

SEQ ID NO: 22664 - DNA, 890 bp, Glycine max
  Intron number 4 from transcript Glyma06g09860.1 (locus Gly ma06g09860) derived from phytozome v7.0 (chr-ID Gm06; pos 7400073 to 7400962 reverse strand)
tttcaagagtggaccacttttaatatcttctaaaggtgtgttttgttccactggtttacatattttctttgaagaaaccaaacatgtatgtaatttgttgcagccagtaagagcagatctgatgtcttttcttctgtggtatacatgatagtcctaactcctacctaaatgtttaaagccaaaggcagaagagaaatgggtgctgtagactgatagttttctttttccttttacagaatcaatcactctcttttgccatgtattttgcatatttgcaaattctgttcagccttataagctgaggaataggaaaaaatgcattcattgaggtcaaattatctgacgttcatgccagatcgtttgaattgaatgtgtttgttacattcatcggcatataaggttgaaaactgataggaaagacatttgacctgaaagcattcatgagtaaatggcccacttaacaattttgttaggcttgactacattttggatttagtcgtagcatactttatcaaaacaacgaagtttaatatgggttttcacaataaaagggagatctgtatagtaaaagcaaggggatagtaatttattcaagaaaaaagaaagaactacagacctggaattgatgagaactttgtaatgcctgatctaaaccaatatgaggaagtaaatatgctccagcatcattattttcttttaggccttctacagtcagtattggcatcctttatctttgttgattctttttttaatccttccaaaatttaattgtcatatttttacaatatgtataatgctggaatgcaaaactagatttctactcttggaagaaggagtttgtgaggtcattattattgcatagtgtgtatttattgacttgtaggaattgg

SEQ ID NO: 22665 - DNA, 680 bp, Glycine max
  Intron number 2 from transcript Glyma06g48260.1 (locus Gly ma06g48260) derived from phytozome v7.0 (chr-ID Gm06; pos 50517372 to 50518051 reverse strand)
gtcgtattgtgagtgacagacctcctcgtattgaggtatgtgcatcattgactcacttgactgacagaccaacttctttgtgtcctcaaatcaattcaatgtttttatattgtacaatggagctttcagtaattaagcatttgtggtccatcaaataagttcaattcattacattggtatccattttctaatcctttatttataatacgagatctaataaacatgagatttagactctcctatttaaatgatatgttttgtcaatacataaaaacgtgcgaaactagatgcaaaaataacaaacaaagatttattggattattaaattccaatgtaaattatttaaaagataatctcagttgttgtacgttttctgtactaaactgatagttcttagttcttattttgtcaacattttaaaatttgaattaaagattgaatcaacaagatctctaagttatgatttgattggttgaatgaatcagttaaacttataaataaactatttaatggttaaaccaaagtcatgaacgttgatttctgtgccaatgactatttaacaataaaagcagcgggagttcatacttcttcaactaaatagccaatttttgttgttggttgaagagaaaccaggaaatctagttggtaatgtctctctgttctgtgcatttagattataa

SEQ ID NO: 22666 - DNA, 973 bp, Glycine max
  Intron number 4 from transcript Glyma05g21370.1 (locus Gly ma05g21370) derived from phytozome v7.0 (chr-ID Gm05; pos 25969700 to 25970672 reverse strand)
agcgtgagcctccacagcgattcatcaggcgcagggtaacactttttatagccatctctttatagccaaatggagatgatatagagagtgacatttatttactcaaaagtttagtaatggaagaatgtagagaatgttttctcattatttggttgttaaaaaatgacactgaatttgatatactctgcccttaaaggaatttaaaagtaaattgtgtacagattgaatttcaaatgagttcccaattgtataatcacattgatctgcaaacaacattttctatattataacgctagcttgccttgttttgttccttgatggagttgagtcttacctccccacttgaccattgatattggagtaagtcttcaattttatccttatctgttaccctctctcctagttgattgtttaattaaaaaaaaaaacactatttaagtagtctccaaatttggaaaatccctcaaattgggtcatgaagttgactaaaatacatcaacttaaaggactaaaatgttgtatattaaatactttagggattgcataaataatttcattaccttagggattatttaggagagaaggtaatattttagaggtcaaattattggtttattcttgatattgtggatggagagtttgacaaaaatggaaaggtcttagatttgaacccaatagtatcaaacttgtgtctcttttatattcttacattttgagctgtatgatccagaactcaacatacagacttgtatttgttctctagtttgctagaaaattgaaattccaatgagttagttaatggttatagaaagagttattgtctcttttgaatgtacaaaggcaattcgggaaaatgtgctctatttgtgtgaataaactgtggttatatggatataaacttgttagcaataattgaataattgttttattttatgtatcttgtttgatgaagtttatttgtctcgttgccagg

SEQ ID NO: 22667 - DNA, 681 bp, Glycine max
  Intron number 2 from transcript Glyma05g22770.1 (locus Gly ma05g22770) derived from phytozome v7.0 (chr-ID Gm05; pos 28176214 to 28176894 reverse strand)
acaacgattccagcagagactgcacagtggtgaaggtacgttagatttaattgtttagcaacattccaaattgtatatgttaaaggaaattacatatcagtcgtatgagttaggcttattcattatagttgaacttgcttaattgtgtggaatccaccgtttttctcgcccacggattttaaaccacccttagtagctgtatatattcataatcatgatagtgataaatcactgagcattaggatttggaagaacacacagtacacgttaaatagatagatacatgtccattatggatatctctagacccaaagcttacattcaatatattagattgcataatagtaagagcttaactatttgagttgtcattctgataatacgtgaaatcaaaagcaaataaaattatgcatatggtacctaattgtgcttgctctatgcaccattacaaaatcagtaaattttacatgttaaaaataactcttggtcccagataattgaagcaatcaattttttgctagaaaccaattaaatagaatagtaaaaagtgaagaggtcgaagacaattaccaaacaaaaaggctttgactttactttttgttaatttcaaatataatattagttttaattaaataaataagctgttcgatgttcacgaacagattgatagcgcgaacaggc

SEQ ID NO: 22668 - DNA, 389 bp, Glycine max
  Intron number 1 from transcript Glyma07g03030.1 (locus Gly ma07g03030) derived from phytozome v7.0 (chr-ID Gm07; pos 2087904 to 2088292)
tcgcgtatgttttcatttttgcgatttgctgcatgtgctatgttgcatgtgctaagagacgcattgttcgagggtttatctgtttgctagccaaatgtggttgttcttgtgtctgatttaggggtttggtgactattgtttgtgatacttcgagaaattttgttaataactcagtgaatggcggattaactaagaaaattggcaatcaaaactctgaagaagctgctgatgataactttgcgtcccttgactgtttgctattattgctgcggattaactttctctcttttttctctttttctctctttacctaatatagtttttcttgtcttatctattaaccctttacttgatctcagtttacttaccatttaaagatcaacaaagga

SEQ ID NO: 22669 - DNA, 696 bp, Glycine max
  Intron number 1 from transcript Glyma07g10280.1 (locus Gly ma07g10280) derived from phytozome v7.0 (chr-ID Gm07; pos 8583499 to 8584194 reverse strand)
ttcctcttgcacttgctgtgtggactactatacaggttctcactcctcactttcattcattcattactatattgtctttattatgctttttgcccctactatgtttccacaaaagttattttgttatggatcatcttgcctggtcaatttgatttcaagttaaaatgcatttattattttttgttcttgttgaattgggataatttcataattcatccttacttgggagatgtgtgagttttttttttttttttgttgaataaaagttgtagaagggagagacacccctaatactaccggatagtccgccaatgccagcagaagcctacccataggattattgcacaggcaatgcataaactcatttatattacttgggagatgttttcacaacaatctataaatatcttacactcttcatttatattcattatgaaattataataatgtttccatatcttcaatttttaaaaattgctgtattttgtacatgtatctgtcacagttatcagttactttctaaaaaatatgtttagttaacttcaaattctgtgcaaggaaatctccctgatttgtcatctatgagttatgagttattggctactttttggtagtgtacaatactagtagttaatgttagatgttgctctttcattttcagtacggtagataccaacgcaaactgcttgtggagga

SEQ ID NO: 22670 - DNA, 867 bp, Glycine max
  Intron number 2 from transcript Glyma05g22090.1 (locus Gly ma05g22090) derived from phytozome v7.0 (chr-ID Gm05; pos 26989955 to 26990821)
ggaatctgcaacagacctttaggttgcgtggaatggttttttttgtaccattaatgactatccaacatatgacaatttaagtggttgtagtgtcaaaggcacacatgtcctatatgtgagaaaaatcgagcttcttccaactaaaacatggaaagaagacagtatatacaaggcaccgaagatttctcaaacattatcatccatatcagcgattgaagaaagcttttaagggaactcaggaaaatgaaagtgcgccgaaaccattagatggcaaagaagttcatgattgggtaaaggaaatcataactatctttgggaagacacaaaaaaacccatcatctgagacaaacatatggaagaaaaggtaaatattctttgatcttccatattggtccaatcttgatgttagacattgtatagacgtcatgcatgtggagaaaaatgtttgtaatagtttaattgatacccttcttaacattaaaggcaagacaaaggatggtttgaagtgtcatcaagacttggttgagatgggtatacgagagtagttgcatccaatctcacaaggttcgcgaacgtatctacccccaatatgtcacacaatgtcaacaaaagagaagaggagtttttatcaatgcccgcataatctaaaagtcccacaaggatactcttcaaatatctagagccttgtatctgtcaatgatcttaaattggttggcttgaaatctcatgattatcatgtattaatgcaataactattgcttgtagcgattcatggtatcttgcctgacaaagttaaggttgccataacttgtttgtgctttctttttaatgttatctgtagcaaagttattaaccctagaaaactgg

SEQ ID NO: 22671 - DNA, 1013 bp, Glycine max
  Intron number 1 from transcript Glyma06g17590.1 (locus Gly ma06g17590) derived from phytozome v7.0 (chr-ID Gm06; pos 13949864 to 13950876 reverse strand)
actgttcaggtttgaccgtttcactttctttgtcactagaagagacaaaataagacaaaaaagtgattgaagaaaagttgaatatgtatgcatatattaataatattataaaaattagatttttatgtgagtaacacaaaatttaggtgtagtattttagaggcttttaattaatattgttatctaataaaaaaaagaatttcacctattaattagtctcctcgataaaggttaacataaacgttttttaaaggtaaaattttaatttcaagttaagaataggaaccaataatatattttaagataatgtacctaagttttccttatacataaatgaacaattataaacgttcatcctgtttggagtggattgagatagaggaagtagaaaaataaagaaaagaaagaaaaaaatggagaaaaaaaatgatagatgtaagatgtgatatgatgaaaaagatagagagatgagaaaaattatgggatagaaacgaattataagacgtgaaatatatttttagttatactaaagcttgtgtaaatcaaaaggaatcaaataattcatcatcatggttttttctccatctctaaaattaaataaataacctattagctaaaaaaatcaccactataaagagtgttaacttttttttaattatgtgtcatcactttttaattcagtaaactactctactttagtttttggagaattgtgtggggcaccattatagtagtcactgaaattaaaaaaaaaattgtcaaataaattttttaaaaaattcatctatattcatttaagtttataaatttaatcacttatgttattttattccctatacgtgtgacttaagtgataatgttaggatatgtctaagaaacaaaataacagttagtgattaaatttaggacttaaattgaaatatttaaaatttgacatttttctaatttcataaactattacaataacatctcataatttgaaaatgatgtatcttgcaggtgacaaagttcaa

SEQ ID NO: 22672 - DNA, 649 bp, Glycine max
  Intron number 1 from transcript Glyma05g32510.1 (locus Gly ma05g32510) derived from phytozome v7.0 (chr-ID Gm05; pos 37446927 to 37447575)
atttcgtctcccaacaccaaccccaaccccaacaggttctacccaatcattctctgcataaactgcactcattccttttcctttctctctccactgcctttttccttcttttcccttttttctatcaccggctttgtgcattggattgtttctgttctttcttgtctgtgactgaaaagctacactttattcctagtttgattataaaaattgttaatagatagcaagttactacctagctcctcctctgcctaatttctgctttagatttctttgtttttttatgagggctttaaaaattgtggtagatcgttgcaactataaggtttttggtgtgtcgcatttatccacaaatttcctgcaatatcaaggaatcctgcaggaaattacagacaaatgcggctgatgtcgtcacgaagaggccaaattccttgacctcgcgaatgaaatcatggttgtggaccatttttgaaaccttgttttttaggaattgtattctagggtatgtgactgtgatacatggttgagattataatttgtaattctttgtgctgatcgtgtaaggaacagaaagaatatggagtgcttagggtgcttttccaatctggtgctgaactaatccatgttatttgtttaacatgcagaggac

SEQ ID NO: 22673 - DNA, 815 bp, Glycine max
  Intron number 1 from transcript Glyma05g35010.1 (locus Gly ma05g35010) derived from phytozome v7.0 (chr-ID Gm05; pos 39171394 to 39172208 reverse strand)
aaagcaggagattacccaagattcctaaggtagtaattctctctagttttggttacttgtatgattttgattatttttgttttctaggtgtgttatagtctgcttaaattttccactcttttgtagacaaagagaaattatgtttgggcattttatccaatgcattttgcacactgctacgaggagaagattaaatcaccattcattaaaagagctggttgtttgatcagttgtaggaagttacattcttagtactaagcaagtttgattgaatataaaagtaatttaccaattgacttgttgacattttgttattgaattatgcaattggaagtgtgcagtcattggcaattttcaatggaatggatagattgtatctaaagaggcagagaataatggaagaaatatgcactatgttattttgtttgctagtggccattctaataacagaacaatcaattagaaattttgtatggcagtattatacactgggttggccaggtattggaagagtgggtgtatgcttatgtatttgtaatatcaagtgattgttgtaagccatatttcactttgatagagacatgagaatgataatattaattgtataatccatagtttaaggcattttgttcaagatgtagctactatttatttattattttttatgtcatattgtcatgtgatggggttgtctatagataatggaattgtttaatgtttgtttctgtttctggatgggatatgtttgtcagtagtcttaccttgagtttcacaatataacgtaccaggggactcgtgattttgctaaagaacaa

SEQ ID NO: 22674 - DNA, 896 bp, Glycine max
  Intron number 1 from transcript Glyma06g47160.1 (locus Gly ma06g47160) derived from phytozome v7.0 (chr-ID Gm06; pos 49667516 to 49668411 reverse strand)
ttgaggtaaaaacttttttatatacacacacatctactaaaaaaatttgactctaaaaagtattatgttattggtgataaagtaaattcttattagacattttgtttaaaaatattttacagacaatatatgtaagttttataattaaaaaacatatatttgccacaatttttgcattttttttatatagtatcttgaatttttatttcttttagattaacttctaaattcttattgttgttattataaggagatgttaggagtaaaattttttgaacacattattctaatagctttattgttattataaggagatgttagaagtaaaattaataatttttttgacttttaaataaatttttaccaataattaagaatgtgttaaatagtgcatctttctcttattacaatagattctgctattcactgtttgaaagattatttgagatagtgtgaaaaccgtatgatttacgtcaagacacaatttaaagtagttacatgcatacaaatataatagaatatatatatatatatatatatatatatatatatatatatatatatatatatatatatatatatatatttctaagtgttcttggtgtagttctttgatcagaattaaaattttatctcaataatctgtgttaatctttattgcaaatttttattacacaaattattaaggcttgtacttttactatttagtaatacaattacatgcatatattgaaatttatttatttacactctttccttacatgtttcatggatttggtgtgctaggtatgatgaagaaactgggtttgacgacctaggtaatgaattcaggggagacccatcatcagcctaccgtttgagtgatctcccagacacaaccctagggtcactcttgt

SEQ ID NO: 22675 - DNA, 592 bp, Glycine max
  Intron number 2 from transcript Glyma05g14170.1 (locus Gly ma05g14170) derived from phytozome v7.0 (chr-ID Gm05; pos 14979546 to 14980137 reverse strand)
cgttgatatcgagaatcaatattacaattcaaaaggttctgttctgcttattattgtttttgttgttatttggcgttgtggaattaggaattggaggcacaagcctgttttgtggctgatcagtatcactgtgtcattgtgtcgttaattttgcttaaatgtaaatcggttttattgttctgattgcacttttgtcactgttcaattttacaatttggaaggttctttttgttgttgttgttgttatttattattatttgagttaggaacaaaatgcttagtttgtttttggagttgtgtagcacttcttgtctgtttacaatgtcattgattaattaaagctattacaattttcggcttcatgtgttgaaaacctgaaatcagtgttcactagtacgtttgctgtgtgaattttcttgcttggattatattctctgtaagcaactgtatagtacgttgtgtttgtttgttcctcgtggaaactgaggaacctgtgacttgtgagattttttgtggcctgtttctgtttcgtggcaagattaattttttatttggatttcttaggatgatattgttgtgtttgtgtgtaggt

SEQ ID NO: 22676 - DNA, 944 bp, Glycine max
  Intron number 1 from transcript Glyma08g14000.1 (locus Gly ma08g14000) derived from phytozome v7.0 (chr-ID Gm08; pos 10181498 to 10182441)
tctttcgcagaatcgttcccgaagccctcctctcggttccgattctcttttccttccttcctctttttaaattatctcacgtgcatgcatccttgtctaccttcaattcaagtcgcttaaataaaccttcaatttcatctctactaaatggtccctaaagtaaaataaataagtatataactaatcccccaatattagatactctttctaatattgaaaaactcttcaaattgatcccggactattagtaaaatatatcaattttctagagatcaatctaatggatattcaattcttgaggagccattactttggagagagaataatacttggggggggggaggaaccgaattgatgattcattcgatataagtcaaacaaactctattctgcttcattaaattagtatcacccatcgatcagggttttaagttgccatccccgttgaggttttgttgtaatacttttatattggagggaaaatgcggctgaatgtaactgcaattttagtcccaaaaaccttgacgtggtggttgaaatcgcggttgcagagtgttttataaaaccttgtcatcaatttagtcttgaaattggcgaattttgttggttcttcgtgtaagtgcacattagccagtcaattgggtccctcaacgtctgtaaccaaattaactagcagatgttagggactagattggctaatttggtaatgttagggacccaattggctagtgatacaatttcatggatcaaattgatcgacagattgttactagagatagggactaaatttgctttttttgtaatatttatgaccaagttggatgttattgacatatttataaactaaattgatgtttacccattttagggattaaattggcatttcttaaatttgaactgagtgatgtgggtaaggagctatgttgtttgtgttgttcaggtgt

SEQ ID NO: 22677 - DNA, 599 bp, Glycine max
  Intron number 2 from transcript Glyma08g16190.1 (locus Gly ma08g16190) derived from phytozome v7.0 (chr-ID Gm08; pos 11810556 to 11811154 reverse strand)
gagttcccctgctgcatttttctccattgaaagtatgcattttttcttgcttgctagcttttttattttttttcctagggtttattaatgttttctcatataagtgaaaaatgaaacatgtttgctctatctaatcagtctcaaaatcaacaccatatatcgttgaaatgttcagaattaactacacctagcaagatacttattgttaaatcaaatcacatccctgttttcttctgttgtaatgatattagagtacagtaattgagagttagttttttacattattcttgcagagaatgggaagcatatttaagtgagaggtaaaaaagagtatgagagatgttaatcttaactatagaatcaaattaaatagtaagattaggtttaagtaaatcattgtgagggttgtatgctcaaaattgacttctcttatctctcattaaatatgttcccaaaattgataatatatatatatatatatatatatatatatgcaattgtgcataataataaaaaagacagttttgatgttatgactaatgaatacttctctatttattatagatcttgcagcattgagagaagtaggaagctttaaa

SEQ ID NO: 22678 - DNA, 656 bp, Glycine max
  Intron number 2 from transcript Glyma07g05300.1 (locus Gly ma07g05300) derived from phytozome v7.0 (chr-ID Gm07; pos 3950771 to 3951426)
tctctcaacaggtaagttttctcattgctccattttcattcattggtactgaaatgaaggaaaaaagattgatgaacactcacataatagtatacacctaaagaaagaaagagatagaagtgtaggcatgatatgtaatataacctgacaagaagagagagatagaaaaacaatcatgagtgttaatgaggagtttgcaatattcaggttttcacatataactacacttaagtgaacctgttgagaggccttgaattttattaaatgaccctatctgaaattatggcctgacttgacattttggagccctcggtatggacctgatccgattttgatgttgccttgtaatttggagcgatttttcgggttgcgtattaaggaaagatgaaaaagttttttgttcattatataagcattgttttctaaaaaaaaataaaaatagaaatctcttgactgcctgtggatgtagggtacatcagccaaactatgttaatcctgtgtgtctttccttgtactgtttcattgttttaatgatgtattttgtatacgctataacagaacaccttgaacctgcttgttgaattacttgttttctttgattgctgttccattgaattgagtgtttttcttttggtgtgtgtttcttgtctttgcag

SEQ ID NO: 22679 - DNA, 774 bp, Glycine max
  Intron number 3 from transcript Glyma08g01840.1 (locus Gly ma08g01840) derived from phytozome v7.0 (chr-ID Gm08; pos 1185792 to 1186565 reverse strand)
ttggcacagttgacgagaagcgccttcaaattggtgtaagttctgatcaagcacactttcttttctaagattgatgttacaacaggaaccttgcttttaagattcttcttaatgaaatttatcacaatgcatgatgttttaccctttttacacggccaaatatcctatctcttccttcatctgtttacgtgtagtctaagttgctcgtagtatgctttgtatctaattaattcattaattatgaattgtacgtgttatttcaatttaaacgtcaaagaagtttgttaactatctctctaatgtacagagaggaaagcatcttccttgacatcttattttgtcttgattcttgacataagccactcttttcttttatcttagtttttctctcaattcttcccacactcaaatacattggtgtaggagtaggacgtaggattttgtgaagtgaagaaatcttttcaattttgtctaataacgtagcactttaaatttaaatcttaaaagacctcaattattatttgtactgtgatgatgaccagaagagaaacaacactgaaacccatccagtactccatcctacatatagatttaaaaaataatcaccttcatccttggtctgaaaaaccagtaccttgttttaatgatctagtgactagtttcatgaaaaataaaataacatacatgcataataaatctagaagttttaattaagctttaaaattgccgcttattacaggtaagttccagaagaagaagagattatagttgtaa

SEQ ID NO: 22680 - DNA, 581 bp, Glycine max; identical to SEQ ID NO: 17972
  Intron number 1 from transcript Glyma07g07500.2 (locus Gly ma07g07500) derived from phytozome v7.0 (chr-ID Gm07; pos 6184565 to 6185145)

SEQ ID NO: 22681 - DNA, 722 bp, Glycine max
  Intron number 2 from transcript Glyma07g30060.3 (locus Gly ma07g30060) derived from phytozome v7.0 (chr-ID Gm07; pos 35133108 to 35133829 reverse strand)
aaatcttcaccttttgctcagagctggtaattgaacttattctaaaattttgtcccttggtccaaaattatgggtgaattttcattagattattttttcgcttcacataaaatgattctttgatcatgtgagaagagaatgaagcctcagttaggacagttgattaaattaagaatagactaataattacaggtagaggaagaccaagaaagactttggattttgctattattagaattggtttagatttaaatggcttctatgaaaaatgaaaaattgttttttaacagaatacaatggcattgtttgattgatataggttgtagatgacctcagtgggaaaaaaaactttggttatcactgttatgtataaatcattgatattatttgttagcaactcttatgttaaaaacccgaaaatggaactcatgcatgcttcccatggtgtaaatttttttttcacctaacctaattcatatattattgtcactcctttgtttccaagaaaatatttcttttttgcatgatataggttgctagaaataagcatatgcctttacaagtctaattgatcgcatttttaattgactggacctattgggtgtttctcaatcttactattaagggaatcatatgccgatttctatatccatgcaatatcaaatgtttttcattaccttgcttcagtttcctgggaagaagagctgggtggaaaatagctt

SEQ ID NO: 22682 - DNA, 682 bp, Glycine max
  Intron number 1 from transcript Glyma07g00680.1 (locus Gly ma07g00680) derived from phytozome v7.0 (chr-ID Gm07; pos 363752 to 364433 reverse strand)
gaagaagaaccactcgcagccgccacaaccaaaaggtgatgctcttctgcttttccctgtcttaactgcgcctgtttttttggttaacatttgtaaagttgattttgaaatgaaatagataattgtgtttgagtgctttgactaattcagaatccgtttctcaatgagagacaaaacataacatgtgaacatttatttaaaaatcacgttaacgaatatgaaaccaaacaagcagtacactgaagtagaaagtacaactgctaccgtgtataatatgcgtgtctgcttctttttgtcgtttttcctattgcatcagattaacttcaatttgtggcttataattatgtaatactcttgagaatcctagtaaatgtgctgactgttggtactcttgtacattctgtgatgtgattttttttttcttttaaagaatcaactaactgttgaggtttattatttttgaatgttcatgttaaattcagttggatgggttgctgcttttgtttattacttttgtcacctgcgttatacttcagataatccaaaattgcacaaagtgtggttttgagtttttttctaatttcttgtaaaactggcaataatgtgaatgctggaactaattttgggtgtcatgtcaatgtctccagctgacatagctggtggcacacttcagaattggcag

SEQ ID NO: 22683 - DNA, 779 bp, Glycine max
  Intron number 1 from transcript Glyma08g07930.1 (locus Gly ma08g07930) derived from phytozome v7.0 (chr-ID Gm08; pos 5684055 to 5684833 reverse strand)
gccacgcagaaggtgatgttttgtgcttacttggtgcttcaatttattattttcgttttatttttagtttcctattttttttttcttttttgaattgttgactttcagatttagtgtttctggctcatatgtttgaatgagaaataaaactggggaaggagttagtaataggcttttatgttggagattggggggtagctagcatttgaaatattatttcaccccagttctcggcctttgcctgtaatatttttgttaatattatcttatcaaagaaagtgaagattttatgagctatatatggagaatcaaatggggctagatgacccaatttggttttctaccaaaatcctagtgtttggtgaggttctggtgaattaactgtgagatctaatactgttatagtggaaggacaaagtttgtaatgtgaaacacaaattaagagattaaattgaactgaataagttagaggagcaaattgaaaccaatctttgatttagaggacaaaaatgctaatttttccttttaaaattttctatggtgtgttggggaactatacgactagcttgggttgtttgtaggctgtaaacttaaaaatgtttgatgttatgattggggagttcttgaggaacttgggcttcatgtttttacttttatgtatttcacaaatttcattagagcaacataaatttttgacacctgttgattttgtactcctatcaatttaatatgttaaggatgtttgtaattgtacttgaatattacttctatgacaggtg

SEQ ID NO: 22684 - DNA, 957 bp, Glycine max
  Intron number 1 from transcript Glyma08g27560.1 (locus Gly ma08g27560) derived from phytozome v7.0 (chr-ID Gm08; pos 21848006 to 21848962)
ggctctgctgtcttgtacttgctttacttctacaggttcacctcattactatttttttttccttttttttccttgtttatgtcttgaaaagttgaaattttgattggttatgcggttttttgtttgaggggctgttcagttttcgttagatgctctactgtttccattttctgcggtattcattctatactgcgtggaccttacgccctgttgttggcttttgaaatgaaggcttgtgaaagatggaacctttgttcttcgaatttgataaagaaagtgggttttgtccgaatgtggaaacttttttttttttatcatttgttagcttctggtgggtaatcttgttggtacgaattatttaagtggaaaatatgccgtttaacttgttttgttgctgtaaagatttagatttttaacaaatgaataaatgaaaattgttttctgactattattcttttagtaagtattgattttgtatttgaattttcgttgagtcaagtgagaagtaattttctgtccccttttggagtttggaatatgttttaagtttaaattatgattgctaacacggaatttgtgcctaagaactcctgtaattgggaaaaccgtgcacgagttggcgatcactgatggtgatcagttttggctgtaaatggaaggaggttattagatatctttggtgtaaagaatggagtcatgaatcatacatgctataagaattaaatatctaaaaatgaagaactatatatagcttcaccagccccttgacttaaacaatatgtttgcttgtttgctttacttttctgtgactatttaagcaagtctagcaattgtgtctgtatcataatttctattgtgtgtatcattatatgaatatttcgaggctcaatatttactttgcttctttcctttctgtttacttaatttccactgtttaattgtctgtttatgtttcag

SEQ ID NO: 22685 - DNA, 274 bp, Glycine max
  Intron number 2 from transcript Glyma07g17000.1 (locus Gly ma07g17000) derived from phytozome v7.0 (chr-ID Gm07; pos 16667435 to 16667708 reverse strand)
tggtctccaatcccctcctaattgttgaggtaatcatctttagttttaatacaccttcaacatacaggctctttttggatataagcttctctataaacacttacaagataaaaacataagaagaaaaattgaaataagttcaaattagctttttggagaagtcaaaatcatcttagtacttgtagagaaacttatctgaacagggcataattacttttgcatatatttgacaagatatttgatgtttcatttttgcagtgtagtgaagcaatta

SEQ ID NO: 22686 - DNA, 267 bp, Glycine max
  Intron number 1 from transcript Glyma07g39510.1 (locus Gly ma07g39510) derived from phytozome v7.0 (chr-ID Gm07; pos 43982927 to 43983193 reverse strand)
agtgcaccttgaaagaacagcttgaaaaggataaggtttaatttactcttttattcccatttattctgaaagatctatatatgttatggtttattcttcagatgcaattctatacattttttctttagagttttatctcgataatttgattaataaagattggcattaaaagtcaacatacgttaactctatttccgattaagttttttccttattcttctgtgtatcatttatgcctatgttgtgttttctgcttgggatattagg

SEQ ID NO: 22687 - DNA, 705 bp, Glycine max
  Intron number 1 from transcript Glyma08g17290.1 (locus Gly ma08g17290) derived from phytozome v7.0 (chr-ID Gm08; pos 12804665 to 12805369)
cttttttcaccgttcctcacaagaccaggtaaaagggtgatcgcactttttcacaaacccttgctaaaatcttcagtgttgattaacagagcgttctgaaagcaaatgagctttcttataaccccattattttctgctttacgctaattttgcttcctttgagaatggaatttgtttagatggattcatataataaggatttttttttaatttgtgttttggtcgccagctgtttgataaaatgcttgattgtcacgtgcaatggattattgttccagtgagaattctgacgtgggtagtttgtttttgtttttaacggggggttttgttgattggtatcatgtttagctatagtcaatgcgtatgtggtgtttagtttattgcctaagttattgagctggcccttttcccatcttgccttatggtgtgtgcgattttgttgatgcattcactgggtttgtgtttgtgttgtatgtttaaaggttatttatttgattgttggttgtaatataagaccaatttcatgtttttggtatatattacgcactttcttttgattggtagcctgggttccatgtgatttggttttatttgggtttgtaatgattgtatgtctttacttgcattggatttgtaattctcctttttgttctattttggttctcctaaggtttgaagctattgccattggaaattaggacttct

SEQ ID NO: 22688 - DNA, 681 bp, Glycine max
  Intron number 1 from transcript Glyma08g09040.1 (locus Gly ma08g09040) derived from phytozome v7.0 (chr-ID Gm08; pos 6427702 to 6428382)
ttcaggtaattaatatatatagttttttatttttttcaaaacagagtcccctggtttgtttttgttctcttttcttttattaagttttaaaaaatggtctgaaactgtaatttgagccataatttctgctagctttttcctctctctctctataattatagttgcattaacagtatttataaataagtattttctcacaatgtcaagagcaagattttgaaccgtcctggtgtcacggtttttgtcacagttcttgatttttgagggaaattactgacaaatgaaactgatgcatgtgatcgatagcagttgactccaagaaccatgaaattgcagtcaaaattggcgttgcagattttttttcaagactttgagagtgttttctttgccaataaaagttgttcgggaaaacacacattcttctcttttattacacacaataatgagatacataactgaagaaaaatgcaataatgggctctcattcttaggtcaccgcttaatttattaacgtgatttaggacccatccttatagatataatgcgacggaggaaatatatatgataaaaagttagacattatttattttcttatggggtatatctgataatgtgactatgatatgattatgattaaacttggcaggtgtggagtggaggaatacataggggcagtgaaga

SEQ ID NO: 22689 - DNA, 642 bp, Glycine max
  Intron number 2 from transcript Glyma07g02080.1 (locus Gly ma07g02080) derived from phytozome v7.0 (chr-ID Gm07; pos 1442081 to 1442722 reverse strand)
ctactgttcctgctccaaagtaagttttcttcatatacctgtgctttagacctgcttgaataaacttgttcataagcatttacaggaggggaaaaatagaggtaaaatgaattgagcatttgagcttctcctataaacttagattaacttatgccgcccttaatttttgtaaaagtcctctcatttatatttccaaaagttgatgtgcatgagctgattttagcttctatgctataaactcaaattcattttactttttttttaaaattttcttctcctatgagtgattatagagaagtttatccaaaaatattgagtgttccaaaaccaaaatagtgaagggtgtatgcggatggttggtaactaatcagttcaaggttttgttaaagcttattaaaattaaggtgtgtgaaactgttttcttatagtaagaccttgttaaaacattcgttgatgtatttatttttttggttcaattttcactgaatttttatcctattttcagctagttgtattggctattgaattatatttatgggtttttttttactgtttgattattgatacttgatagatttttctatatggggtgataagtgaaatatatatcaaacttatttgttgcagagcacaagttgtggg

SEQ ID NO: 22690 - DNA, 782 bp, Glycine max
  Intron number 3 from transcript Glyma07g00280.1 (locus Gly ma07g00280) derived from phytozome v7.0 (chr-ID Gm07; pos 95659 to 96440)
ctccccaagcccaggctttctactatagaggttaatctttatttcttcatttctgcaagtcttttttattctttgaaagaattcttactcttttattaagttgaccgaccaccttggaacttcaactatacatgacttttaagtttttcatatatgtgggcaatgctattgtcaacttcctcaagtttgtgttactgttcttgacattttgaaataaattactgaaacggtactgtcattttgaaacacatgatagtaatgtatcgcttgcctgagttatttattcttttttaacctattcagcattcttctcgcactaccagtcatattgctttcattgttatccatcgttatgcacatttcatggcacacaactttagaaatctatgcagatcgttaaattttaaatgtttttggacttgatgaagtttgtttgttttgataatcagtttgagttttcaaaagtgcgtgagattttaaataaaatttttaatgcctttgaagtgaatggaggagggactttgttcttttatgtacataatttagtaacatgcttttggacacttctgtccaattatttttttccccttaaactagcaccacatattattatcagagaatttttgaaattgcaaagtggacattgacaatcggactctcaattgtcttttggttctcatcttgcaagtgtgctttgttgtgctgtgtttgtttggtaattggtgtttctattgctatattctaatttttggtgagtctgactccaggttttgacaacggca

SEQ ID NO: 22691 - DNA, 345 bp, Glycine max
  Intron number 1 from transcript Glyma06g36910.1 (locus Gly ma06g36910) derived from phytozome v7.0 (chr-ID Gm06; pos 39255365 to 39255709)
ttgtgcacgttgcagcactcaacgatcacatagaggtatcatttaatctatttacatacactgatttgaatttaatcttgatatgagtaaaatgttaattagtatcagggcataatgcattggtacaattcaaaaaattaaaatttaacaaatccaaaaactaaaatggtggatgcttatgtatatatatataagtgttactaaatgactagaaataatatcttcttgttggaaaaaaattaactatctattgtcctttaaaagggttatatcaaatatttaattgagtattatttcttatatcaaaaagaaaaaaattagtacgtagttctgattaagtgtaag

SEQ ID NO: 22692 - DNA, 745 bp, Glycine max
  Intron number 1 from transcript Glyma06g43940.1 (locus Gly ma06g43940) derived from phytozome v7.0 (chr-ID Gm06; pos 46918895 to 46919639)
ttgaaggtaaatattatcttagtattaattatcttcttactacacctttagcacaacattaacgttttgactgtctacaagattgtatatataattagggtgtaatttgcttgataatttgacatgcatgccactaacatattgttcaagaaatttagtcaaattaatttctattcataatatttgtgtgtgtatatatatatatgtgtgggatgtatgaagtgaacaactataaattgaaggttaggattaaaagttattcaatagttacattattatttaaaaagttacacaactttatagtttaattttaatcttttatgattttatcttatgactaaaatttacttctcaccaatgcaattttgcacaagttttttacttttttttttgagtgagtttgaatcgccttgatgtcactttcatcatcacttgatgaatcactttctccattggtaccctgctctgtaatattaggagtgtcttcatattttaccattaatttctcattatatataaaaaaaagatttacttctctcacgactttgtgatatatataagatttacttctcacacacaattttatataactcattctgcataatagtttgatttgtaaaatagatatctattctgtttattatgaccttctacaattgaaagttaccatacaaaatattgttttactaataaatagcaaattaatatctaatgtcattgtaatttgattgacatgtagactata

SEQ ID NO: 22693 - DNA, 851 bp, Glycine max
  Intron number 3 from transcript Glyma08g15800.1 (locus Gly ma08g15800) derived from phytozome v7.0 (chr-ID Gm08; pos 11493350 to 11494200 reverse strand)
ttttctctgatttgcggatctaatttttagcatcagtaaactcgggaaccaattcgggctctatgaaattgaaaaaaataaaaggataaagcggaattagagaaggagatggaaagaacatcgccacaatcttgagagattaataagttgaggatgattcaccacaaagaataaaattctttgataagaacctaaggttccacacaagaaccaagaaagacactctgttcgtgtctgatatgaaatttcataaagagtcaatttataaatcctactaataaccctaaatgaggcccaaggcccaataactaatctaataattaaaagacttaaaaagaacaataaaaaaatagcagcccattacaagcccaaaaatataattaaaaacgaaaacaaatcttattataaaagttggctaaaataaatgaacttcatttcttctctttcctccatgagagaatttagtctcttgccaaactcttcttgaaatatcttactccttgcttaagtgattggtccatccatgttgagcccatctaagccacactcttcctctttggatagtcctctattagtttgggcaacccattgtagagaaaatccatttcattggtctttgccactaagagctcttcttttcaagtgacacctctcttgtcccactcagttgactgatttgtgacttatttcctctcccaaacaccacaacttttctctgttttttgactgttctgagtatggcacctctcttgtttcaattttttccctgtttttgacctctgtcttggatcactatcaattgtgggtctcttttctttttctttcctttttgtttttgtaggtttcttacc

SEQ ID NO: 22694 - DNA, 711 bp, Glycine max
  Intron number 1 from transcript Glyma07g17030.1 (locus Gly ma07g17030) derived from phytozome v7.0 (chr-ID Gm07; pos 16690665 to 16691375 reverse strand)
tggtctacaattgcctcctaattgttgaggtaatcatgtatctttatcctgaatactgaatgcgcattgaacatattgattacttttaggggtgatcatgacaggtttaattatgtttatattcaatttgaattttacacaagatcgttaattcattattcttgttagatttcatcttaaaatcaagatcattaattcattattcttattagatttcatcttaaaatcaatatataagtgagtatttgcaatgaaagttaaggcgaggtctcaaaatcagagtttattctgatatcatgttagatttcatcttaaaatcaactgagattaaatgaaattgtccaatagatatacattgtactccaaagaatgagacggcagatgtaaaatttgagtatttttcaacaattttaaccagaccataattcaattaaaacccactaatatatggacaaaatattatattattaatatataattattttaaaaagttatacattttaaaagagtatagtagtataacactaaaattaggtttgtagaactcgaaaaatatctcaaactcgtcttcaaaatatatagggtctagttttttaaacttagacttgtaaaaaatcctgaacacccccatattacttttgcttatatttgacaggataaagtttcatttttgcagtgctgtgaagcagttaacgaaggtcaagttcatta

SEQ ID NO: 22695 - DNA, 516 bp, Glycine max
  Intron number 3 from transcript Glyma07g04420.2 (locus Gly ma07g04420) derived from phytozome v7.0 (chr-ID Gm07; pos 3208996 to 3209511 reverse strand)
tcctgtgttttctcaagagtacctccgaagaaaaggtatatctttcttcatactttgctttcattagtgattgattgcatagctttgtttcctaaagcaggatgtagctacaattccaagtgtgatttgaactggtttagctgttagtaagtgacaactcaagcctatatgttatctacttagatcagcctttctacataacctgtttgataggaggttagtgaaccacaacatacagtgttttttcaactatttgttgtactttcgtgcaccctcaaagcctggctacagagatattttaatgtttttattattaagagttctgtggtaatttgcaagtctgtattactgtatcattgtggatactctgcaatagcaattagcaaccaatatggacaaatttgaagtattttacattttaagttttgatttctgtattctcattgagggttggaatacgaaatttgctccaattatgcagggctcggactgtgtacatccatttgttgctctgca

SEQ ID NO: 22696 - DNA, 811 bp, Glycine max
  Intron number 2 from transcript Glyma07g26900.1 (locus Gly ma07g26900) derived from phytozome v7.0 (chr-ID Gm07; pos 29726997 to 29727807)
tcagatcccttagtttcttattttaaaataattaggtgttcaaatccttatgaacagatttaagaaacaagaacatgtacatatccataaatcataattttatatattcttttatataatcatatcaaatagggtcggcaaaagtaaccatatcacctagtttcagatttaacttaaataggtatgaatatgctcacagatgtgttcttgtgtacgcttgtatttctcatttataaagcctgtacatctctaatatctagcatataaattcacaatataacttcttagcatctatgtggtgaaacagaatatgattaaattgctcataatactctacttttttctcatagttgtgctttcctccttctcttgggttttatttaaacaatattccaataaacctagtttaggagaaaaagattaacaagggaaaaatgtttaaaatagacaacttcaaaatatttttctctctcgtgtatatattcctcactttacattgattctatttgaagaagtgctgcttttgcataaaatagtgctacaaagtatccataaaaatgtagaaaatgctgtctgctatagtcaaaactaataagcactaacctatattaccttagaatgagtcttgttctggtaacggaaacttgaatatcttagtttataagaacactgaatattttgatagcaacaaagaagaaatcttattcttccactttctctcctaattgttagttacgcggtgctcctatgatctatgagaaagatgtttccaaaagcaaatattttaaggaggcttgtgacaaccattggt

SEQ ID NO: 22697 - DNA, 816 bp, Glycine max
  Intron number 1 from transcript Glyma08g05350.1 (locus Gly ma08g05350) derived from phytozome v7.0 (chr-ID Gm08; pos 3794114 to 3794929)
ttctggcccgagatctccaccagtctcccgaagatgtgcgcattctccttttccttttcgatctctgtgtttttgccactttggatttgggttttgcatgtggttttatacttctttgtttagatgaaagcaacatggtttcaattgctgtgcccttttagtttctctgagtatgttagctaagaacgatgaaaaaagaactgtttaattgcagtaattgggttgtatttgattttaattacggtttagtagtaaaattttatttactccggtcttttgagttcgtgtagtaacccacttcccgtataaatttttgtgataatattccatgattcaatgcgatgtggtcttgaaagcatgacttctcaatttgggaaaataattttaactgaatattctttgtacaacttatcacctcccaaatcacccagactttcttattgacgcttttggtccttattttgcttgatgttttgattgtttgtcccttgtttctttgcttaaattaaatctttgatgggaatgaatgttgaagattgaacctgtgtgttttgatatatgtgttgaacagagagtttggacgaggtttcaacccgtgttttgaaagcatggcttctcaatcgagggaaatagttttagctaaatcttctttgtgctgcaatttgtagtctttgttattggcgcttttggtccttagttggcttgatgtgatcttatgtttggctggggtggttgtttggttgaattaaatctttggtgtgcgctgaggattgaacctgtgtgttttgatatatgtgttgaacagagagagtttgc

SEQ ID NO: 22698 - DNA, 954 bp, Glycine max
  Intron number 2 from transcript Glyma08g26260.1 (locus Gly ma08g26260) derived from phytozome v7.0 (chr-ID Gm08; pos 20606000 to 20606953 reverse strand)
ttaccttgtcattacgctcaggtaagtaatatgccttaagtaacactattaaatcatggttgttttctttaagtggattttaatttgccatggagattgttacatttgcatggacaaaactatgcttccatgttggtataacaaaataattcttctaagattgcacatcaattaaaaatgtgatcaatgtagtccttacaaggttcgacaagtcttagtttacaagttgattttatagggttgagttagtcctttgatctatgtttcaagacgatgttagagtctatgttagatccattattggggtctcttaccttttctttctcacttcatggataaagttactttcaatgatctttttccaaagtattccaattttatttttacgtaccttgttactataattccctttcattatatattttgaaactgaatggaagctaaaaggtaatatgtataaagaaaggtaattttaaaaaagaagtttctttaaattaatgactttaagggagcacgaagagagcctttgaatttaatttgaaatgacaatgttctcttctgttttcaattatagcagaacaaaagcatattttagagaaagaaataattgaataccaagcatgcaaatcccttttgagatttgtagtttgtgagaccatttttacccgacacacattaatagtaaaatgaggaatgaaagaaaaatcagtctgctgatttcttcaacaagaacaatttagtccggtttcataaattcatagtgacatgtacattattaaatatgaaagtatattttattagttaacagattccattaattgatttattatctatttacaagctttctcgctttgttacatgtttaatggtggtttgagctgttgctaaatctttatatggtaattgattcttaactaaatctttgtgtaatgcgcaaataggtattgcatcata

SEQ ID NO: 22699 - DNA, 715 bp, Glycine max
  Intron number 1 from transcript Glyma08g06630.1 (locus Gly ma08g06630) derived from phytozome v7.0 (chr-ID Gm08; pos 4779825 to 4780539 reverse strand)
ctgtcaataccacagttagagacccaggctagtctctctccctttgtgaaatatgtcgctgtaaaactgtttatttgttttgtttaccattcagaaaaattaaagagaattaaagaaatagaaaaggtatttaaattttctttcaatttttaaattttagcaggtacatctagtgtgactaaagagaaaggcacattattcaaacgagacttttttttagataagtattgcctgaacacacgtgattttttctctttacagaaagagacatgagtgataaaaagaggggaaaaatggttttaaaaaaatcaaaactatacttgacattagtaaaaaaaaaaaaatgtaatttaaaggtacacaccttttctcataaattaaataaggtgttagaaaatttcttcttcttttcccctcccatgtgaaaaccaaaaagagagacaactattgaataaataaaaaaggtgacatggtaacctacttgttaacatcccatcaaaatataagaaaattggaatgaaaacaaaaccaacgaaaaggtacttaaagactagtaattggttagcccataacaagaagcacaaggccaatctcccttctaaagttttattgaagaatagagaatccaatataattttatcatgaccaaaagtacttaattacattggtgttttgtgcagataatactaaaaaaatacctcaccttttggcactg

SEQ ID NO: 22700 - DNA, 712 bp, Glycine max
  Intron number 2 from transcript Glyma07g35560.1 (locus Gly ma07g35560) derived from phytozome v7.0 (chr-ID Gm07; pos 40795423 to 40796134 reverse strand)
cccttcttgggaacaggtgagcaaatcaatagtagtagaaacttttgaaagttgaaagtcgaaacagtaatttattgagtaccacatagaccccataaaccaaaaataactaacgaccgttgctatatctacatcattacatggcccagctagctaggaatgctaactagcatatagcacaattttagtatgctctcatttttggctatgcaagttttccattagaaaaagggctccaacaacatgccatttacaaaacaacaaaactaagtaattctgtagatgtttttatattgttctatcctcataattaaagttccatctgtatgttgtataataaagatttctattaaatgtcaacataacttatcaagataaaagtagatttgtgggtagatttgcggttagaaagtaatataaaaatattgatatttaactgcaatgcactaacaataaaaataattatttgtatcagttttaaaataattataataagatataaaattatcataatacatgctaataatatgtgatcgaaaaatattctaaaattattttatataatatgtgattggaagatattgtaaaattattttataatttatggatctatatttaaattttgtactctatgaaacacgtatttagataaatatgtacacattatcatgtccattgctaatggttgtttgttgaattttttttttcacag

SEQ ID NO: 22701 - DNA, 376 bp, Glycine max
  Intron number 1 from transcript Glyma06g10060.1 (locus Gly ma06g10060) derived from phytozome v7.0 (chr-ID Gm06; pos 7593957 to 7594332 reverse strand)
acgaaccttggattcatttcagtagcatagttcaggttcgtagatctcgaatttcactcaatcgcgtgttgttttccacttttccttttttgaagagccgtgagcatgttgaattaagtgccgttttctgttgttaaaaactccgatggttttattgtaattttgacaccaatatttagggttttgtttcttgctttttgctgattctgaagttaatctcctctcaatttaaccctgagcttagttcagatgctgagaatttgtcaatagatcaagattgcagtgaattgttgagtttattgctttgctaattgctgatgttcttgtttgctttcttgcagggtttattttccattgaattttgaaacttcttttt

SEQ ID NO: 22702 - DNA, 197 bp, Glycine max
  Intron number 3 from transcript Glyma07g08140.1 (locus Gly ma07g08140) derived from phytozome v7.0 (chr-ID Gm07; pos 6790432 to 6790628 reverse strand)
aaacatttctttgattgtgtgttgtctcccacaaggtttgataattttgatacctaatcatgggtttgattttcatataatttgaattttattgattgtaattgttctgattgctatgtaacaagtttatttcttctgtttttgacctttgtattgatttagagaacttgccattcaaattgcggagcagtttgaag

SEQ ID NO: 22703 - DNA, 777 bp, Glycine max
  Intron number 1 from transcript Glyma08g22740.1 (locus Gly ma08g22740) derived from phytozome v7.0 (chr-ID Gm08; pos 17249997 to 17250773)
cttgcctgtgtctcctaccatttcaaacacgcttggtcagtctctctttttatctaatacacgtttatttaatttttattgcatctttgtctacaataatatgttatgttaactttaggatttgctgcaaagaaccatgtcatataaatatgcatagtttattattattattattatgggtacttttatataattatatctttcttggctgcggctattgttctgttaagagtactagaagaaagttcctccaccaaagtgggaatcagaataaattatcattatattgacattgcatcagaactttaataaagctaaaacatgttatgttctcacttataaattctaacaaatactcgccaacaaccttattatctgatctgactttttaatattctttccttaaattatttctcaattattggataacaagtagctgctgggttgttataatcattcattcaaatttgataagagtttcatattacagaatcctttaataatttatagtctcttagaaaatatttaattttttttcgattaggtttctgcataagcatttcccttcctggatcttaatgtgaatgtcgattttccatcttaacaatatcggtatggtatagtatcatccaattgaatcttataagtaactacaaaggaccaatattgatcagagaaaatgagtctgaactatcttgcatatcaaaagagttagattagtatatgctctttcaaatgtaacacttataatttctcatgcagttagtccttttctca

SEQ ID NO: 22704 - DNA, 775 bp, Glycine max
  Intron number 1 from transcript Glyma06g43560.1 (locus Gly ma06g43560) derived from phytozome v7.0 (chr-ID Gm06; pos 46581888 to 46582662)
aaggtttgttcaacataatgcttttttcaggctccatttttgggtttttggcctttttcaaatgatcgagaaagtgtttatgtattattttttttatctacaaatgttagtttgttagttatgttaagtgggattcgaacctgcaacctctcgtccctcccttctccctctattcttttcccaaccattgggtcaaccttatatctcctaagtgattaagtgatttgagtaaattgtgaatagtgttaaactgagttagtcatttaattgaattgggtcatgcatgaatggtaggtcaaacttcaaagggtgtatagtaatgatttctattttacttttttcgcttttactggcaattgcattgtgagcatagcgtgacaattcacagtttgatggatttggtacatatcatgtttgcattcatcttcattacagcttttgactttttggagtattttttgagcaaataaactcattagcactctcttctgcttccatgaccatctcaacatgtattaatgaagtgttgggtacttgaaatttttgaatgtaactatgctagttggtagtagttgatttgttgctttgattgccaaggattcaatttgagttttctttcctaaaaagggggcgagaggaacttgatattatcaatccaacttagttgtgcttatagtttgatttatgaattctgatgtcagtagaagtaaacaatgttagatttcattcattgtttaaaattttgagtttctcattttcacttttgaacatatag

SEQ ID NO: 22705 - DNA, 501 bp, Glycine max
  Intron number 1 from transcript Glyma08g06750.1 (locus Gly ma08g06750) derived from phytozome v7.0 (chr-ID Gm08; pos 4837601 to 4838101)
gtgaggtgcagatatttcgaccagaacaaaatgctatgcgcatgcagatgggagcagagaggttgctaatggtggcaccttctgttgagcagtacgttgatgctgtcaaacaagttgttcatgcaaataagcgttgggtatgtattaattaattgctcccatttttatttttatcagatgatgtttaattacttgcatttttatttcctattttcatcttctgtttccactttttaattataaatcctccaccttattttcaatgtgtttcctattttcaaagatttgtacagcaaccagagaagaaaaaaagttatttttagtattttctatacaattttttcaaaagaggaaacaagttgaaaacaagataacagttttgtaattaaaaagtaaattaaaacagaaaataaaaacacaattaaacacccccttttcttttttttcttggatcatgagttttgagttttgtaattggaacatgcatgcaggtgcctcctc

SEQ ID NO: 22706 - DNA, 629 bp, Glycine max
  Intron number 1 from transcript Glyma07g13450.2 (locus Gly ma07g13450) derived from phytozome v7.0 (chr-ID Gm07; pos 12178891 to 12179519 reverse strand)
agaaaaccactaggccaaaatcgtgacatcttcatgtacaggtattagctcatttttcattcaattcagatcactcaaacaactttcatctgtttatgagccagctagtgataccccagatgatgaatcttgttgatttgatcaactttttatgtaaaaaaattagttttacactgaattttcatgtggagcttaagttttcttttctttttctgtgttgtagaccttaattagttttttcagatctagaaaaaagtagatgcaataattctttgattagttttatttttgaaaggccaaagaaaataatattattaagcaactattgaactaaagcacaagatgataattctttgattagtttgagaattttgttgatttttttctcctattggccggattaatgcaattaatatttcataaagtttggtctttggactcaaacaagcaacgttgtgagatactcagattcatgtagtcgttcttacttcatgaaaaataaaagatttattatattctggattggttgaaaacttgatctaattgttttgatttttaatttttaatgagtattttggaattgttgctatgcagagggaacacaccattttgtagcaaagagtgcagac

SEQ ID NO: 22707 - DNA, 850 bp, Glycine max
  Intron number 5 from transcript Glyma05g26480.1 (locus Gly ma05g26480) derived from phytozome v7.0 (chr-ID Gm05; pos 32435724 to 32436573)
agaaattctacttgtgtggccggttacagaaaccagtatgttgccctctttttccctcttcatgtctagaatcatttgattcttgatgtttcgggagctctaagctagattcttaattttcacatatcaatatcatcaaataatctctgaataaaagaattagatattttatttttggcatctttgctaatttatattttctcgtgttcaactaggaccgtttatttagtaagtacttttaagctttgtgattcacctcttattcacagactgccgtcatgaactagcagtgaaggtagatatgcagaggaacactagtaacatatagaggatgacagaaaaaagaaaaaaggaaaacagaaaggcattgcaattacaaagaaggggatggagggggaggtggctgtgttggaggaaagagagagaaggttgaaaaaataaacccctagttctcagaatctcagcatcattctgataggaaaaatagtactaataaaagaaattatggaccatgactagtgttttaaaaaaagcaaaggagcctattcaattattggaagtttatatgtggtaatccggttgttggttaattttgctcctaaatagccatgtaaatctatcccctgtacctcatatcaagaaaagtcctgtactgcatacttgtatgcatacaacataccaaagtgtacgatagttcatgaaacacttctccagggctagtgtcacatatctacttagtttgcctgtcatcaattttcctgataatttgaatccataattgaggcctatttcttttccctatgtttttggatgtgtttcgtttaggttcatattgttgtcgataatttag

SEQ ID NO: 22708 - DNA, 937 bp, Glycine max
  Intron number 1 from transcript Glyma06g23070.1 (locus Gly ma06g23070) derived from phytozome v7.0 (chr-ID Gm06; pos 20103897 to 20104833)
aagctttcttcgattctgggtatgtctcttttgttgttctaaacgttcaagtttgcagctttttctccaattaagcaaaaaaaaaaatgtattttttttgttttttagattggttaatgttcagttggtcctattgggattttgggggtgttttaagttgcttgtgttgggaacattgttgggacgagtttggtcttttacggttaaattgaagcgatggttggtttttgatttttttttagatgatgttttatgttattatgttaatgcataaaagttctaagattgatttggttttgaagaatgagaatatgctccgataagactgtgggaaaaaaaataaactaataggaaagatgcatggagtaagaccaatataacttcaaagctgtgaaagctgcgtgcttggacttgtaatgtaggtaattttttattattgtaaatttgtaattactgtttagtctaggtaattttacttcttggagaggtccaagatgaattgtagaagaagaaagtagatttggtcatttttactttttggggttcttacactatgtaagcaatcatattagaaggattgcaaaactgaaaggatgttttgaagagttgatttgtgggaatttggcatgttgctggattctgatgtcactgattttgagcaattattcaatgagtatagagaaatatgatatcggtcaattgttgtcaggtttgatttgttcagcaaagtgaccttagctctattttatctctgcatattgttaaggtatttattctgtttctgctgcattttataaattggaggtttcctatcaaaatccagattatttttcacatatttttgaattttgaaatgaagatgttacattgctttggataatggaatcttaatctttgttaattattcatggcttggcagacactattcaaccggctg

SEQ ID NO: 22709 - DNA, 361 bp, Glycine max
  Intron number 1 from transcript Glyma07g01310.1 (locus Gly ma07g01310) derived from phytozome v7.0 (chr-ID Gm07; pos 830483 to 830843 reverse strand)
cgtcaccttactcacctttatttcccttcaatgtaagcttcactaacacacacacatgttatggtagtcatgtgtatatggagtgtgcatacagctatgctgaaaattctgcagtgttttagttccttggtgcttttgatatttttcttcaatcagaattggagtttcaccatagtaacttatgtcgatctttaatgcaaacttttattatgcaccttaccaaggtaagactaaaattttgattgaagaatatcaccaaaaatactaaaggaactgcatctaagttttgttcttacgtaaactcatgccctggcttaatatttccttgttttttcagctttttcccttgttttcagtgcat

SEQ ID NO: 22710 - DNA, 961 bp, Glycine max
  Intron number 1 from transcript Glyma08g40810.1 (locus Gly ma08g40810) derived from phytozome v7.0 (chr-ID Gm08; pos 40649089 to 40650049)
gggagaagaaataatcctgtaaaaaaaggtgtgtatcacaataaagatcaaataaaaatctaacagtataggaaaagaatcctccataaatgacttgccaagatgaattgagttcaatagatcaatttactattaaaccaccataaataactagtaaacctatcagtatctacacatatagagaaaataaattatgcgttattaatgtataatctttaaactctaatatatatttatattttatgttatttacattggttataaaatttaatcaatgatccactagtttaactaataatcaatctatagtcataaaaaaattaatcaatctattagcgacaaaaaaaatcaatcaatctaatagctggattgagttcacgattgatccaatttttaacgctgctatataacaaaaactcttgaaaagcaatcttagccaacctgattaatatttttaatggaatcttccttcgtaaatctaaaagcttacttaaagattcaaatccagtttttcagttgatcgaggtgttcattcggtgatgtgctactagtcccttgctttgctcacaaaaaagaagaaaagaaatcaaaatcaaaatcaacctcatccatcccaagaggggaaataataataattattgaaaaagaacacgcaatatattattctttattcttaataataataattcttaaatttgaaaaaacatttctgtccacacctccaagttgctacaatccaacaaaacatacaaagctggttgttctttatgtttctacaacctctttctttcattcccatttccttgcaaaaggaaccatcatacatagttacataccatgagtatctccaccactaccaccacccctctcttctgcttcaaccactacttcacaagagaaagagaactttccattcaccgttccaggccaaagccattctctctcacttccgcttccactc

SEQ ID NO: 22711 - DNA, 962 bp, Glycine max
  Intron number 1 from transcript Glyma05g30800.1 (locus Gly ma05g30800) derived from phytozome v7.0 (chr-ID Gm05; pos 36062333 to 36063294)
tctttcgcagaatcgttcccgaagccctcctctcggttccgattctcatttcctttctcctgttttttaattcatctcatctgcatgcatccttgtctagcttcaattcaagtcgcttaaatataccatcaatttcatctctcaagtattatcctctctaccaacaaataacaagtattagaaatcgtgctaagtactctttcaaatattgaaaaactcttcaaattgatcccggactattagtaaaatatatcaattttctatagatcgaactaatggatattcgatacttgagggattactgtggagagagaataatacttttttttgtggggggggggggggggggggatcgaattgatgattcatctgcttctttaaattagtatcatccgtcaatcaaggttttaagttgccatccccgttgaggttttgttgtaatccatttatattgcagaaatttgagggaaaataaagctgatgtaattgcaatttcagtcccaaggacaacaaaagccttgatgtggtggctgaaaccgcagttgctgagtgttttataaaaccttgccatcaatttagtcttgaatttgaccaattttgttggttcttcgtgtatgtgcacattagtcagtcaattgggtgcctcaaaggctgtaaccaaattaactagcagatgttaggcactagattggctaatttggtaatgttagggaccaaattgatccaatttcatggatcaaattgatcgacagattgttactagagatagggactaaatttgctttttttgtaatatttatgaccaagttggctgttattgacaaatttagaaactaaattgatgttttactcattttaggggttaaatttacatttctaattaagcactaaaatgtatgctttcttaaatttgaactgagtgatgtggttaaggagctatgttgtttgctttgttcaggtgt

SEQ ID NO: 22712 - DNA, 575 bp, Glycine max
  Intron number 1 from transcript Glyma07g40060.3 (locus Gly ma07g40060) derived from phytozome v7.0 (chr-ID Gm07; pos 44354894 to 44355468)
cagatcagatcctctgtcttcaattcaagttcaaggtccttcctttcttctcaaattcaattcaacaaccttcatttcttccatcttcacttctctctccatctatgtccatgctgcccctccgtttcggtttctcgctcgctgcccctttattttattaatactatttttcgattaactttgtttttatttttttaatttcgggaccttgtccctttgacgtgaattcatctctttcttcgtgattaaattaactgcctgcccgaaatgatgggaattgcccaaattgatgcattatttctctccagatttttcatttttcgataactccattgtcggttagcttcatactaatatatatgtttttatttatttattctatttttaggtctaggttactgctttctattcctctttttttttttctagaccgaattgaaattgaaactttagttcttcttcttcttctgcagtttcaaggttatgtcacattggattggattggatgtttgtttattaccttacgaggtgaaattgattgatgtgtttgttcctctttttatggagcagcaggt

SEQ ID NO: 22713 - DNA, 842 bp, Glycine max
  Intron number 2 from transcript Glyma06g03040.1 (locus Gly ma06g03040) derived from phytozome v7.0 (chr-ID Gm06; pos 2129931 to 2130772)
cttctcaggtgcctatcaaatctctatctgcgcttccgtttataccttacatcatgtaaaaaagaattcctttgcacctatgaatcgtgtgtgtgttgttgaagaattggaactctctaaaaatgctataagatctgaataacctccgtaataacttggtgtccctgcaatacgtgcatggccttatcgagatttttaatttttcaatttactgtaaccaatttttacaattcacattttgttgaaaacaaccgatattatagatctgtttttattttgatctccgcatgtcttagatgttcaatgttctgttatggtgaacctataatgagaagttgatttctgttattgctatcttaggcacatgaaagaattccttcaagtaaatataacgaggtgatcttaggacttatttgtattaaattaaaatagggtaaaattcattttgatagaatttattttgaattgttgaactaattgaacatgcgctaaaattaattttaactatagatttgaagttagtacatctgaaagtgaaagggaggtacaatgagaccgttctctgtctctctctttctctttttgtgcaagaggtattggtgaggctcagtgacaaatagtatttttgtctctttagaaactttatgaattatttttgttttttaatgcaacattgaagtcgtcaatattgctaaaaaaagtatatcacatcttttggtacttcttgtattttgaacggttcgaaaaattcgtaacatcatatacttctactgatatgtcacattttttagtattgatttactgaactggaaaacttatcattttatcttatagattaaaag

SEQ ID NO: 22714 - DNA, 917 bp, Glycine max
  Intron number 1 from transcript Glyma07g09030.1 (locus Gly ma07g09030) derived from phytozome v7.0 (chr-ID Gm07; pos 7524573 to 7525489)
caggtttttttcttataagccaataatttttttagctaagatccatctgaatatatttacttatatgaaaaatgaattagtatctcattaatagacttcattacaaattaaaagaataatttaaaataaaaatattagtaaattaggaaagacaatgagtggagtgaaatatgtggcaagtataagtagtagtccttccatacttcatctcttctagtgtcctacactgctacatgttaaaaagattttcatgaattttatagtatatacttcatctcttctagtgtttaaggttttgttacagctattaaaaaatataattaatttttaaatttcataaaatacattaagttattttttaatatatcatttatctttttaaccaaggattcatttaattttatcatatattattttcactaaatattaattaaggatagtttcatagaaatatttaatgcgatattagttttgtaaaatgatatctagaacaagttttgttttctaaaatatcatataatccgtgcgtgaatatttgttaaaattcaaaatgttagacaaaaattataaaaaaagctaaaaagtagatatttttgaaacatatatatttatacaaaaaataaattgagtcatttattttatatataattcatagtattttaataattttaaagtctgggtatttgcgagtatgaatattttacaaattgttcttgcctccacctaatagtttataaaacaagcatctttgagttcttttgccatacccatgattaattcatcttaaaataggactatatttcttacaaatagaagcaaaattgctttcatttgtttgttatacaaaggactagaaataatatagagccactatgcatgcaggttgctgacttggatttagatcctttaaggattcg

SEQ ID NO: 22715 - DNA, 964 bp, Glycine max
  Intron number 2 from transcript Glyma08g17020.1 (locus Gly ma08g17020) derived from phytozome v7.0 (chr-ID Gm08; pos 12486300 to 12487263 reverse strand)
gcgaagagcttcacttctcacattcccccaacaaggtttacctctctctttctgcataaacactatctgggtctctcaaagttctctcttttattactgggttttgttttgtttagagttttcttttttctagaccaccttcaccaagacaattcttttggaggcgaataagattgccataagcgaaaaagttctccctccaaatattcagcttagctgtaatccgagacctctggataagctggaaaaaccatgccagttgattcacatgttcggtgatttttagagtttaattttgatgcaccaaaagtatatggctgtcaatgaattaaaaattattccaccacctaatgcggatcaactagcaatgagttgtttcagtttaactagtaatctagagttcgagtttggatatgcagctgtgttaagggagagttttgtcactcagtgatactaaccaactcgagcaagattgctttccaaggatgttacctttggtctttagcaaagaaaacttaaaaaactatccaaacacacgatgttttaaattaattattacaaaaatgtaaatgatttctaattgagaaaaaaaggttatgcagtgacagtgcaaaatagttctatattgtcatctgattacaaattatcatgtatggtaagtttgttgacttttacaaaccagcgggtgattggatgacagtggaaaactgttttgcaccatctgtgcatcactattaaaccttttctaattatatgacaacgaacaattggattacactcttagtgtttttcaattactttcttttttttaatcatttatgatgatatatgctgaggacttcagtttaactcctcaagtctctctttttctttatgtgtgtgagattgtgcactgattttgtttatttggtttggttgtgtgtgtgaaatgggtgtagcccgtgatagggtacactcagaagac

SEQ ID NO: 22716 - DNA, 917 bp, Glycine max
  Intron number 2 from transcript Glyma05g26700.1 (locus Gly ma05g26700) derived from phytozome v7.0 (chr-ID Gm05; pos 32614255 to 32615171)
gacaggtaagtaaaactgatcatagtaatgtttcgtctgcgtaatttgcaattcctgttgtttctgtttgtttttatatctcaaatttcgtagtatacaaaccaaaccttgctgggcaagagttgtgttccaacaaatcaaacaattgacaaacctaaagaaagcattgtgcataagttgtttgttctgttttgacagactctgaattgggttatgtttttggttttctggttttgaggctttagctttaggtacaagaaaaatcgccctatggttaagcttaggtgatgagagtcctgtggcaaaatgatctcttactactactagaagtctataacatatccttgcctatgaaatcccaacataggtatcttccccttaagctgtattgattattgagaataactatcaaagctttctctatgatttcttcacttgaaatgcatctgttaagctcagcattcattttatctgggtcactaagtgatagaaatgaagtactagaattcttgtggggttctgtaggctagaagaaaatcatacttgaatcttcagagtttagaccaattgaaacttgtccactgagaaggttattactaacaaaagggatctctgttgtacttagataaattaaaaaaaaaaaatgtttgggtggttttatttttataacaaaatgcagttcccttgtgatttgggaagttgtgcctccaaatctgactactttagcaataacctatactgctactggcatttaatgttatgtactacgatttactaatctatgttattgcaaacttaccataatgctttcataagataagacagataactcaatgtaacattcttgtaacctctttttttttttttttggtttccttgcagctgttttggtttttgattgtttgaatcaccaggga

SEQ ID NO: 22717 - DNA, 478 bp, Glycine max
  Intron number 2 from transcript Glyma06g15080.1 (locus Gly ma06g15080) derived from phytozome v7.0 (chr-ID Gm06; pos 11870865 to 11871342)
tctcccagtcatctttcggtaattttcttccctatttctaaagcaaacttgaataataatatttgataccattgtatcagtcatttgtatatttcgtaagacaactcattgagttactatttgctataattgtgatgaagcgcatgtttggattgccgttactggaatgccaatctacatttccagaaggaagcatgaccttcgatgcttcagcgttgaagtggctctgtgcttcgtgctgccctaagtccaccgcaaaatcaaacatgcgctaaggctttaaaaaacagtcagcagccctgattttggccacaacgtcaaggtttttggggtctattgctgccacaatttaaaaccttgattgtgatgcttagaaaagttacgaaatttaatcaattactgataccatatgcatgctgatcatttgacttgatttatgtttgagccttgaccattccactctttgccttccttgcag

SEQ ID NO: 22718 - DNA, 771 bp, Glycine max
  Intron number 1 from transcript Glyma06g16560.1 (locus Gly ma06g16560) derived from phytozome v7.0 (chr-ID Gm06; pos 12956949 to 12957719 reverse strand)
atcaggtaccgcctttttagttgcatacacaatgagggatgcacataatttagatatttagataactatcatcaaacctaataaataactagattgaaagtgaatattataattataactataactattttttaaaatatgagtattatttaatataactagttattgtttttaaaatatgagtatataactaggtatgaataaactagttatataaccaattatataacaagttatgtctaaaatcaattatataactagttatggatgaccaaaaataagttatttgaaacatctataactataaaattggttatagttttatacctacttttataaaattagttatagttacagttataggtattttctttaaaactagtttttttcagcatccctatgcataatacattgttaacttctgttttgattgctatcttgttttagttatatttgcttccatttctactagtctgttcctacttgcttcctagtgagaaaaggcttatgttgttgttgtactagtctattgcttgagatgatatgaagtttcttggcaggcagaagacagtacttattatttggtctgcagattttacatgaatataagtttctaaagcttgtagaccattgattgtgtccttctttttgtttaagatctctgattgttcaaattattgtaaattgggaggaatttgatgaatgctcttttttttttttttatcatgatttaaaggtatatcccacccaaactacgccgcctccagaagg

SEQ ID NO: 22719 - DNA, 301 bp, Glycine max
  Intron number 2 from transcript Glyma06g40830.1 (locus Gly ma06g40830) derived from phytozome v7.0 (chr-ID Gm06; pos 44016272 to 44016572)
gcgttctgaaatgtgcaagtgctcgtgcttgtttattggcttcaaaattcatggaaagcgaatataaaagaagaaaacaaatatcaataaataactaatgcaccatgtatcaaaaaaacaaatcttaatacgaaacattttctttttgaaaagaaacagtcattagcatatatgcaaacacaaaaaaacagaactcacactactaaaaaaattggtttctacgacacactaaccacatcagtcctcctaaaccgatgtggtataataagtggtggcaatttcataattataaagttagaaa

SEQ ID NO: 22720 - DNA, 524 bp, Glycine max
  Intron number 3 from transcript Glyma07g10130.1 (locus Gly ma07g10130) derived from phytozome v7.0 (chr-ID Gm07; pos 8490259 to 8490782 reverse strand)
tcaggacagcttgaaatccagaccaacagagtcttcagatcatagattggtgatgatgctaggttgttttttagtctttgctaagtctttttttttcagttactatctgttataacttcccctcccgctcctcctaatgagcaaggcaaccatcaattatgaaacagattcacaatcatttatttgcaagactgtagattattgttgattgttgatatttataatatgcttttttattgctctaaatgatagtgtgtgcttgttttacttgaatctcacttttcaatgcacattcaactgaactctacactcaaggaggattgatgctcaacttaacatgatgacaattcaaacatgcctataatgatagtattgcctttattgttgttgattatttccttggttatgcattaaattttggttgtaatctacgcctaattagggtagaacatcttgttgattttgtaattttctttccctaatcatgagattctgtttgtaccatatttcaatataactggtag

SEQ ID NO: 22721 - DNA, 762 bp, Glycine max
  Intron number 1 from transcript Glyma07g23770.1 (locus Gly ma07g23770) derived from phytozome v7.0 (chr-ID Gm07; pos 25841975 to 25842736)
cccgtgacggcgccgtcgacgccacctctcccctggtacgttacagttacaaacgctgtttatctttacgtcccttttcgttacttttatctttaaaaaaattaattttgttatataaccgtttttgtggtgtttattgggaagtttgattgttttctaacgtatgctattgctatggttggttactatttgaaattgttttaggttgtaaacgaatcaataggtttaggatggaagaagctctcattcttctttatagtgtgtttgggaatcttttttgagaaaggaggaagaattaggtttaaaatggttattaatccttgtaaatatgtctaattttggttttagtccttcaacttttttgttggtttggtcttataaattttgaaagttttgaaaatggtttggtctaataaaactttttttctgatggaataaacactaaaatgtgccgtattcgtatggactaaacatatctaaaccaaaaaaaaaatatttcttaaaaaaaaagagatttcagaacatgcacatattttcaaattatagcttagtttgatagttctggatatttgataagtggatatttgtctgagatgttatgctttgtgtgtgtgaccatacagcgggacccagaatttagacagccacagtgataggttttctgataacctatttaggccttggctgtgtgtatgtgtttgaattagacagcaactcatttaaagtgacgttgaatggttgaattttgctttcagggcattg

SEQ ID NO: 22722 - DNA, 517 bp, Glycine max
  Intron number 3 from transcript Glyma06g14460.1 (locus Gly ma06g14460) derived from phytozome v7.0 (chr-ID Gm06; pos 11362638 to 11363154)
caaaggtgaaaatccgctccagtagttaactgtttttcctctgagcctacttgttttatgtagttatacaccattatagaaccggttgaatccttgcatttgtaccaggtttgttttgatatgtgcaaaaaatgtttgtagatccagtcattcatgagtggttaaagaaatatcaatatcatatttttttctcaatacttcgtgatggaagtatacataatacaaaaaatgaatttagcaacaaaaaaggtgattagttttctttgcattttgccttattgcaatatttgcaattttattggggttgtcttgggatttcagttactaacatgataattcaaagtaatgtatattttgacgtgctttgtttcttcttcctaatgatcaatttttattgtggcgcaaatggaatttttaggaatgtgttgatataagttgttgtggcaaagaatatagatgcaaacttaaattctagtttcagttcttcttttaataatttactattttggcctcaggc

SEQ ID NO: 22723 - DNA, 427 bp, Glycine max
  Intron number 1 from transcript Glyma08g14380.1 (locus Gly ma08g14380) derived from phytozome v7.0 (chr-ID Gm08; pos 10458254 to 10458680 reverse strand)
gtttcaaggtcttcacattcattcttttgcttacttttcacactcaagtcaataagattcgtgattcaatgattgtcaataaacttagctatgcgctctcattgtaaaatttacattgtcaaataatcaaaaatcattattggtgtgacttatcaagtagttattataaaaattttaataaacttactatacatgaaatttgtgattgtgattcgacaacagtatactagacttttacattacattgtcagtttatgtaatatttatttttcttttatttagtttatctatggatctatgcttgtttttttgttttgaagcttttttaacaaatttagaaggagcatgtggtataaatttgtcatgtggctttattctgtttggtgtatcaggacttttgttgcgcctctagagagacttaagctgg

SEQ ID NO: 22724 - DNA, 580 bp, Glycine max
  Intron number 1 from transcript Glyma06g46920.1 (locus Gly ma06g46920) derived from phytozome v7.0 (chr-ID Gm06; pos 49451105 to 49451684)
ttattgacaccccaggtaaagcaacataacttattattcattacatgattttgtatttgatttgagttaaaaaggattgtgattgcttaactattgttgtctacgcttcttggaaattttatcatgtataaatataagctttaagtccctataaattaaataaataatttatgtatgtacaatttagttccgatataactcttcattttaattagtatttaatcctataacctttgtaatttgatcaccttgaacctactactagcaaaaacgtacaagttttagatccctacaaatataatttacttgcaaaatatggcaatacaaatatatttgttctttgtttttaggccatccaattgtccttgtaagatgataatttttctttgcattacgaggtccaaaacaagtgacgatgatgagcattacttttatatatatatatatatatatatatagggaatacaagtaaaagttatatttgcatgaacataaaacatatttaattctaaatctaaaaccaaataaattttgcaggactatttgatggaactcattctgcaggaaaggaaatagtcaa

SEQ ID NO: 22725 - DNA, 574 bp, Glycine max
  Intron number 1 from transcript Glyma06g43570.1 (locus Gly ma06g43570) derived from phytozome v7.0 (chr-ID Gm06; pos 46585621 to 46586194)
gttctcaagcttggtgctagaagggctttgataaggttcatcatcattcattcctcactatcctaattcaacttctaattttctataactgcttaatggtaacttttgcttgtaatgtaatccctccgctcttaagagaaaaaaaaaaacacactcttttcttggtctcaaatgtaaatattttttaactggttttactttatttaatattggtatctctaaatatccttcgcttagttgaggtgttagtttcaataactcttctttattcctaataccaacttggataagttgagaaaaaatttactttttaattaaaactagtgcaattaaacgtggttatgtaacttttttaatcggtgtgaattagtatttacgatcatgagaaattttatattcatttgtacgcatttaataactttttacgacaaagtaaacttcattaatcaaactattagatcagtgtgttgatgaaatgaaattgtgccaagcatgtctttattggaaagtgaatgtggtttttcgatgtgaatgcacagtacagctgagaagaacaacataccttggaggcaaa

SEQ ID NO: 22726 - DNA, 947 bp, Glycine max
  Intron number 1 from transcript Glyma07g01100.1 (locus Gly ma07g01100) derived from phytozome v7.0 (chr-ID Gm07; pos 653906 to 654852)
gatcatcatcgtcttcttcctaggacctgtttcaggtgcaaaaaccctcttccttttttcaactgcttattgatttctcttttcatttttgtttttaattgacaatctgttggggtatgcctttgtgtgatatcttcaaccatcgtatggtaatttttttattttttttattgttactgatcacttgaatttaattgtttggggaattttacttatggggtttttgggtactttgatttgggagccaagattcaaactttagtgtgtttggggattgaatttgaggagaagattgtaaaacaagaaattctggtgtaggggaattgtgatagtgtattttgatgggcatggaaagttattttcactgtcatgttttaattattgtcagaggttgtgttttaattatggggtttttgggtactttgatttgggagccaagattcaaactttagtgtgtttggggattgaatttgaggagaagattgtaaaacgagaaattttggtgtaggggaattgtgatagtgtattttgatgggcatgggaagttatttttactgtcatgttttaattattgtcagaggttgtgttttaattatggggtttttgggtactttgatttgggagccaagttcaaactttagtgtgtttggggattgaatttgaggagaagattgtaaaacgagaaattttggtgtaggggaattgtgatagtgtattttgatgggcatggaaagttatttttactgtcatgttttaattattgtcagaggttgtgttaaaaagattaacacaatttgtcttgattgtatttctaagatttttttttttttggtatttctaagatgtgtggataacttctcttatctgaacagactgatttctttttctcattatttttgttgtttttatcagattcttcgtagaggagtactagggctgatcactgg

SEQ ID NO: 22727 - DNA, 628 bp, Glycine max
  Intron number 1 from transcript Glyma06g48340.1 (locus Gly ma06g48340) derived from phytozome v7.0 (chr-ID Gm06; pos 50609252 to 50609879)
ccatttcctcccaacctctgtttctcctgtcttctgtacgttctttctttcttccctttacctttttgttattactttccgtatgtaactgatagatatccttccccaacccaagccaggaaaatgaaataaagagtctatattcttaatagattcttagaaatccaacatcaacagtctgaagtgaaccatgaaactgtttcaatgtttgttctcttacagtgcctttggttgtaaaatcatgtcatcctcatgcctataaattaaaaatttgttgggtgattctctcactcaacccaattcagaaatttctctttatctctagtttcacacatttgttgacattgttttcattgctttgctaaatgacataatattataacgttacttgtctgcttggattaatctattagacactgaactgctttttttattttattttttctcttcaagcttgcagtgagtggttggatcctacattggaccccaaatcctgccattaagatcaaattgagttggttcttgagtttccttctttttttattagttactcaaaattcctgaattacatcacatacttaatagcctcttctctacatatttatcttgttgaatgcaattcttcagc

SEQ ID NO: 22728 - DNA, 806 bp, Glycine max
  Intron number 3 from transcript Glyma08g41060.1 (locus Gly ma08g41060) derived from phytozome v7.0 (chr-ID Gm08; pos 41095536 to 41096341 reverse strand)
atctttgagctcacattcgccaaagttcttgaactgtaagctttctttgctaatgaccatgtgtgaatctataatttcattatgctatcatgttatgcaccatgcagtataatttataaatgattcaacattgaatgtgctctctactttatatatagctgcttcacaatttaactacccctttgtgttgtgttttttggagtatttcaaaaggttgatctaacattgcttggttttgtttaccttcaagtgttttatatatcaatatgattcgagggcttttgaataagcgagcaataaatctgcatttgcatgctagaaatcgggccaattgaacctcttttttattttttgatccacaaatgttagttgtcttgctagtttcgttactggagggattcaaatccacgacctctcctcagtccttttttccttcaccgtaagtttgccttatataacttctgggcctaatgaacctaatacagtgcaaattgtttgttctggcccctgtgcgaccaagaatgggccacatgaattttttgtcatattcataggatgtagaggttgctgataaaaattgaagcagttgtgtcaaacttaaaatgccttgacttttgttttgttttgtgcttttgattatttaaggaaagatggtgagtgaggatgcatggttgtctttgcaatgttttctctttttgttttcaacttttcattgctttaactgtggtttcagtgtttctccaatagtaataattatgctgctaatttcaggcttcccatttggccttttgccaagttgatattca

SEQ ID NO: 22729 - DNA, 896 bp, Glycine max
  Intron number 1 from transcript Glyma08g40420.1 (locus Gly ma08g40420) derived from phytozome v7.0 (chr-ID Gm08; pos 40163984 to 40164879 reverse strand)
tattttagccttaaatttaaaatgttttattttttatctttcattttaatctaataacttattgaagattcttatatttatataaaatgattataattattctcatataatatgaaaaagacatatcatatgaaataaaagatcaaaattaaaatatttcaaatttaaattaaattttatttaatcataaattttttaaaagatttatctaataaaatatctttaagatattaataaaaaatctttaagatatttaattttctatttgataaatcctttagattaaattttttataattaaataaaatttgaatttaaatttaacatatttcaattttaacttttgtattatcaacttattaatatgtgtgtgtgacactgagaacgccatagatcctacgcatctttaaaagtgaaaactctttcccaggcaaacccaaacactcggcgtcatctcctcacggcttacggctcacggctcacggctcacggcttcattcaacagccacagcttctgtccacttggtatgtttcgtttcgtttcttttctttctttttctggcacttgttttgcttataaaataggtaaattaaaactcattggattaacacagtgaggtaaggttgcactgtgttctcatgtaatagattaacgacagtgggagaattcaaatttccttcaacaatcacggaccaccgacggaattaatctctcacctaatggatttagacggattaacattttgaaattgactgtgttcaattcaaagtttcaaaccatttttcatctgtatgataatagtttatgataaatttcttcaatgatatatatacattttatgaaattttttgtatgaacagttgccaacctttagtgaacggaagaggtgctaaga

SEQ ID NO: 22730 - DNA, 1009 bp, Glycine max
  Intron number 2 from transcript Glyma08g35480.1 (locus Gly ma08g35480) derived from phytozome v7.0 (chr-ID Gm08; pos 32697218 to 32698226 reverse strand)
ggaaatctcgtcgaacccagagtctggtggaggaggtatgatatatattgtttgaattgtatttatgcttcacattttctttatgcttttgggtttgtatgtatagcatcatttgcaaatacctagtgtagaataaatggagaactactacattataaacatgtgttttgatgattaaattggggttgatggtgtttgtggcttctgagtatactaaaagggttctggttttcacattggtgcctaaatgatgaagatatttttcttgactgatgcatttcataactttagaatattattttatacacctaaatatatttttagtccctcaaatttaaggatttgtcttttttagtcctctaaattaaaatttgcatttgttagtttctcaaattcgtgaaatagtttttagtcttttttgtggttaaaaattatcacaaattatgcatcaaaatggccaaaatcattcaagaaggattaaaaaaacacttcatgaatttaagggaccaaaactataaatttttatttaggagactaaaaaagacacccaattttaagggagtaaaaacgtcactaagccacttttataattcatcataaataatactaaaaggatatttctccattgacccaagtcagaactttagaagaattctagtaatggatcaaaaagtaaaggtgtggtaatctcattataaggtttgaaacataatggtgcaaatagttaaaccttatagataaaacatgcatttttttgttatccatagaaattaaatacggtttcagggtttacaacaatcagacactttgttcaaccaattgaactaccccctttgtagataaaccatgcatttacaattgaatgagtgtacttgcagtggattaataacttattctctaaatacttgtttcccattgctttggggcattcataaccactagttttacttattttaatttttctggttgaatagagaaacaagcttgcagaagactttagaaaggaaga

SEQ ID NO: 22731 - DNA, 725 bp, Glycine max
  Intron number 5 from transcript Glyma06g09490.1 (locus Gly ma06g09490) derived from phytozome v7.0 (chr-ID Gm06; pos 7017609 to 7018333)
gtagctggaaatattgctccatattttgtagagaggtttgttggacatttttttccactaagttttcttttggaatatgagaaaaattaagacaggttgttatatgcttagaagctaatgtactatcaatttccaatgaattttatagtacaccaattcgcaacaaatcaagtcaacacttgggtaacatactaacttagaacctagagagctaaataatatatgctggagttgatgtttatttgtacaatgagaattttcctattctgaaatttgaatatttttcaatttgatattcaccacttgcataattgccagccaaattactctaattatctcccacatgtcatggtcatggcttagatatgatttcttacaaaatataattctgtataatctgcattttctgtttcatttttttttcagacctccgaagccatttgtatgctatctatatgcaataagtatcaacaattgttgcgttataaggatataaaatttctccacaaccctttgctggccaaaatggtctatgttgttttgtgagttatgacatattgaatgtgcagtgaaatctttgtttaaattacaatataaaactgttatggttcttctttatctacttatttgttgcatgagttgtgtaaaaaaatacttagattgatgagtgatgtttatttattttgttaggtatcactttaacaaggattgcttagttgttcaat

SEQ ID NO: 22732 - DNA, 1007 bp, Glycine max
  Intron number 2 from transcript Glyma07g35030.1 (locus Gly ma07g35030) derived from phytozome v7.0 (chr-ID Gm07; pos 40166815 to 40167821 reverse strand)
acgcggaccaagccgaagctcaaatcctcagccaggtctggaatggaattcgacattcacttaaccacatcacaacacaaattgatccaaactatacttagggtctgtttggataaactgatccgtacacactgataggagaagaaaaaatgaaatatttgtgcaagttaaaatcatcttttagataaactaatatgagaaagcttttacaaattagcttatgaaaaagttcatttcattttcatttcctgtaagtgcttatagaatccatataggcccttaaagtagacatttaaattcagtgctatgtgccgtgcaaaaaaaaaataaaattcagtgctatgtactttgttagaagactgattagggattggaatgtgtctattgagaattttattttgtgtgtcttctttgtaatagtcatgccatgcggttgatgtttttctctttgggagtgccttgccgcaccttcgtgcccattgcaactcctatttaattaaattttgtgtgatttatcttagctattagtttgattaaaaaagaagatattttacataaaaataatataaataggagtgacagtagacacacgggagtggcaatagacactccctttcttctttggaagaagattggtggagaccaaatgctttttaacacctagagagggagagaaagagaaatgtaggtatgatagataatataatgtgatagaaagagagatagagagaaataataaccgtggatgaagtgtttgatatatagaggagtgtctatttatatcatcactctttattctctttcatagatttttttttgtctaatcctttgtctatgatctaataattatagttttctattatttgaacaactttactctttcaccttcccttttctactggctatctgaaaggcaatcagtcagtttgataagaaattaatctatttgatctgtgtattgcattcatataatgctgtgagtggcttaatgcaggtcaggattgtcc

SEQ ID NO: 22733 - DNA, 550 bp, Glycine max
  Intron number 1 from transcript Glyma08g08740.1 (locus Gly ma08g08740) derived from phytozome v7.0 (chr-ID Gm08; pos 6249542 to 6250091)
acgcaaccgcgcctttggtatcttctcctttctatgcatgatttttctaaagaaaaagaaaatacattaggaaggagaatcagagatgtgttaatcgatgatatgatagaatttctctctaatcaaatgttctgaagttattaacagtggtacagaaatttagcctccttgaatgttttctttgaacttcttcaactagattgttccactttctaaaggaaaggttagtatctgaatttttacaatgcatgcatagaaaataaatatcagggaagagagcagagtgatatacctaagaaacagcgatgataaattaacaaaatggaagactagatgtttggttggaggaagttttagtccatataggtttctcaagaagggaacattgatgattgagggatgacatttgaaactgaaaaaaaggacttacaagaaagcttgcctgaagaatccaaactccaaattttgctacttgaatgattaggaaaaagaataaagaattgataaatgtagtcttgtacacaaatcatcactatagggtacccatatc

SEQ ID NO: 22734 - DNA, 800 bp, Glycine max
  Intron number 1 from transcript Glyma08g20640.1 (locus Gly ma08g20640) derived from phytozome v7.0 (chr-ID Gm08; pos 15657075 to 15657874)
acctccctggtgtcgctcctcgcgatttccaaattgtacgttttccatttcatttcttctctctttcgattccttcgttacttttcctatattctttgaatttccacgttatatgcttcgtttgtttctcgatcacctttaatccgtcgcaagactgctcggatctagggttttagctccgatctgcgtcgaatcggtcttaaattccccttgcactgtgtttgtttttatataaccgattctgtgttcctgaaaggtctaagttatcgttggatgattccttggttctgatgttgtttgattgacttttagtttagaatgttatgtgatggaatcgttagttctgtggaatgataatctcataatcgttttgccagttgagaagacggaatctaaggacatctttgtgtttagttttttagtctcactctacactgttttcaaggcgcttcatcacttgtgatgagtgatgagactttggttatattttgatatgtgcacgtgaaaactgtatgtgtaatgcggctttatatatatatatatatatatatatatatatatatatatatatatatatatatattgtcttatgaattgaaaaatgtagtgcgtcatttgcgaattgttagctattgatttgagaaacttggtttgagattgggaaaattttattatttaattttttttcgctgttgttttttgctttctaattttgtgtgtttgaagattgaagatattgagttattgtttcatgtgtggcaccagggtgaccccctctttgtcaaagtgaacaagttatc

SEQ ID NO: 22735 - DNA, 713 bp, Glycine max
  Intron number 1 from transcript Glyma08g15120.1 (locus Gly ma08g15120) derived from phytozome v7.0 (chr-ID Gm08; pos 10959605 to 10960317)
caaagaattccgtgaagaaagatcaactaaacaatgtaagtacaggtgaggaactgattcatgcttgcaccacacatgtcaaggaaacaacctttgatggccttcgaattaaacctgtaatatgtcattggttttaattttattaagcactgcaattcaattgaaaagacttgaccttagaggtttatcataactgaaaatatctctttccaaataacaagttaagaattgaaaaagagatttgcacataaataaccaagacagataaagagatcagatctatttacttggactacagtacaataggtacaatctccctctctctctctctctctctgtgtgtttgtgtgtgtgtatatatatatatatatatatatatatatatatatatatatttatttatttatttatttatttatatatataattgggattttgtgcttgtgatatcattattacagcatattgctttcaaatttggctggataacatgcagcttttgcctttatttagaatatcttcagatctgtgacagaaatcttctatatcttcttgtgacgtgtcttgctacacctgtacttcgtttgtcattatatttcttataagaatagtatgcttaatcttttgattgggtccagtgtcattaataattccttttaccaggcagagattgaaatgggttgatgaagggtatgaacttcttgtatttacag

SEQ ID NO: 22736 - DNA, 778 bp, Glycine max
  Intron number 2 from transcript Glyma06g14260.1 (locus Gly ma06g14260) derived from phytozome v7.0 (chr-ID Gm06; pos 11230250 to 11231027)
acgcccaaggtcctcccatgttcctttttgtaccgttattgatttcataatcacaatgttttctgtttggtatgccttttgttatgttaatgtttatattgattaatggatttgcatatatagatttacatctcagaaatgcaatctatttagccttgttgtagaaaatgaacttgatatgtttactctatttggctaagatttatgtgcttatggttcttgtataatttttatatttctctttcaatgagaaaaacaatgagtgtacatgtcctaacagtgtataaaataaccaataagaaatcattgttaactaataataatttttaaggtaattcttataaaattttactaacttatcatatatgatagtgggtaagtttgtttaaacttatttcttgaaaccaaaatttattttgataaaataaacatctttctgttttcttagtgtgttttgtcaatacgtttattttaaaaaatggttattttaaaattgtcttttttatgttttagttaatttctagtttgtttagtgtgcaaaaaaattttacattgtcaatacatatattatttattcaaaaaggatttgtgctatgccgttgtctattgatttgcagtgtttctgatcttaaggctttacctgaagaaaaatgcaatgtacatctttttattgtgtgcgtcttctattgcaaaaccatatctgttgatttgttttcttggactaaatggactttaagatgcaggtggtgctgagggtgggaagcagagcagaagtgag

SEQ ID NO: 22737 - DNA, 505 bp, Glycine max
  Intron number 1 from transcript Glyma08g08180.1 (locus Gly ma08g08180) derived from phytozome v7.0 (chr-ID Gm08; pos 5841058 to 5841562)
ttcttctctcggttctacacttctcaacttcagaggtacttcctttattctctatatttctttaagctttcttacaagatgttcctgcaccttttgttttaattgttttattcaagtggtgatgaagttctaagaaacccgacaagtttttaaggttgtttgagcatatgggtatctatgttagagatcaaggtttaaattttatttgagttttgctagtttttgaatttgaaggtgatgagggtcatgttattgaaagttgggatcttttgtgatttgggtttcttcgatttcagtattgggatttggttgatctgtttactcagattgatgttttgatagtcgtaaggttttcaattgggtgggtatggggtgttaattaatttatgttggactgttgagggtgttttaaattccttggattcagttacttaaaggaagcaaaactgaaacagggaaattcaatgcagctgtttctgaggagtttcaagtgatttctgtggtt

SEQ ID NO: 22738 - DNA, 736 bp, Glycine max
  Intron number 2 from transcript Glyma08g09460.1 (locus Gly ma08g09460) derived from phytozome v7.0 (chr-ID Gm08; pos 6760892 to 6761627 reverse strand)
actatactgatcagatcatcaaaggccttgctttggtatatatttttagtttataactgtttcctaccaaccttttcttttgtttcatatcatatatgattttaagttatattatacctataactattttatttagtttttcttaccacaattatattatttacttatgaataatatatatatatatatatatatatatatatatatatatatatatatatataatatcatttaaaatcattataaataataaatttattgatttttataataagagaaatattaaccacacatctttctgatgtacccttgattaaattggttgagagttataaaataatataggctagcttttgatctaataaatttgttatgtgtcattattacttctctctttaaaataattagctaaagccacattaataatgatttctaattagtcagtacttagaaaatgtttatatatttctctataaacatttataagacaataaaaaaataattaagattcttcttcaagctaaaattaatttataaaaattctataattttagcttatttaattaaaaactgattttaatttatgcttaaagttaatttttgtattttattctaattttcttctagaaatgcttataaaaaaatttatttaaatgtgtaaaatcttttacactctctcttaacttatataaattttacttaattaatttgatggagttgagttttactctagggt

SEQ ID NO: 22739 - DNA, 744 bp, Glycine max
  Intron number 2 from transcript Glyma08g05590.1 (locus Gly ma08g05590) derived from phytozome v7.0 (chr-ID Gm08; pos 3997997 to 3998740 reverse strand)
cagcacaaccagagattggaagtatacttgtcaaggtttcttcattcaattaatttagattttgttttccccctaagttcctttaggcaattaatttatgctttcatcatctttgttcaacttgatctgcaagagtcatcatcatcatcatctttgttcattaactttaatttggaccggtgagttctttagattgttatgtgtcaatttatacgctgacacgggcacacatatggggatgcaagcgagggttggggagttaatcttgactaatcaatatttaatacatgattaagcaaaaaaatctatcttaatctttcttgtaaaatttaggttaaattagttttttactcttttaatttattatttatgttcaattggtctctaatttttaagaccgattcaatttggtcctctagttttttaaaatgcttagtgatggttttgaaccgtcacaaagtttgattcttaccatttgaactgaatgattaaattgaatcaatttaaaaaattttacgatcaaattgaattttaaaaataaattagagggctaatttgatctaaaatttagtagtctgactctacagttgtccctaaacacacacaattcacattaattttaccattgtaaataataaatcaaaaagatgtgcctgagcagctgagcttaataacacatgttgtttgcctgcataattcatgttctatatggcatttgttataattgtgttatctatttttaga

SEQ ID NO: 22740 - DNA, 824 bp, Glycine max
  Intron number 1 from transcript Glyma06g01920.1 (locus Gly ma06g01920) derived from phytozome v7.0 (chr-ID Gm06; pos 1208776 to 1209599 reverse strand)
ggtccctctcgctgcttctttgaattccgacacaggtacgcttcttgttgattacgttactgtcgtttgccatttttcgatgcgttttagaattatgactatctgttcgttttgtttgtgtatggtcgtttcgtttatcatcgccgcaccgcacttactatttgctctgaaaagagtttctatttttgaattgattgagtgtgaattcttgaaacgccatcggtctctgtttaaatgaaggttgagctgaactaatttgcatcaccctgtttctaaattgagggaatatgcaattctgggagatctgtgtgttacgtttcttagttattgatattgggtctttgcaactgtctaatttttgttaataattatcttgcctgtcattgcattggataaattattaatcgagcagtgatgatcagaggggttttgacttcatttgattcacaattgattcagttctggcagtttcattattgtaattaacttctgacacgattggtttttgtttctattcgagttgctgatgcttttctggcgttggttgaagataatataatagtataaaaagaatttaattttcatgcactgtcagatgtcaaccaattagaaatcattataagtataacttttaaagtagttcttataaaaatcaacaaagtaccatatgatcaggcaatgtaaaagacctttatactatcagtgcattttaatttaattcaataccgcacatttatgttgaaattattcaatcttgcaattattgtaagtttctcagcgctaccttaaccttgtgttctttgtgacaacagattagtgggtat

SEQ ID NO: 22741 - DNA, 698 bp, Glycine max
  Intron number 1 from transcript Glyma08g08220.1 (locus Gly ma08g08220) derived from phytozome v7.0 (chr-ID Gm08; pos 5873993 to 5874690 reverse strand)
gagagtctgctgctaggtccagggaacgcaagcaggtgcctagtgcctactctcctcactttcaattcaatttggtttttctcaatgtgggtttctaattaaagggttggatttttctcagtttttagttgctggggggaaccaactggattaaagttagcatttttaatcttccggggtgtggttaaattcagtttggtttttctcaatgtgggtttctagttaaaggtttggatcctgagtttttagttgccggggggaaccagcggggttaaagttcggatttttagttttctggggtgtagtttctattcagtttggtttttctcaatgtgggtttctagttaaagggttggattctcagtttttagttgctggggggaaccagctgggttaaagttagcatttttaattttctggggtgtggtttctaggtgcacttggtgttgttctaaaatcaaaattagacttttacctcggtaattcgtattttattaaagttaacttagattattgaggtgaaacttcaattctgattcgagaagaatgctgaaagcatttacagaattgtatctaagctttattgttcatttagtgtttttaatttttgttttattggattttcttctggagcttattggtggggtgttgtttgctttacaggcttacacatctgagcttgagtatctggttcacca

SEQ ID NO: 22742 - DNA, 703 bp, Glycine max
  Intron number 2 from transcript Glyma07g05350.1 (locus Gly ma07g05350) derived from phytozome v7.0 (chr-ID Gm07; pos 3989260 to 3989962)
aaagccaggttttttttttctttttcaagaaattttaacactgttttgaaattatgtttatgaaactttgtacctgaataacgttgtgattttttcatgtagcggacctcatctggtaggataagaatttgttgctgttgttggaaattgtctttctaatagattttgtcactatagtatggactttttaggctttgatattatttcctatcctattggttgttctgacattagaaggttattggatcctttgttgtaatttgaatcccatgttttttattttgtcaatctctattcatgatccaaatttgtcaatttggctttggttgatgatgacaatgggggcattgaggagagtttatttcaataagcttcatgtggaagcttatcaaaatatgatctttttatttcattctaatgagctcctagataatgcttatgggtgagctctcacatgacttattggatgactgtttaattgaatcttttaaataaatgtggtcaaaattcatcatcagttttcatcaaagactgccaattaatttctgctgtataactcttttgaagaaaattaaggctgttttgctgcatgccctaccaagtcgttcatttttagtttttgccgtgaatagaacttttcaggaaataaatttctgattttaaatgctgattatctccaagttttgcagagggcttttgtttt

SEQ ID NO: 22743 - DNA, 1014 bp, Glycine max
  Intron number 2 from transcript Glyma08g20060.1 (locus Gly ma08g20060) derived from phytozome v7.0 (chr-ID Gm08; pos 15146197 to 15147210 reverse strand)
ctggaagcaaaactgcaggctgctgaacagaagaggtgggttttcccaaggctttcttgtaatcatgtattttttatatgctcatgtacaattagtgttgttgttgttgccaacggccagtgtgtttttattgtttcattcagtaaaaccacttggcttaaaaatttaactttctcgatcattcatgagtgagctattaaaagcaacatttggagtaatttactcttgtgatttttaagtttaaattgtgagaggtagcatttatctgtatttctttttataaaaaattcaggatcttctctccctagtctctagaaaaagtactttaactgatttttttttttggcttttcttttctaaaaaaaaataactcatccaaatatcttctttggatatatattttaataagaggacttgtttctaagaaaaaaaaacttatacaaatgggcccaatttcaatcataaaatggttattttggtgtccttgttggaattggattgccagtcctagtttctttgttgtttttatgaattacgtttattggaaaatattaagtacttcatttatttatcaagcctgtattatttgtattgcatccttctattggagaacttagtataacttataaatttgattatcatatagttaaacatcttgatacttctttctgatattttgacggtttcatctgtcccatctccttctctgcatatttcttgaatttaatggtcatcttgattgataaagaagaatctatttaaaaaataattatcttatgttcagaaaaagttaaatatttaacattatctcatctaacacctaaaattcttatgctttagttgttccattgataattgaaagtttatttcttaatctgaaagattgcttccacccttaacttgattttagcaactggcccctaatgatttcttttcaaattatttgacatgctttattaattgtacataatttactgccttcctgacaggttgagcatcttgactaaggcccaa

SEQ ID NO: 22744 - DNA, 572 bp, Glycine max
  Intron number 1 from transcript Glyma08g20060.1 (locus Gly ma08g20060) derived from phytozome v7.0 (chr-ID Gm08; pos 15147294 to 15147865 reverse strand)
aagcgaagcttcacgacgctgatcttcgcagacaggtgtccttacgatttttttccgctctctaaaacagtgtttgtgtttgtttggttggtgagaaagtttagggtcttcaaattgattttagaaacgcttttcactttttcgtttggtggtttgtttatttttttgccccttgcttattgttaaccacgtgtaattagttattattaattaattaaataatttgtattaaacctgatgttctggaagaaaaacgagtgcttagagattaatctcatttgaaagttttttttttggggtatttaaaaaaaatatttattttacccgattcatcggtttgtggaaagagtttatgtggttcgtttgctggtagattattgtcgtgaatttatttcttcgttttcatgcttgctttatcttcaagattgtttcttttctatgttaggtgggatagtagaggctttctcttttctattcgaattttgattcgcactcttcaagattgtaagatcctttgtgttgggttgatggtgctgtctatttatcgaacttctcttacatgcagaaatact

SEQ ID NO: 22745 - DNA, 534 bp, Glycine max
  Intron number 1 from transcript Glyma07g07980.1 (locus Gly ma07g07980) derived from phytozome v7.0 (chr-ID Gm07; pos 6629222 to 6629755)
tactgttcaaattcaaaccaaagccattaaaaaaggtaacatagaaaagaatgccgagaccgttgctttttcgtttatttttatttcttttttcataaccgtttgtctttggagtttgaaaacttcagttgtttttccccctctggataaagaatgctttgtaagcaaccctcttcagtggattatttcggggtctcaatagcagcaacattctttgaaagattttgcttttttgttaaggcaggacaagaacatccaagttttcagcctttttcttttgatatgtcttttttgtttttctttattttttcccgtttccatagttcaatttcaataaagtaactgttcattttaagctgagtagtggatcctactttgatatcatagtatgtgactatgttcataggtgatcatggagtactagtgtgataactactaagtactattggagtccacaaacccaatttttgtgactcaacttccatgattatacgtgtaggtgttgaggaaatttaacataggtcgttgagttta

SEQ ID NO: 22746 - DNA, 742 bp, Glycine max
  Intron number 1 from transcript Glyma08g42020.1 (locus Gly ma08g42020) derived from phytozome v7.0 (chr-ID Gm08; pos 41903944 to 41904685 reverse strand)
gaaaaaggtcggcaactcctattcttaatattcttattttttgtgcaaaagtccacttatgaattttcaactttcaaatatacattgtgttaaagttaggccattaaaagccggttctgtccggtggcgtagatagtgctgctagtcgtcgctttgtggtaacaagccacagatgagtggcctacccagtcatataagcatttactatgcttgttagtcacccgatgtgcgactcgcagcatatatatcatgctgtagctgtaggactaaatttgcataagacaattcttccatgttccgtgagtgacaatacttcttgcaaagcaatttgattgtttcaaagtttatcatcagcttattcgtggtagctattgaagtcaatcagacaatcctgtgtttgatgggatgttctgctgccaaaagtcttcaacaacatagttgccataaatttcctatagcatactgtttatgacattgctatcctttagcattaaaatgcataataccaagctctataatcattttcatccaatttcttggacaagataatccgcaggcttgaacaaacttaagttgtagcaaagttagccgcttcattgttcagcttcagattcttgtgttgttattttatacaccttcacattgctcttccctggctccgcatcgaatgcaatgtcttcagctatctttcttcctttcatactttcactttcactttcactttcacttctgaatggcttag

SEQ ID NO: 22747 - DNA, 849 bp, Glycine max
  Intron number 1 from transcript Glyma07g32880.1 (locus Gly ma07g32880) derived from phytozome v7.0 (chr-ID Gm07; pos 37772637 to 37773485 reverse strand)
caagatccaaagaacaattcaaacagaaggtatgttatattatgtatgctcactcactttagctcccttcttattttcctataccttttcctctccatcacacttgaacacacacccatgttgagaatttaattatctatgtactttagctttctgtcatcatatacatatatattgcatactatattatatttgcttactaataaatgtttctataaatgtatgatcatctataagcttgaggttatattgttttttgtatttattttttgtttagttagttgtggagaaaaatgaaaatgctcaacattattcctctaaggcctaaaacttaacttaacccttgtcccggattagtcaaaaaaatggggtgcaccggctcatcattttaataatttttttattggttcaaccttgtgtagaccaagtttaacctctgcaaattatagtctttcaaccttaatgttgttatgaatttgaccaaccccaaaggaaaacatcattcatgccaaggtaggaaagtcaaattctctggctgaccggctttttagcttttttcaatagtgagcctaaatttggaaaattcccagttagttagtgggcataggcaaagtttagattaactttcttacaaggccctaaacttgaccctctccccaaattttcttaagattgagaaagagcaaataaattcaatattatgttccacttgcacagttgcttcttctgcatgccattttggaaaaaaataaaaatgtatgtagtgaagggtatgaatcaagcagctgcagctgcaccatctcaggaactcgtgcatgacattcacttcatttcaagttgcaggaagcc

SEQ ID NO: 22748 - DNA, 1001 bp, Glycine max
  Intron number 1 from transcript Glyma05g34270.1 (locus Gly ma05g34270) derived from phytozome v7.0 (chr-ID Gm05; pos 38649497 to 38650497 reverse strand)
tggataagatcactcacagggaggtattgtcatttctgcaatgtttgatctttttcaatgatttggtgcttaaatctgttgaaaagtttagtgcttttttttttcttttctacctcttctttgtattggtcttctatcaagaacaaggtttgctttctatggacaacctgcattaatgaattttccatttttaaccccaccaaatcgatcttttgcaagcattaagaattcctttcttgattggtaattttcttaggttctgtttatcaatcaaattagtagcaagatagaaaaatatcattggattttgcattgatgaacattgaagtgtttttttctttgatttttatcggcactccgaaggcccatgccacttttgttatgtttaaattcccaacaataatatatacacaagacaaagttaaaaaaaaggtagattttatgtatgggcctgaagtctttgatcgctttcatttaaggctgttcttttattttcttttttcaacggcatgtgatctctgatcatcttattcaatatcaaaacaattctttatagtacaaattaagtcattaaaaacttttaattcgaggaaaataggtcgattcaccgtattaatccattaatgcttctttcatttcattatccatgtggaaataacaagagagatgatcgtttttaaaaaaattaatgactcagtattgattttttttaggaataattattttggtcattaatagctagagcctaggggcaccatttcaaaacgcgtgcacccatttttttacctttagttttagatgcaaagaagtgctgttgattattggattgctgtggagccttcctttgaagtgggagacatggatccgttttttatgggtttagatagacacgtgaatgattagttgggattttcgtttgaattctgtatggtcataatttttgtttcacaatgccttgacatgatttccaactaacgaacactattggcagcgatcatcgt

SEQ ID NO: 22749 - DNA, 442 bp, Glycine max
  Intron number 2 from transcript Glyma06g33840.1 (locus Gly ma06g33840) derived from phytozome v7.0 (chr-ID Gm06; pos 34918637 to 34919078)
tcaacaggaaacgcagcgtttgctcagtgagccaggtaactagttattcgaactttgcctttgtttatttatatgaaaaatttgttctcagtttatttcagtgcgttataagcttgctctaagtttaattgattgtatttgtccatttttttaagctttacatagtgtcttggctttgtgttttgttgatatcttttcaaatgatcaaagcgcagggtcgatcatagcatcaaataaaaataaaaatagaatcctagtgtcttctaggatatgttaaatatttttaccttggtgatttaataatccaaataatgatgcaagggttgtgactttttatccttttgattttattctgcttatttcttgattgtttcagtctctgatattatgatgatctgctgatgcagcacctggtattagtgcctccccctctgaagagaat

SEQ ID NO: 22750 - DNA, 434 bp, Glycine max
  Intron number 2 from transcript Glyma08g11140.1 (locus Gly ma08g11140) derived from phytozome v7.0 (chr-ID Gm08; pos 8162616 to 8163049)
tgtctgctgttggaggtacgtattttccttctacttttgtttttcttctggaacaactctataataattattaatgaagtagagataatgcgacatatatagtgcatcagtattgaaagctcttgtgtaagattgtcctcttcctccaatttaatttctttgttcatataaagctgaactctcctgtttttcatttacaagataaccctttttttttaactcacttgaaccacatttttgggagatgacaaattttgatgaaaaatgttggtctaggatgattttaatcttacttcttgttttagcatatttttatcattattaagtttcatttcagctccttattctttttgagtcctgaaaaacctaaaatgcaaaagcccttgtattgtaattcagaaaacaaagagcccgaagtgaagatagtgagcctt

SEQ ID NO: 22751 - DNA, 386 bp, Glycine max
  Intron number 1 from transcript Glyma07g11810.1 (locus Gly ma07g11810) derived from phytozome v7.0 (chr-ID Gm07; pos 10045871 to 10046256 reverse strand)
gaatccacagaaaagatcattgctgagtacatgtgagccctctctcaaagattcaaacaactatcgcataaaccttgtgcagaatacaggggactctgttttgtgttctgtttgtgaaatctttgaccaaatagttattgttccattaatgtaatcaaacccctttatggatatactatgctttctgattcagggtatattttattttgagtgatccttttggaactttgcttcctttgacatgttcttccatcaaacacataataagaaaaagattatatttttaaatggattagtggtgttgggtttgatccagttccggaaaaagcaaagtaaatttttttaatgatttttatgtattgataaacagggttggtggatctggt

SEQ ID NO: 22752 - DNA, 663 bp, Glycine max
  Intron number 1 from transcript Glyma08g22940.1 (locus Gly ma08g22940) derived from phytozome v7.0 (chr-ID Gm08; pos 17459681 to 17460343)
ggatattggtcttcagctgctactgaacaaatcaggtgggataccatgttccaggatctaaagccaaattgatgaaaacttttccttttttttcttttctaatttggaccatttttaggtaggggttaatttctattatcccttgtttttaattacttggtgagagatgggttttttgggttcttccaccatactttttgtttaccttttttttttattagtgtggtgtgggtcacgcggatgggtaactttagcatgcacctgtctgctttagtaatgaggtttgtctactttgctttttttatgttcatgtcattgccctttagcttttttggtaggggaaaatttgcatcaggattagcgtgtttatggggggagaatgatttgaggtagatgttttaacaagttatgttatactttagcaactttgaaaccccaaacagtttggcttgacttgggtttgtgcaatgtaatgtcttgttgttgacaatacacacattaacaaagtatatttaatagttaatataatacttacttgctaccttggcattcttgtctttgaattaattcttgattagttaagcctttttcccaatgagcaattgattattttacttcattctcttctgaacccttcaacatgcagaagaaggggggaaaaag

SEQ ID NO: 22753 - DNA, 953 bp, Glycine max
  Intron number 1 from transcript Glyma06g39810.1 (locus Gly ma06g39810) derived from phytozome v7.0 (chr-ID Gm06; pos 42755480 to 42756432 reverse strand)
tgagaaacaactctttttctgtcgattcttcacatgtaagtttttttttttttttatgttttgatgctcctcttcgatttttacaattttttttaaatattatttatatgggttttcaattaattattataaaagctaataaatttaatgattatttattattgaaaaggtgaaaaaaaaactaattaatatactattttctccttttcaaaatataaacctgtgttgtggaatggggttgcagcaaggttctcaatctgcttcgtgtcttcatcttctttgtttttttgttctttgtctttttgtttagatctcctttagatctgtgtcttctttccacgtactaggtaaggttcgtgatcacttcgccctcgttctgttgtacttgcaataagtgggtgctctgttttaatctgtgtgtctgtgtgtatgtttttctctcagcttgtggtgcaactatgcaaattgtaatttatatttcttgtggcaatgcttgtactaattgttttagaatattagatgagtttattaaaaaaaaactttttgataatatcttgcaattgggaggttgtattttcctgatacggtaaatctgtgatactaacggtgcaattaatggtctattcctttaccttataaatctgtcaaggctttcgtttttgacattgttattgtgttaactttgaatatgcatgtagatattaagctaatattttgtttcaaagaaaaaaaaagttaggtagtttttatattattattcaataaaaaattaatatacacatgataagtttattaatttttataaaattattttaaaaatcataataacaatcttttataatttgcaagtagatgaaaattttataacgtaagtacatcattattaaattttttattagaggatattttcatccttgattaattaatgttttcattttgtttatggttacagg

SEQ ID NO: 22754 - DNA, 644 bp, Glycine max
  Intron number 2 from transcript Glyma05g27980.1 (locus Gly ma05g27980) derived from phytozome v7.0 (chr-ID Gm05; pos 33853307 to 33853950)
tccccaaccacctcctcctttttgccgacaacaaggtttctctctctttctttcatgaaaatctatatttatttgttttgtttgtgtgatttgttgttgttttttttcttcttttgttgtaatacccattcaaccaaatcagttaaagcttgcaatttgtttgttctctgtttctaattattaaggatgaattttctttctgacgatatttgtctttgtattcagatcaagatctatttgtttcgttcccccacatagttgaaatattggtgaaaaccgtggcaaataacaataacagttgaactttgtattctgaggaacttggtatctgtacatgcatccacagttgaatttttttgtttttcattcttaccccagaacttgataccatcatacagtttgattttttttatgtatagttctcacccttaaagtgtcttgtttgattactatcgtcttccgtgtgtacttatagcataaaaaaaataaaaaagaatgtaacatgaattgaatttatgtaaattttgtatgccattgcatcgacatgcctaaaatgaaattccattgttgatgtttgaatgaattgggaaattgctaatatttgccaagcaattaatttttgggtatatgattgtgacaggtgg

SEQ ID NO: 22755 - DNA, 451 bp, Glycine max
  Intron number 1 from transcript Glyma08g13130.1 (locus Gly ma08g13130) derived from phytozome v7.0 (chr-ID Gm08; pos 9581934 to 9582384 reverse strand)
gccactgttgctagtcccgcggatcgtatccttctttgctatgcaaactctctttcctgtttgtcttttcttgatctgttttattgaatcattaattggatccggtggattttcttttctgaaacttgattttcgggttcggagaagggtgatcttttagggtttggtgtgttgcttgctgatttataatgtttgcgtgttggggtttttttgctgttgtgttcttgttaatctgcttgagtttttgatggtgttgattttatggttttgaattgactcgtttgggtttgttgggtgttgttgggggttttcggttttttgattttttatttgtgcttcgggttttaggttttgtggttgttgaaaagttcgattttgcattatgttttcgtgttcctttactcctgtttgcacagaagcaactgatttgctgcagaagctatcgttggaa

SEQ ID NO: 22756 - DNA, 726 bp, Glycine max
  Intron number 1 from transcript Glyma06g14660.1 (locus Gly ma06g14660) derived from phytozome v7.0 (chr-ID Gm06; pos 11503940 to 11504665)
acggtgttggaaatttgatctttgacttgtacatctctgtgaaatttgtggcctagacccaacctttggtctggaattaattacatatttggcgcgcgagatgtctggcgacttggctcccaaacttcgggtagttagatgtcctaaatgccggctgcttcttgaagagcctgcagggtgtgatttgtacaagtgtggtgaatgtggcactactcttcaaggtgaaaattctaatttttttgtataccattgtacttttcaaattttatgctgttgccaaaaacactgcaggtaaaaagaaaaaaataaattgtaaagtttattgttgttgccccttttgattgaactcttacataatgtgctttggttaaccatgacctttgctatcatattgatcaattttgaactctttttcataccaaatgattatttttctgtatggcttgttctccttgattgatataaatgtcttatgtgtgttcagtctatgaatcaaaatactgcagctgtaatttttttggtggctgcaactttaatctgttgacacaccacttgtgtatttaaatttttaccgttaaattaaagttttcaaatggggtgtgaattctattctatacattctacctcttgcagttctgcattacttaaatccttttatttctctcgatgcagctaagaaacgaacaaatgtggctgccaactcaaagtccagtgtacaagcaactg

SEQ ID NO: 22757 - DNA, 648 bp, Glycine max
  Intron number 1 from transcript Glyma07g33480.1 (locus Gly ma07g33480) derived from phytozome v7.0 (chr-ID Gm07; pos 38400070 to 38400717 reverse strand)
cctttggagctgaagatatcattaggtaattgaatgtttcttctttttatttttctttagagtattgcttttaattaattttagagtatggggtaaaataatttaattttgtatatatggggtatagtgaatgtaactcttgttatcataagaaccaataacaataaatataaattattatatgatatttaaccagacaaatttttaaaaaagttgttcataccatcaacgtagtatggggcaagtatgtctccatcgtctagtagtttgaacatctctctctttcaaagaagcaaaacagattcaacttcttctagggagtagggtgcttcgaaaggaagaagttgaccatgaattttcattggcattgagggtaggtgctaaaaaaaagtttatcataaattttcattagcatccagtgttaacacattattgatataacttttaaaataattattataaaaaatataagtttatcatatataataatttataattaaataataatataaaaatattttagagtgccaatttatatttgatttattctcgatatgtgtttacatgaatggtatagaaaatacagaattataggtatgatgagagttctgatcattaaaatgtttatttgtggacctagttttccag

SEQ ID NO: 22758 - DNA, 729 bp, Glycine max
  Intron number 2 from transcript Glyma05g23820.1 (locus Gly ma05g23820) derived from phytozome v7.0 (chr-ID Gm05; pos 29623313 to 29624041)
ttgcaggaactccaaggttacacagttggtgcaagactcattaggtacttatttctctatgcaaaggaacttatctaggtatgattgattttattataattttatccatcttttggtatggttgaagggaaaatgcaaatgaaatcaaggccaaatttattgtggaagcagctaatcacccgactgacccaaaggctgatgaggttagtttacattttctctttccttctcttcttcaaacaagaaagaagaaatgcactgttgttaactaccttcctaacttgcagattttgaagaagaaaggggttgtcatcctcccagacatatttgcaaactcaggaggtgttacagttagctactttgagtgggttcaggtaactattaattaatttaatgaagtacatgatttgacatagataattttcacgaaactaactaaagttttacatttatttaaataaatcttttctttatcagtaacgaactaacaatcaaatagattgagtttatattgttgtttgtttaattttctttcggtatagttaatgaataggttttttattttcgatacgaagttaatgaataggttaatcacttaatacaaattttcatttttacatttcatcacaatgaaaacattgctcaggcctcagggaatccaaaccaaaatgagagacaaaaaagtagcaatacaattcttatcatgtttgtattgtgataggtccatcc

SEQ ID NO: 22759 - DNA, 751 bp, Glycine max
  Intron number 2 from transcript Glyma07g00830.1 (locus Gly ma07g00830) derived from phytozome v7.0 (chr-ID Gm07; pos 453191 to 453941)
gttattgcttcgtttctgctcagctcagttgcagggtaattgttctgttccaccttaaacatcatgcttgaatttgttattgggtagcctataattgattgctgatttgtgattgtgcctccactcttcaatagtatatcgtagtttttaacttgaaaggttaggttcattttttaaatcgtcattgcttctttgaagttgttgtatgaacctttagcattttttttaaaactactgtcatgtatttagcatctttccactttcttacttttccatttttttgtttggtttagcagtgttatgcctacaagcttataaatgaatgttaattctttaatctgtttgttctctttgtgttggactggttgtgctgtgttatagtgtgggaaaagaaacaaaaagttaagctttgaacctttgacatagatgtgccttgaatccagaaattttaattgtctctttcatccagtgcgattggaatgttaaaagaaatgagatttgatttataaattagatcttatgtttggaatgctacaaaataggaaatgtttagtgtttttttaaatccagtggatttaacggtttagatttagaaattctgtgtttgttctgtgattattttttgtgggaggaatgaactaaaggatgcattcttagctgttgggttatggatttaatgtattgttggctgaaattattgagtagctttacattgtacttacaccactattatttttatgcagggcggtat

SEQ ID NO: 22760 - DNA, 658 bp, Glycine max
  Intron number 2 from transcript Glyma07g16170.1 (locus Gly ma07g16170) derived from phytozome v7.0 (chr-ID Gm07; pos 15911427 to 15912084)
agatcctttgtcgtgtcgtcaacgtccatttactggtaattttctggattttctctacgatcctaatttctttcgtttttcttccaccaccttattttttgagggaaaaaagaaaaaaaatgaataaatcttgtttggttgttgaaaaattggccagatattcatcttggttttggagttaccaacttaccatgtaaaatttggtcttatgttgttaattaattaacttttggtagagttccccttcttttctccttccttttaaattctcttattttgatttcataaataaataaataaaaatcttgtttggtttctgagaaaatggtttaatgattaactggcctcttgagtatggatttggctcctagtctaagtcattgatgagaaatcagctgttaatattccaatatttcaatgatttgttacacatgtgcacctaacatggactcttgattttctcaactgatattaattacttaaccctgtaaactgaatagttcacttttgagaagcaggatcctaatatacagtttggtattaagctattttatatttataataatataatataatgttatgggattttgtaaataaggtagggtggaaaactaaagttacattgaactttgacatgtttaggctgaacaagaaacag

SEQ ID NO: 22761 - DNA, 588 bp, Glycine max
  Intron number 3 from transcript Glyma05g37670.1 (locus Gly ma05g37670) derived from phytozome v7.0 (chr-ID Gm05; pos 41217569 to 41218156)
cttactagatacactgcggatatatagattcctttgtttgttttatcttgtttaaatttttctattgagaataaaatgttgaattgcttgctccactgtggactgtgatgattattacctttttctttgcagcttaaggctaattgcagtgttagttattttcagaatacagcaagagggagcatcagattcaagcatttccttgcatcagaggtttcgttcctttttttgcacttccatacactacgaaaaggatctttgaaaaaaaaagaattttatcatttaatgttgtcttgtgaatgtaataaactgttgatgtggcttttacaggtcactttccgaaagaagtattgcccattatattcttcactaccagtaagtttaatttgtgttggaatttcattctttattgtttatctaatcacatgtttaaagatgttattttttcctgtatgtccatggactctttcagattcaacggttatgtatagtctgcttgtttgattacctgatcttgtgtattcctgtaatctgttacagagggtcaagcaagtaagtaggcgactaatttgttcagttgccacagag

SEQ ID NO: 22762 - DNA, 368 bp, Glycine max
  Intron number 4 from transcript Glyma08g38730.1 (locus Gly ma08g38730) derived from phytozome v7.0 (chr-ID Gm08; pos 37924505 to 37924872 reverse strand)
actccttgccaacactactacaaaagggtgattcaacatcgttaaatctaagtcggttatgagaaaaatgatgtagtaaagcttttggtggcatttttgaaattaaatcaaacttttataaagcgttaacgacggttttcgttaaccgcatttgatataaatgttactaaggcggttttatgaaaaccgcctttgtttgtaccattcaaaaacggtttctcataaaaaccgtagttgagtcagagtaattttaaaaaaacgcgtgactcttcaattcctctctcctcgtcccgcttgcttttcttttttcattgtctctttcatcttccctaggctctcgagaagacgcatccaccgccgaaaccaaa

SEQ ID NO: 22763 - DNA, 594 bp, Glycine max
  Intron number 1 from transcript Glyma05g23290.1 (locus Gly ma05g23290) derived from phytozome v7.0 (chr-ID Gm05; pos 28953613 to 28954206 reverse strand)
ttgctctttcggctataattcctggactcaagaaggtatcatttgtattaaatttcatgcatgattttctttctttcttttattcaatagcagcaaggttttaatctagaaccttatacaaactatctaaatctctcacctaacattaggtcgaccctagctagtaagttaaatttcatgcatgttatgcatcaatgtcaaacacagttttaaattgtattcgcggacacagtaaatgattttgcaattaatgtaatcatagaaaattatgaacaagcagttataattatggttactataacctccaaaactgtaatattgtggctgtgatttgaaaccttgaacacatgtaatacatatcttctactttaattgggtgcagtcagctactaaaaatcaatgaattgaactaatgacaaattatattttttcccactataatactgggatatctaaattttactgacatatttttttatcatatatatacaagttgttactaatttgaattttaattatgaatgctgaggcaatttgagtttaactagctatataatttgtatcatatgtttgtgcatgaatgtttgcatgcag

SEQ ID NO: 22764 - DNA, 709 bp, Glycine max
  Intron number 3 from transcript Glyma07g16120.1 (locus Gly ma07g16120) derived from phytozome v7.0 (chr-ID Gm07; pos 15865991 to 15866699)
caggcagacaagtatcggaaaggtgcttgtgagaagtaagtggtctcactctaattgtcaaatatgtttgtgtgcatgtgtctgcatagtttatgtctgcagatttgatttgttcttttctagcaacttaaaaggaacatggaatttcatatttaaatcttgtttcatccattcattttgtttccttggtgtctttaaaccaaaaacttgtaagagtttatcaagagtttgacagccatcttatgagttttaagtaaacacccacataatcggttaattatacacccaaatttatgaggctggatctacccatggtttttatctataagtcaaacttttgactgattttgctgggtacttgagttgaattgcatcttctattatttgtattatttttgaagataaaaaaaatttcaaaacaatgtcttataaaaagggacggagggagtactttcttttgctttgttgtagagttagaatgtgaatatttctcatttatttaattttttttggttattaagataagttttataaatattatttttgaagatcataaactattttgagtttaatattcaaatatgctgaggtcccatgagtttgccactttacctaatctctcaaatttcacagccgtgcttttctctgaatttatttatatgctaattgactgcttcaatcttcattttcttgctatagctgtggagct

SEQ ID NO: 22765 - DNA, 441 bp, Glycine max
  Intron number 1 from transcript Glyma06g04130.1 (locus Gly ma06g04130) derived from phytozome v7.0 (chr-ID Gm06; pos 2875221 to 2875661)
caactattcttgctttccttgaagcccaacttcaggtctatatgcatctatttacattgatgtgtgtgtgtctatctaaattctaattatgtttaagggctttgagttaccatatatacatgcgcagttttttggcatgtattaaaaaaaagagaggcatgcattaaaccaaattaaaaattgtttgaagtaaaaatggatatttaaaaccaaatatatcaaacagcaattcttttctacaccatcagtttcttaaaaataattaaaaacaaagcattgtgataattagcattttcctttctatacattcatggaaagaaaaccaacaagaatcaaggatatataaaccacattatatatcttatatgttaattatataacttaatgtagtctgttaacaattaacgatttatatatacatgcaggagttggacggtgagg

SEQ ID NO: 22766 - DNA, 672 bp, Glycine max
  Intron number 1 from transcript Glyma08g02450.2 (locus Gly ma08g02450) derived from phytozome v7.0 (chr-ID Gm08; pos 1680306 to 1680977)
caccatacccattattcattcccaacgcataactagtacgtttttctctactctctcccacgtttctctctgttaattaattaattaattaattttctgagttcatattagcgcagctgcacaaggttaaacttaaaggctgttttgttttgtttcttttacgggacaaagaggacattctttctttcatcagatctgcaaaggaaaagaaaataaaaatgtcttagatagccaagtgagtttcaactttgcttatcttccgatatattttgaattttctcgattctgccatctcctctgaaaagttgctaccgaataaagagctaaaagatgcaccatatctgctacaagttgaacacacacgctacttttttattaaaaaaaaaaaagaaaattgaatatactagtattattttgcttttttttttttaaaaaaaaaactttaaaaacacagcctgcgagctcattcttttatgcacaagtttctcagtgtccgcttctactttcttagacaatattctaggaatcagatttccttttccagtttccacactttttttttaattatttttcattctctttttcggttttcccctttgtctcaagagggagggaacttgtgtcttttttgtttaaactaactaacaaacttgtggtgattcatttaagtct

SEQ ID NO: 22767 - DNA, 420 bp, Glycine max
  Intron number 2 from transcript Glyma07g33130.1 (locus Gly ma07g33130) derived from phytozome v7.0 (chr-ID Gm07; pos 38055245 to 38055664)
atcgcaaacaactacttcataaattacaaaccaaggtagaagaataactaactaaaaaacacaaaacctagattcagttagatatttatgtacttctagtgttagttttcaaatcaaaattagagtttcacctcagtaatccgtgtaacaaaagattctaattaaggaaaaagcgaaactctaattctgattggaaaacatagcaatcaccgaaaacattagtaactgtaatggaatgttatttgtttatgagaatgctaagattttgaacacaacaatggaaagaaaaaagaaatacattgatacattaagattatttctgattatcgttgctcaagcaattagttaatcagttttgtttttgtttgtttgttggtgatggcagaaaagtgaagaagggcagtctgtggctgaggatcc

SEQ ID NO: 22768 - DNA, 714 bp, Glycine max
  Intron number 2 from transcript Glyma05g27090.2 (locus Gly ma05g27090) derived from phytozome v7.0 (chr-ID Gm05; pos 32979319 to 32980032 reverse strand)
tgttcagggagtcaactgtggctaagatcaccgatgtgagtctcgaatatcttgtttttttttttgttcttcattgtaaatattagaaaaagattttcaatttgatcctcccaagatgtttatgtcgccacattagttcttcaattcaaagatgggttgccaccacattacatttttgtgaagttcagtcacattattctctaattaatagctcgtaaagaaattatttcaaaagtttcatagcagcaaatcatttacttatttgcatttaaattattcaagtctgataagtacatttgcggtatagaagccgttagtgtctttggtgaagtgaaatttaattgagatgcatattgatgctttactaaatctgttgtgatattggtttacgtgatgataccatttactgtattctctattttaaaattggtaatttaatacggttagttaaagaagactttccctaaacctgttgtctttttctaccatgataaatagtactgtgtcttgttattgatccattcatcagcttcagaatcatagtactgtctgtgtcttgttcttgttgttttatggataaattgattttgaagagtatttgattcatattctatctttggtatttattagaatcttgttctagtttctaatcttcacctgtgatgtttattaatgaatttcctttttgctagacaccactttctcacatatctg

SEQ ID NO: 22769 - DNA, 451 bp, Glycine max
  Intron number 3 from transcript Glyma08g02450.1 (locus Gly ma08g02450) derived from phytozome v7.0 (chr-ID Gm08; pos 1680527 to 1680977)
tcttagatagccaagtgagtttcaactttgcttatcttccgatatattttgaattttctcgattctgccatctcctctgaaaagttgctaccgaataaagagctaaaagatgcaccatatctgctacaagttgaacacacacgctacttttttattaaaaaaaaaaaagaaaattgaatatactagtattattttgcttttttttttttaaaaaaaaaactttaaaaacacagcctgcgagctcattcttttatgcacaagtttctcagtgtccgcttctactttcttagacaatattctaggaatcagatttccttttccagtttccacactttttttttaattatttttcattctctttttcggttttcccctttgtctcaagagggagggaacttgtgtcttttttgtttaaactaactaacaaacttgtggtgattcatttaagtct

SEQ ID NO: 22770 - DNA, 371 bp, Glycine max
  Intron number 2 from transcript Glyma08g27730.2 (locus Gly ma08g27730) derived from phytozome v7.0 (chr-ID Gm08; pos 22054195 to 22054565 reverse strand)
gcagattatagctttcccttggaacactcaaatttgtattagtctttttcaagtttttggtgttctctaagttttattgtactttttttttacccttggagggaaaataatagtatgttgatcttattttggagtcctgatttgccaatgatgttttgtatacgtgatgctttggatttgaagcatcaacattaattgaattgcattgctcaatggcaggcccgtagaaaaatatgttattttgatttgtcaattgcatgagtgaaagcttctgctacaatcttcccaaattgtttgttttcagtgatatttatgcggttttggtgtatgtttcaggtgattaagagaatcagagtttgcttatccatata

SEQ ID NO: 22771 - DNA, 442 bp, Glycine max
  Intron number 1 from transcript Glyma08g27730.2 (locus Gly ma08g27730) derived from phytozome v7.0 (chr-ID Gm08; pos 22054655 to 22055096 reverse strand)
ccccaacaacaatttcaatcaaaactctctctcaggtacctttttttttctccccaaagattatacctttgtcgttttctcgcataccctcttttgattttgatcgtttgattgccttcttatttgataatcgcaactgggtatctctttctttttttgtttcgtttttttcttttctggggttcatcaatttgggtgttttctcggttgaatttttctttttctgagaattcaggtgttttctcggttgaatttttctttttctgagaattcaggtgtttctcactagacaattgatgtatgtgatttttgtccatcttattttatttattaacgtttcaattcgtaggatggaggcatcgtttgcttttacgtttaaggttgtttgcctaaacggtaaatagtaaaaattagtgattgtgatttttcagctgaaaggtaa

SEQ ID NO: 22772 - DNA, 605 bp, Glycine max
  Intron number 1 from transcript Glyma05g09000.1 (locus Gly ma05g09000) derived from phytozome v7.0 (chr-ID Gm05; pos 8841185 to 8841789)
tataggctccaaggaagtgacggttgcttccagtcctcttccactttctatcaccacacttcacacttacttgctccaaatttttattcctaaacttgaattgtagtggaagcaacggggtcttgtcatttcatttcagttctacatatgatatgataatattagtaataactttgtaaaaggcacggggaagtttaggttgtgtttgactgtgtttttggtgttttagtttttggaaattattttataaaacaacttttaaagctgttttttagaagatagaagcaaggaaaggaaatgtgaaagtgaaagtacaatattgaggatagaaatagaaaataaaagatggttttgtgatggttgggttttctggttttagaaactaagcaagagatattagttttgaaaaacagtttttcgaacactgctctctcaccagattagtttgtatgtttttaaaaaatgaaacaaagggacctttaaattgttattctcaacaagtgataattccccgacttcctcaagtgatgtttgttgactggttttggttttgatcctttgtaattgagttgattatgatgtttttcgtgacacatgctcaggtc

SEQ ID NO: 22773 - DNA, 798 bp, Glycine max
  Intron number 3 from transcript Glyma08g06660.1 (locus Gly ma08g06660) derived from phytozome v7.0 (chr-ID Gm08; pos 4793347 to 4794144 reverse strand)
tggggcttatattccccctgtacctagatcatttggtaaggatattttatatttatctctcgcatatttaggcattgttgcagatgctatattctggaatctgcattgtactagaaaaaaagaagtaataaaaagtatatataacaagtgaggtgacataatcttaataaatgtcttttgtttcagacaatactacttgctcatgtaattttcgtgaatgcagtaagatgattcactacactgttattgataagcctgatatgatatataattgtttaaaaatgtactgctatttagattttggttttttcctttttttaatgagaatgacaatgcaatgttttcaattgaagcttggttcgcaatgaaatggcatgcaatgacatccaatttggataaattgatcaatcagatggatgaatgtagaagagatgtttattatggattccttcacctttattacttcatataaatctgctgagaatgtatgcagaatcaaatggctagagggggaggataggggttcagtacacctatcctatgaggtatctatatatatgaagacactgatgttggacatattacaaatttttagatgctactattttctgttttgaatggtgcttactgcttatgaaattctcaggcactaatcactagtacatatagacatagtatatctaatcctttggagtgaaggttgattgccattcaccaatgaaaaatgtagaatcaacacaaatacaatatattggtttaccattcctttttaatttttccccgcagaattggtagaag

SEQ ID NO: 22774 - DNA, 949 bp, Glycine max
  Intron number 3 from transcript Glyma07g02020.1 (locus Gly ma07g02020) derived from phytozome v7.0 (chr-ID Gm07; pos 1410462 to 1411410)
gagaagtgagtttagttgctttcaatacgttacatatcagtttttaatgcacattttttttctcttttttactgttttagtatttcgtgttacttaagtaggctacccttttgagctcaatgtttgtttttttaatccgcaaatggtagttgttagaatgttacttttgttagccgattcaacctgcatctttcgtttctttacttttctcttaaccatccaactcaccttataactcattttgaactcaatgttgtagtgtaccttgataaataagcagctttataaaaacattaatatctttagtggatttgaattagtcattctaaattttttagtgtgctctgtttgagtgagcaatgcagttttggtgagcaaaatagtgaacagtgctcattaaaatttatcgtcacattgggtgtgtaactaaatgaaatgaaagaaaatacgcattcaaccataccatttacctaattataggaaggattaccttttacaccctaaaagagaagaaaagtacaggggacagcaataccattttaaggcatagggtcattatatggagttttactcctgtaattccttcggcatctattattaatctttgtgcccagacaatagttttgtcattttttttttccttctataaatgtgtattgtttttatggcagcataggagcttgactagatggtagtcacaagtagaatgccattttatctaaatttgttcgtcattttgcaatgaaatgatggaacatctcatattatctaatataattctcattatgaaattttaagtaaagaagttgatggctttggtggatatctttggtcctgttttctattgatattgtttctggtatatatggttctttggtttgttttgactagaattttttttttaactggttgtccatgaactatataattggcatcttacaggaacttg

SEQ ID NO: 22775 - DNA, 505 bp, Glycine max
  Intron number 1 from transcript Glyma06g42520.1 (locus Gly ma06g42520) derived from phytozome v7.0 (chr-ID Gm06; pos 45843270 to 45843774)
tgctgtcactccaatcaaggaccaaggcaattgcggtatatgtatttttttttaatcaacaaataattttattagaaatattcaaatgtgtaacttttcctctcccttttccctttctcctaatcgtttaatcgtttaacttctagatcccatatatatataatacaaccaaataatgtttcatactatatatatatatatatatatatatatatatatatatatatatatatatatctacaatatataactatatatataaaccaataaataactataagatgcttctttccatgctttcataatatttgatgtgtttcattatttttttatctgaaaatattaatattaatcattaaaatgttaattttttcaataaagaagatcaaactcacaatctttcttcctcttttttattttcattaagaactctgctaataatgtcaacgtggttttgtttgtgaaaacaggcagttgctgggcattttcaattgtggcggcgatc

SEQ ID NO: 22776 - DNA, 278 bp, Glycine max
  Intron number 1 from transcript Glyma07g04170.1 (locus Gly ma07g04170) derived from phytozome v7.0 (chr-ID Gm07; pos 3032570 to 3032847)
gctcggacacagaaaaataaagccacaggtactcattcactgccttctgttttcattctattaaccatacaattcccccaaaaaaatgttttttttgttgggtttttgttttttctcttactttttttttaaaataattatttggtcctatggtctagttttgggttggggtttatcttctatgtcatgttgtgtttgataatttcgtgattgttaatgcatttgaatttgggtattgtgcagagtatcatcttgggcagctcaaggctaaaatagca

SEQ ID NO: 22777 - DNA, 769 bp, Glycine max
  Intron number 4 from transcript Glyma05g17400.1 (locus Gly ma05g17400) derived from phytozome v7.0 (chr-ID Gm05; pos 20075597 to 20076365 reverse strand)
gtccataaagcaagctagaaccatcaggtacggtttataaattttttcctcagatttatcccctctcaaacaaaaaaatgtacagtaagaaatgatatatgtttgattatacaacattgtaaagaattgattccattaaagataattagtcagattcttgtacataaattaattatttattaaatcgataatacttcgtactaataatataataacaaaaaaaaatacacaattttcttttcttttctttttttatcatgaattcagattgattgagagtataaaaattttgcagatagtgcttagaagttaaattcaatatgtttttgagaaaatacttttagttttattttttattttcatttttaattaaaaaaagttaaaccttatttttattttaattactttcaaaattttagtataaaatagaaaaaataagtgaaaataataaatatatctatatatgtttgttactttatacacaaatataataaaaaataaaataaaaatatggcatttttacaattaaaaattaaataaaaacaaaaatagaaaatgtttatcatctcaaataagtggtaagaatataatttacttaagttagttaagtttacaatttcttaaaattcaattaaaaggttaagtttagactatttagttaataaattcattttttttaaatgttgccctgttttcaattgggaatcttgtgatcattgcctctgactgtgttttgttctgttgtttggaagactgaatttgacagcaa

SEQ ID NO: 22778 - DNA, 967 bp, Glycine max
  Intron number 1 from transcript Glyma06g15000.1 (locus Gly ma06g15000) derived from phytozome v7.0 (chr-ID Gm06; pos 11763115 to 11764081 reverse strand)
atctgggtcagtttcatctatatcctattatttgacatttgctacctagtacttttgtttaaaccatttcattgagatgctaccaatatttgatatgattatgatattgagaaatgtgagggatatgtaaggggaaggaatgaccttgcagatgggtttttgttaatcactgttgcattattagatggtgctagatataccaatgatagtgtgattttgttcctcactcctttggttatacttgcaatcttcgattgttatattagtttgtgcctcttggcttaaaattggagagggtgttttacaaagggagggagagagagagagagagagagagagagaggatttactcatctatcaatcactttttgaaaacgtcatcttctgttatgtggttgagattccttgtgctccctcccccaactgtaaaatgcaaagcgtgtgctatactattactgtgtaatgtttaattttaattagtacagagtctacatacttaagttttgattttgatgtatatggcccttgaaaaagactattttttttacccttagtgtttgggtttgagcataactcaaccccaaaagcttcccactcatgtattattttgaccatctttatgccaaggactagacatctcaagcatgaaggactagatatcttgagttgaagtttgcaagattgaacatctccaggtgattcaatagcagctcaatgaacaagtggtctgataagcccaacaataaccattaggatatgttctaataccattttgaaatctgggtttcaatctgactctatcctgaaaactagcttatgggatgggaaattgtccctcaatgttatatacactattttagtcacaccactagtcaatgtaggatctccaacattaaattttcttcgtgtatggtaagacctaatacatcattcaactgatgtaaccagtgattcctgattttcaggt

SEQ ID NO: 22779 - DNA, 726 bp, Glycine max
  Intron number 4 from transcript Glyma05g29840.1 (locus Gly ma05g29840) derived from phytozome v7.0 (chr-ID Gm05; pos 35324063 to 35324788)
taaacaggcaactaccatcctacaggtatattttccttcaataattttgtgcactactggaggaactaaaggaattcttgtgtttatgataaacaccagtttgtggttatgatctgtttggaaattcagactggtaattaattgtattcatttctggtatttattatgcttcctccagtttttttctgaaaagcaagttggctcacttggctgttaaagcatccaatccaacttttgcaagctattttcaatgcagttggtgcattctgtaccccacttattcactggattactctatggttttgctttatcttgtgggatgaactttataactttgcaaatgctcatttttcttttccaaagatataagacaccaaattgattacaaatgtcttctatttgtaaatttttaatatattataaatattttaaattggtcgttcaataaaatcaaattatctttcaaagtgatatatttgtcatcaaattggtttttggaggaagactctgatggcattagttatcatttaaggatcaatatgatgttgcatatatgttgagtgggccaaagttagtgtttagttgtttactcatttgtcttaattttttcaaaacaaaagattgcttgtaagcgtttgaatactgagcacacttttagtatgtaagataggatggagcatctcatgaatgttcgaaactgttgtagtgattctgtccgtgtctgtg

SEQ ID NO: 22780 - DNA, 848 bp, Glycine max
  Intron number 1 from transcript Glyma06g40750.1 (locus Gly ma06g40750) derived from phytozome v7.0 (chr-ID Gm06; pos 43920618 to 43921465)
cctgccaaagtttatattgtgtatgcagtatgctcacattttaacctttgttgtctcctttaattgattctttatatatgtgtgcactcgtgtgttataattataacttgttaatcattatctgacatgcatgatgcatgcttctcagtatggaatttcgttcattgggtttcttttatttcttcaatgggttcttaaatttgaaatcttttagatttcaatgttctttgaagatcttggtgtctaactttgaaagatatgatgcattcttgctctgattctgtttttccctctgttctgtaacgatacaatggtttgtttgatcattggggatgttgagagattttccataggagccatgaatgctgaaagtcttgtgcttttctattttcccaatttgcaagaaaacttgattgtgttcctgattcattgactttctgaatcattgaacatcttctttggcattccatcattgccattttctataatgaaagcacatttcaaaattgttactcaattagaaaataggttttcagagcttgacaagttgtaagctgtgtacagataatatccatctacaatgatttgcaaatataacaatcaactagttcttatttgatatttaactttccttttgtttttatccttttactgataaactataaccttggtgtttgcagtatctaccttttcataatgtgattttcatttcctctttctgttgtattgtccccaataatattgctcaatttcccttttcattttcatcttgtactgaattattgacgatgtttctatcaccttcatttactgaacgattttttttttttttttgcaggtattactca

SEQ ID NO: 22781 - DNA, 429 bp, Glycine max
  Intron number 3 from transcript Glyma06g02440.2 (locus Gly ma06g02440) derived from phytozome v7.0 (chr-ID Gm06; pos 1624784 to 1625212)
aaagtcactggaaagcggaagaaggtacttatttttctcaattttgaattttcacactctccttctgtctgtttctggatacgtatgaagaattagtaatgctaattcctgatttctattgttttttggtgcaaagttgaaaaatgctttcatatttgtgatattacttttaagaatagaagtctagaattaatggctttattgttgtgaaatggatccacttgttaatggtattatttcattatttctgcaagtggattgagttgcaaattttatcttgttatattatatagggtgttttcaagaaaatgcagagcttgttgttgttaatgttactgtttaatgaattttgtgcgttgtacagtgctttactttatgaaaagtagcttcttcttcttctccttttaataggatgtgttttcgtgcaga

SEQ ID NO: 22782 - DNA, 917 bp, Glycine max
  Intron number 1 from transcript Glyma06g18150.1 (locus Gly ma06g18150) derived from phytozome v7.0 (chr-ID Gm06; pos 14484279 to 14485195)
cgtgcagttcgtgcgaggtagggtttatgttagttttgtcttttgtgttagggtaaacgaaactgtttttaagagtgaatagttgagtcaaattaatccctatattctgttgatttttgtagaatgtattgttttaggattttgttgtgaatcctaaatgttgtcttttgcgttagggttactaattaggcttgaggttcgtaattcgtaaattgctgattgtgtgtttcgttcggtaaattggttgttacttgcgtgtttcgtcgtgaagaatagttgatagaaatcagaatgcacgtttggagacagcagacgtggtttttgtagttaagttaggtcgtgactcgtgagtgtggatttcgttgctcaaataattagtaagtgacctgtatattattttgaccaacagtatacacatttaggggtgtcagacatgaattttatcagtcaattggatttttgttgtgaaaactaatttggccatgcttaagtggcattaaacctatttttcatgtcattagggattaatttgactatttactaagatattaattacaataagtaccaacttagtgtgacatgattgacaaataacttttccttaaagcatgtggtcaagggttccatctttaggttcctgtgtatcaaaaaacatctaacaggaaaggttggccacttaaatgaatcctattactttaagagattagtctttggctctccgcttgggatgtcctggatttaacaaaaaaaattacaataagtgatgattatgctagtaggtttgtaaactagtgaccacatcactgttagtcttgttttatttcatgtacaaacattctttgaaggatttacattgtgccttgtgctatttttttatgaatgatatgattgtgtaactggatttaggtataatccat

SEQ ID NO: 22783 - DNA, 763 bp, Glycine max
  Intron number 1 from transcript Glyma06g11300.1 (locus Gly ma06g11300) derived from phytozome v7.0 (chr-ID Gm06; pos 8660492 to 8661254 reverse strand)
gctcatatcagtggtcttgtggcggctaaggtgattttgatttgatttctgtctcttctcttgtttctgttcaaattatgttatccacaaatattagttttgctagaagtatcagctaggaggatttgaacctttcacctctgcctgtagataatttaacctttagctatagcacatactagtcatctctgtctgtagataatttaaccattagcatagcacatactagtcatggatttaatgtttggatatttttctcatataagtgtttatggagaagcttatccaaacaggactttcgtacaattttttttattttttactaataatggattgagtgagtgtagtttagaagataaaagcagttgtaagtgttgtttagaaaatcaacaatttagattgtgattaaatacatgctaatataataatgactatgatgttgataagatctcaatggttgattttttaattaaacaattgtaatcttgctttatcatttagagtgcatactaatttggtatagtttttctcatataaaatatatttaattgaagaaacgtcatatgtgtttcaactctggtacaattttggcattccttcatttctagtaaatggttgtgaaccaaatttgctgctccctttatttgtttggtcctttgcaaaaggttttaattttccactgcatgtctaaatatgttttttaagtatattaacggtggtttttacaggaagtagctagtccatttgattactgtgatattgt

SEQ ID NO: 22784 - DNA, 946 bp, Glycine max
  Intron number 1 from transcript Glyma06g15190.1 (locus Gly ma06g15190) derived from phytozome v7.0 (chr-ID Gm06; pos 11942422 to 11943367 reverse strand)
gagcaaagtaaggaggttagttctgatttctctgtctttctaaactcgcttgttttcccctgagaccttgttgtttgtttggcggctaagaaagacaaggaaataataataataatcgattggaatcgaacgagcgattctagtgtttgcgcggaatccatgtatctgtgtgttttggtttggtttcaattccgctccgagagtatcgcgcataggttccgtcgttgaaagcatatgcgtactttgaatttagttgtattcgtcgcttttgttgctcgtgctgttggaatttttgttgtacttcatgactagaagcgtctaaggctctttcatttcaagctctgttttgttgtactgcatgtcgtgttgtttgtctttcatttaattaatcgatttgttttgtgctttaagtttgatatgatgatatcagtgttgcagtagaacaggtaatcgtgaattcctttctggagctaacggatgatcagatggtagaggactaggagtttcttttttttaaaaaaaaaaaattctatggcagccatgaatagtttacctgttatctgtttcgctttatttttctcttgtatgaatataatgaagtttttttctatcttgtaatttcttcaaatgaactgtaaagaaattattattgaagattttattaactagagggtatggtgaagttcataaactttgcctgcacattgacattagcagatgcttgtaatagttcttcttgattggagtaaaaccttttcagtaattagttattaggtttctgaaattttattatgcagtctaactaatactttctattcattacattatgggaacaaacaacttatcttatcatttacattattattgtaagtactatatgagaaatgatagttttgttatggtgaataatagtcgtctaacctataaatgttttcactgtagaaaa

SEQ ID NO: 22785 - DNA, 1036 bp, Glycine max
  Intron number 2 from transcript Glyma07g01540.1 (locus Gly ma07g01540) derived from phytozome v7.0 (chr-ID Gm07; pos 999621 to 1000656)
gcaaaggctgttgaaaatcaggtaattttaaaataactttcttccttaggttagattttttatgcgtaatggagtatgatattctttttctaattctgagaggtagaatctattgctatttcaaatatatgttttgttttgttttttcttctttgatgaccactaatctagtttggttcttgtttggtgttagagtgttagttgttttagctaagagtcaaattgaacttgtccttattatcctgcaaagtgatattgctagtaggcctatgacttgcgtttgatgcttactctattatgtcagtgactgaactgtcccccaggtggcaattttggtgtcattttcataaatgaaaagaaattatgtgttattattgttctttgatctgttgaagttacattgcctacttgttttgattttgtgattgttgtgtgtctttgttgggggacattgtgcttaaaaaacaacctttttgggcttttgacagtaagactcagctgcagtgatgagcctctaacatataagaagaatccttttcgtttgagtttcttcaatgaaatatacatgtcacgcttggcttctgagcttctatcattcagaaatttattcatgaatttgttctactgattccttcctgatgctgttaatataggaaagtttatgttcctttcttatgctggttaatcattgtctgatatcagcatccaaattttcatgttagtattatgttttggtctgaattttcccaagtattctgcttgaacccatgaattccctcgagtaaaagcttacttgagttttgcatggacagtacatggttctttagttttgatctgtaatagttttcttcgtattttccaattgcccaaaattccctcttaatgcctgtttatttatttggaattgttgcttctaaaaattgtgatgctgttaccccattatacccaaaatttataacttttaactgatttccttttcctaatgatgcactgtgcttcaggtggcagaaaattactacaggcccgatctcaagaa

SEQ ID NO: 22786 - DNA, 1018 bp, Glycine max
  Intron number 3 from transcript Glyma08g08400.1 (locus Gly ma08g08400) derived from phytozome v7.0 (chr-ID Gm08; pos 6029422 to 6030439 reverse strand)
aggtttgtcagatttaccttctttacgtatattttctgtgagtcaatctactggcttgtcatactccaagcatctattgttcttttatagttgctaactgatgcttattttgagtaattactattggtgctacaattctaatgaaaagtcagtggagcatctgctgttttgatgtttaaaatgccaagaatattttggtacttttcttgtctgggattatgcttatatttgataggtaacttaatgttggcaattggcatgtttgagagaggacaaacttaatggagaattagtgggataatgatgctgtactcttcctttttttatttaatatgccgttcatgtaaagagaaatatagtgaaattatcaggaaatttgtttttaggtgcttgattgaatcttttttggatcatattattccactttggctatttattttcaaaaccatagtggtaactagcctctatgtccgtagatttgaagtgtactgctgggtataagcctacccagctctggttgtaccaaatttattcattgtggtcaggggtgggatcaactctacttaatgtgtaattgtgtattaatcaaggcttaacagcttttgggatatcaagcaattatcctattcagaaggataaggaaaagaagaagcagggattgtgatatagagcagaatctataatacatgggtttgggttgagcttatatggatttgttgtctcacgatggaggttaacctaacttataaacaggtcatgctagccttttaggttgatttatataactattctggctgtgttcaggttgagcattttagtgccacagccttgttctaacaatgaagatacactatcttaaacatgctccatttgaattcctagcttgcttctgaattctgatattgatggccttacctgatatgtcaatgtctgtacctctttcattttttgcttcgctcattcttgttttctctaaaattcaggttgatcttctggagccagtatcacatttcttaga

SEQ ID NO: 22787 - DNA, 499 bp, Glycine max
  Intron number 1 from transcript Glyma07g00620.1 (locus Gly ma07g00620) derived from phytozome v7.0 (chr-ID Gm07; pos 305921 to 306419)
ctgttgatgtaagaattactctctcctccctcttcacttcattttgtttcctactctaaacaatttcccagggatctatcttctgtatgtattgcttgtagagatcatagatccttaattcacaattcatatatttaaggaaataaataaataaatctgtagccaaatctacccaaattgattaatcaagcttggacttggtagacaggcaaattgcaaactcacatttatctgccttctgtcttctcctattctctctctctctctctctctacctgattttcttagcaacccaaattcagaatccatctttttttatgccttcaaggtcaccctgccttcctcacaacgtttatttatttattgtccaaaaaaagagagaagaaaaaaacaaaggtagaatcatttcaattcaatacatgtcagtccaagtgcttttccaatgaatttatttcactttgactttttgttttacaggataaacttcctggaacggagg

SEQ ID NO: 22788 - DNA, 472 bp, Glycine max
  Intron number 3 from transcript Glyma07g00620.1 (locus Gly ma07g00620) derived from phytozome v7.0 (chr-ID Gm07; pos 306690 to 307161)
gcccggagtaccatatatctcaggtaactgatccaactattgtgcttgtctcattgaagaggtccttatttattacttgcagctattttttcctgttgatgattccctctcctcctcaccaaaaggaaatgaaaccatttctgtagataatcccttctggcttgcttgctgactttaatttatcagtgctctcaatatgttgtttaatctacaaaccatctataactttttccttaatgccctagtattgactattgagttccattctccattttgacttttcttataatcacccttccttccttctgctgtttgtttccagcatcttgattgttacttgttagttctctattattgtctcataacttctggtgaagtttgatcctgagatatggccctttcttaattcataatttcaattattatttctcacattatgttattttctggtaattccttgtccagatagcag

SEQ ID NO: 22789 - DNA, 835 bp, Glycine max
  Intron number 3 from transcript Glyma05g25800.3 (locus Gly ma05g25800) derived from phytozome v7.0 (chr-ID Gm05; pos 31872548 to 31873382 reverse strand)
tcactgaatagtgagtaacacctgcactgctattataaatattattattattgttattattttttctgttattggcttgtttctctgtagaacatgcgtttgtagggtgggaagggaaattataaaatggaacagacaaccagtttgcaagatttacaatcatgtattggggttttactcaagagaaaactcctttagaatgctgtttggttttggttgttaaactttctgggatggaattgttttatgaatgaatatgatccccctgctttttaaaatcggaaatgctcaaatgtatgaaagctatatcgtaatattcgcacgaaggttgtattctatcaaaagatacttcatatatttgttagttttttaattaatattttttttttcaaaaaattataaccatccagatatgaattcgtgtgtttcatgctggttgtattttgtgcaaaatagcattgctcttttaaaatatcctgactggagtttttatattgtcgtatttcgataacttatggttctgattttttaagtgtttatatttctacttgaaattggtgtgatgatgggtcaatcatgttactggttcaaagattgttgtatcttcattttacaaattgtctttcggaacaccgactaaaaaatcattttggcagttttatcatttggaagttactgagaaatataaaggctgcaaatataatgatttaacatggactatgattgagctgtttttcttcatcagtttcttatattatatttctgttctagtggagcatgggtaaataaactttatttagctttcccagggggctccttctttttctttttggtt

SEQ ID NO: 22790 - DNA, 894 bp, Glycine max
  Intron number 1 from transcript Glyma06g04980.1 (locus Gly ma06g04980) derived from phytozome v7.0 (chr-ID Gm06; pos 3518229 to 3519122)
ccaccactgcaaaggaacactcaaggtctctctctctctctctctctctcttatgcactctttggatttgtatctacagatatatataataataatgataattcttcatggttatgtagcgtttgactctagttgttcagatctttctgtacctggatctggtgtctctagttgatcatctgaacaaaccagtggcatcaattttagcacttgctttgattgattgttctgtgtttttaaaattaagcattttcattacaagacacttcctgtgaggactcttacctgttcttgatattgttgtaattttttttctcttaattttctttccaaaaactcgcctggatttcattttgtcgaattatgaaccagcttttgaaattaaaaagtgaaaaaacatgtattatacctcagaatacaatccatccaaatttagattggcaaatctatctacttgtgctcatttattttcttttattttttgattgatgaggtggatggatctaactctgcctcctcccttttacgagaaattacagtcttggccaattaccacgtgatgcattattaactccttttcataaattaaaaattgattatactaataatttaggacaacataattctgaactatacaataatttttttcccttttactgtttttccactaaaactgaaattggtttggcaatctttagtttttggttgatatggtttaatttgtagatgttctgttagttttcaaaaactggctatggcaaataatattggtacctctttgccttcttgtgtattgaggtgtgtaactggatttaattttataaagtttactcacagagtattgtacttttaattgcagcttagcaactataactcttttgagggggttcttta

SEQ ID NO: 22791 - DNA, 758 bp, Glycine max
  Intron number 1 from transcript Glyma05g31710.1 (locus Gly ma05g31710) derived from phytozome v7.0 (chr-ID Gm05; pos 36805418 to 36806175)
attttgagatcatctctggtcgtctagctgttcgtaactattcataaataaaaacttgcactttccattcattttttatggctacaaccttttactgctacttctaagttctaaccccatcaaaattattttcaattttattcagcaaatcattaatctgtttttctttgcaaatttaaccccttctatttgggttcatttttccatgcatgtagagatttttatactattaactattaagtctagtaaccattaatcatttacttctaaaaatctttataatattgtctgtattcatgactatatattattaaggtttttagcttatataataatttttaaaaaataatttttttgaattaattaacctttaattaacttggtatgatatgattaatagatgatttgtttaaacgtgtgcttaggatttgatcctcagtttttatatattgaaatatagaaaaatatctgttgtgcagaattagtcattgaccggaagattccctgttcaaaaatatatatcaaaattatatttactaattttttccattgaatatagaattatcttacaaattaaataccaggaagtgtagtgtacccttcccgtttccttcttgccataatttttgtcaatgttcccttttaaattaatactcgtgcatgcaatttaaactcttagttataagagaaataaagaattaggcactagatcattttttttttcattttaattttgatgatatatatgtttgttgcag

SEQ ID NO: 22792 - DNA, 589 bp, Glycine max
  Intron number 1 from transcript Glyma06g21790.1 (locus Gly ma06g21790) derived from phytozome v7.0 (chr-ID Gm06; pos 18366113 to 18366701 reverse strand)
cgggcatcgttgctttgcgcgattccaaattaaaggcaagttttggatcatttctctctctctctcacacatcttcgattttattttcttttcctttcgataaatttatcgtctttttactctcttagtttgtgttttgtggtatttactaaattgcaatggtttttcttttttcatttttcgtcggttgagatgattgatgcatgaggcgtggggtgttaccgtattagccgtgtcacgtgctaaaccttgaaagtgtgttgatattattctggtgacagcaaagaaaaaaagattatgctgtctttcttgtttgaattatgttacttgtaaagtgaaattatttgtgggtgatttgtgagtctgattcgaatttttggaaaggtggtgttatactgttatgtgatacttgcaagaatctgtgtccaaaaaaattgatgaggtctgtggcttttatggaaaatttgaaatttatgttgttagttgttagaatgttagttttgtgtatttgtatttgtgttgattgcccttgtgtttttttgtaacacacttgcttaccttggagccttttgctaacagacgtttccgg

SEQ ID NO: 22793 - DNA, 740 bp, Glycine max
  Intron number 1 from transcript Glyma06g07380.2 (locus Gly ma06g07380) derived from phytozome v7.0 (chr-ID Gm06; pos 5381131 to 5381870 reverse strand)
tagtactgatctatcgaaaactcaagtcctctgaggtttttcctggaatctagctagggtttagtttttgctgcttaatttgatgctctttgctgtatctgtgccgtttgatctgtcttccctggctcttgttaaacgcttgcttttctattcgttaattggttcgatttagtgtttaatgttcttttgccgatctggatttctcaacccaaccaaggttttagtggaatttgttgcggtttatcttcgcgatttcatcattaacagttggtgattgctgcgatatgtttggattggatttaatgtgtgagattgatacgaaccgaaccggtttttgttttcaaagctcttttttgctacgactctgctggcttgactggaacactgtttgtttgtgtacttgtaatgggagaaaattaaggtgtacattagtatagtgatgatgccgcagcgcaattcttaatttgctactacgttttttgtgtgtgtggatggataccgataacttcatgttatcattgttcgatagggtccccattttcctgtctgaaaatttgacgtgaaatgatgtagattttggaaaatttattttgacaagctcaaaactttaattctgtgttcttaactttagttccctgttgatgcattgtcacttaaaatcaatgaataactgggtgtttgtttaataatgctatgttatttcaggtctgtggttttactgttctaaattttgataaatt

SEQ ID NO: 22794 - DNA, 626 bp, Glycine max
  Intron number 1 from transcript Glyma06g38120.1 (locus Gly ma06g38120) derived from phytozome v7.0 (chr-ID Gm06; pos 40948436 to 40949061)
tccagctttggtttcaaccaaggaaacccactgaggtgagcaatcttaaagtttccaactttttttttatctgtgttggagctgtgagtggagtttctgcaattgccaagttgtggttttgaatgcagggtttgacacgtggggtgttgtctctcaatggagttcttttatagagcttattgtttggtgaaatttgtgatggatgcatttttgtagctagttttttatgattatctacttttccttttttgtttttgaggctttgagtagcttacttaattaggaatttataaaaaaaatattttttcttagtaaatgggttttctcatttttgtgtaaggcatggttaggattttacatgaaattctgattcaaggtaacatgtgggtctaatcattcaattatgattttggcaaatgtttgcttactgagtttgtcacaacatgttctttttcaactggggatcaaattttgttgtttgtttggctgctgaagaacttaaaagcaggagggggcatttgattgtgtagctgtagcagcatgaagttcataacttttattctccattttgctgctatctttatgtaacttgtgattactgtcactatgacttaccaggcttactt

SEQ ID NO: 22795 - DNA, 427 bp, Glycine max
  Intron number 1 from transcript Glyma05g22580.1 (locus Gly ma05g22580) derived from phytozome v7.0 (chr-ID Gm05; pos 27915512 to 27915938 reverse strand)
ttagcacacaactcgtgcctcgacgtgtcttgaccgtgaattgggattgtgaaactatttggaatttacatactgtgtgacggaggccctcacttccaatcagctaagccgattcattaggggtggggtggataaagtgtaattcgagcaataagggtagtgaaacgtaataaattttactgatcaaatcagttttttttttattttaattttttgaaaattaaaaacaattttggaaaaagaaatcaaatgttaaaagtagggatgttgcagttatctattatgaaaataaatggaaataaagggaaataattgctcaactaattagagtgaagaagaagaagcaagggaagaagaaaatatttgataactttttaaattttgcatcaaagtccggtctacgtgtcacaacctgggataatttatc

SEQ ID NO: 22796 - DNA, 622 bp, Glycine max
  Intron number 2 from transcript Glyma07g15750.1 (locus Gly ma07g15750) derived from phytozome v7.0 (chr-ID Gm07; pos 15461059 to 15461680)
gaattgtattgcttgttactgtttttcttgttaccgtttttattcaatattggattgctagatatcataaaatattgcacgaggaaattgaggataccatgatagaagctcaaagcaattgttatttgacaaatcctaaatataattggagcttagacaatagagttgaattgcactattttcatggatttggaagatgatggttttgcactacattaagattttcatttggtttatattgaataagtctttaccaaccattgataaaccagacaagaaaacatattttaaaaaataaattaaaaatgcatgaaatctgaaaaaggtgaaagcaaattcccacggtttaaaccgtcggaaattgttttatgtgctttacaaaatttaacatggcaatttttgacgattttctactgcagaaaaaactaaccagtaaaaaatataataaaattaccatcacattatccactaagtgcacaaatggacgacaaggactttagggctaaaatataaaatttgaaaaaatttatagactaaacatagttaaatcaactataataacaaataatctagcattagatttagagcacgttgaacaacaaacaaataaacatcttcattg

SEQ ID NO: 22797 - DNA, 656 bp, Glycine max
  Intron number 1 from transcript Glyma06g23220.1 (locus Gly ma06g23220) derived from phytozome v7.0 (chr-ID Gm06; pos 20320183 to 20320838 reverse strand)
aagaggctgttgaggattggaagaggaaaaagcaggtaatgttttttgtgatgattgtgtctgatttggcttcaaatttgtggttaagatgctgttctgttctctatgcaaagtgaatatatatggttgattgaaagttttgaatatgcattatttttgcagttttgaccgcagatgttttgtgtgttattttaagaattggtttttggaaaattctagtgagggttactgtggcgagggagttgtgaggggaaaagtggcctcttctgcggtgaactcatggcttgagttattttaggaatgtccacaatccacatgtggttttgattctcttgtcttttcaaatatgttcatacttaaagcccaagtacatttttttttatcatagaatatggagaaattgctaaataggaagtgagatctgcatgattttgtgaatcctgatatattttggtgaataagtgttttagaaaaagtttattagagtgtgttgttaaaaattctcattttggaacagagtgaagagatagcactattgtgttgctttttgccaacttttcctttctggaaaattcttttggttccttatttttatgctcctgttaattattattaggtctgtaatgtagtcttgtgaatttcatcaggatattgat

SEQ ID NO: 22798 - DNA, 481 bp, Glycine max
  Intron number 1 from transcript Glyma06g06870.1 (locus Gly ma06g06870) derived from phytozome v7.0 (chr-ID Gm06; pos 4943822 to 4944302 reverse strand)
ctggtaaccctccaatgtttctattcctccaattatcttgtcactcacttcactttgaagattttttttttttcaccagagatttttttttgttcaaagaatttatgtgatacattacatcaatatagtatttcataattcctaaaataatgattcttaagggtagattcatcttgggtcattttattttgtatcataaagagaataatcatattaaatatcaaataaaaaaatggtccaaacatttatcaaagaccaatcttaggtggaagaaaaggttccttgaaagttggaacacttatttatttatatttcagtatattgggtctctttctttcatttcaaaaaatttatataatttctattttgaaatgaaagaaaaggtatggaataaaaaagtgacatgtatactagttcatcacatgttatttttgtgtgaaataataatgtatatatttgatagatagagcaaaggataata

SEQ ID NO: 22799 - DNA, 810 bp, Glycine max
  Intron number 2 from transcript Glyma06g39040.1 (locus Gly ma06g39040) derived from phytozome v7.0 (chr-ID Gm06; pos 41961729 to 41962538)
cagaaaaagcgtgcaggttagttctcatcgtgctttaaatagaatttcaacacgctacagataaaattgtagaggatagcatttaatatttattttttgaagaattatttttatggaaaatgctaatcaggattcttagaacattaattaagaaaattgaagtagaaatatttttattgaaaaataaaaatatatattatttataatcttttttgtcttgtcttaatattttcacattaaatatttttttgatttggtttcttaatcaatactgttatgacacatttgttagcaatatctttttttatatatctaaatcatgtcagcaagagaaatgctaacaagacattattatatgacatatgctttaaaacagaatctatattattgggttatgtgggaaatgctaacaaagattagacctacgtaattaattaataagactaacagtgtgttgaaatgaatgtgtcaaataataataaaatctcaatgatgctaactttcaacaatatatgcatacaataatttgttattttgaacttttctagttattatatatgcaatctttttttttcttcttcttcccgttactctagctagtcatcatagatagcattagttgattttttgcaagcaattactttctttttcttaaaaaaaaattataatagaataatggaaatatcagaaacaatgactatagatagtttcaaagttaagcactgagtatctaattgcataattataagaaaacctctagatgatgacagtttttttttctttctacattatgcagaaaagtctacactg

SEQ ID NO: 22800 - DNA, 991 bp, Glycine max
  Intron number 1 from transcript Glyma07g11310.1 (locus Gly ma07g11310) derived from phytozome v7.0 (chr-ID Gm07; pos 9499129 to 9500119)
cccaagcatttgggacctcttcatcaaaaaacccggttcgtcaacattctctgttcaattattttattttttaattattaatttttatgttcaatttcagttatttcattattgatcttaacgcgtgacgtcacttcaacattacacgattttataaaataggagattaaatttataaattaaattaataaaagatgaaatttaaaagataaacgggaggacaaaaatacaagttcaccaaaataaaataacgcatttcgtgccttgtcctgattgtgagaaaagacgttaatttcgcgatcttgctgtgctgtgttggagcattcacttcttacacgtacggcttttctggtgaaaagcaagatgcgaatgcgatgagatgagacactttccgtttcagtactttccaaactagttagttttccataaaatacctttttcttttcgcttgttgaaagagattaattgttgaataaatgcatttgtaattttgcataggaaatttctgctttatatataatgaaaacattatattttagaaaatataataagaagattcaaagaaaaatatgaagctaaacaattgatgtaatataaagagtttaattttaatgttttgtcaatgtaaaaaatcttgtattatcaatcaatttataccaaatataattttaaggtaattattataaaatttaatatacttattatatatatatatagagagagagagagagatttctgtagtgaacgtaaaaatgttatctgtgcatgtatgtttacttgtataaaaaaaaaaatgttatacaaattataaacatgttattaaataattattcatttataacagatctctctcatgtaccatagaagttttgataaactaaaaaaaaatagccatttttgttacacccatagcttaatgttgagcttaaattagttttttttaatatgaaatattgcttgtttcaatacaaaacagggattgttgcaaata

SEQ ID NO: 22801 - DNA, 887 bp, Glycine max
  Intron number 1 from transcript Glyma06g00480.1 (locus Gly ma06g00480) derived from phytozome v7.0 (chr-ID Gm06; pos 218327 to 219213 reverse strand)
aatcaaggcttcttgcatttaacaaatctaaggtaaacctcgccgtctttttcttttattcaattaagttactaccattacaaatttatacactggttttctgttttatcattacacaagcagtcatgaaactaatttccattactattttatcagtttgttgacaccatgcacaacaatgaaatacaagctagtgtaacttgttctaaattggttcttggagtttcttggtctagttgctggagacaaatctttaatctctgactcaaatagtatgacgtagattatatacaagcacataatttttattgctcatttgatgtgtgctacaaaattgatctctgttgctgattgatctgctgtcattatggcatgacatgaagtatccaaaatgtggaaattgatgttgaaactgcactgatatcatatcaggaataagaatatggctactctagaaagaggactgtaaaaatcaaggttctttgatccaaatcaacagtaaattcactctccctttctcactttatatgtttcttcattttagaggagtccgttttagactagatgaattgctggagtgaaaatgcattcggtcatatatttatatacatttcagaattaactacatataaatgcaattcccttagtacctaagattaacactttgcatgaatctgaacattgggataaatgttagctgctgtggtgtggatatatgtccattcaaatatcttgtatcattttcctgttaaatgaataaaaaaagtacctgacttccatgctctttccttcctcactgtggttgtctccttttaggatattttatccacccacaccgactgtgaaatttatcttaacaacaataatttgttgcagtgctgtgttgg

SEQ ID NO: 22802 - DNA, 533 bp, Glycine max
  Intron number 1 from transcript Glyma08g14640.1 (locus Gly ma08g14640) derived from phytozome v7.0 (chr-ID Gm08; pos 10668752 to 10669284 reverse strand)
agaaaaagtttctcaggtacacagatgcatacatttagttgtgacacaaacacaatttttacattctctgaaattgaatcaacacacttaattgctttaattacaatttttttacaatataatattattaataacaatacatatatccaaaattacggctttagtttacattgaaaatatggtgggtcaactctagattttggatccaacttgtacagttccgcgtacctatcaaacaagacgaaatcttcttcatgctatcatgtattattttggtagcttacctaacaacaatgaaattttggtaattggtaagatgttttctaatcaggggaagagcgtaacgaagaaaatcaaattttgttgtttgatgtggaccttaaactcaaactctttgtctcatctaacatattgtacacccattgcaattatagctttgtcaggacgtgataacatgataaagtaaaccataattttaatttcttatcttactcacagaaagggagagtagtcctgggatcgaaggcctgaat

SEQ ID NO: 22803 - DNA, 715 bp, Glycine max
  Intron number 1 from transcript Glyma07g37520.1 (locus Gly ma07g37520) derived from phytozome v7.0 (chr-ID Gm07; pos 42532158 to 42532872)
accactatatctgcagatttcaggtttgttccaagttttttggggtctgttttctgttataaatgctggttttgttctgcccgttttttgtgactaatactagtaacaaatactgtagagtaaattatgctaatacctaaagtatgtttgttttatgtttttatggatttaacttaaattcatgtaaagtataaatgatttttacattggcatccaataattgaggtacagtatattaatattgttgatactttgatattaactattttaaaatttgcagtgattttctgttgacacttgacaatgtaaaaatctttaaatggtgcataaaaattaaacatttgctttgtatatatgataaagttcttttgtattcaatattataatactcatctaggttttacttaataggtgcttttgtttggaattggatattatagtatgtctcccttgaacctgtttttttttaatggaagtctaccttaaactttagtttgaagaatgtaaactgaatttcatctacacatatggatgtttggaaaaataatggctataatattattttataggtctcaaatcatggtttaattagaagtgaaaaaaaaagaggctttttctcttgggggaaagtaaaaacatggtttgcaaagttgttatgttgctcaactgcattattgcaggagcctggagaaatagaatccgagtttgcacagat

SEQ ID NO: 22804 - DNA, 1050 bp, Glycine max
  Intron number 1 from transcript Glyma06g41180.1 (locus Gly ma06g41180) derived from phytozome v7.0 (chr-ID Gm06; pos 44468029 to 44469078)
gaagccaccgcagagttgaaggacgctattgatcagtatattgttttttttagtattatttttgtgtatttgtggtttcagttttaaagtttttgttttgaattttaactgattttctgtgctgggtttttttttctaaaggtttaatttctatgctcttagtgtgaagttatttttgttttggttggtaaccatcgaattggttaaaactgggttttgatcgataatgttagtccacttggttttgatagataaggttagtgcactggcacacactatcagtgagtatgaaattttttttttctttctttcatgctggacaattaaattatatatataaatttccgttttttttatgaatatggaaactcactttttattgaaaatgacagcttcttcgattgttgttgttgctgcagcggcttttgttgacctttgtatagtatgtttgagcatgatgttgttcttggtaatattagggataaacactgttgttggctttgttatcttttcctactatttctctttttaaacattttatttcatccttgtttctagatatgattattgtctgagtaaattttggtaatgtttaaaggtattgcttttgggaagtgtaggacatagtgcatgtttgaataaccattctgaacatacttatgggatgtgtaggacgtagtgcatgtttgaatatcggtcctaaatgtaacttttgggttctgaacacacttctggaaaataacatatgtgaatgtatttttgaaaaggtgcaaccgttattatccaaacatgtattaattcatttgttttggtggagataagttatatttatgaattccctttcttgggtctagtgtgcaatcatggggaacaatggttatgttaaattttgtattttgaaccttactttactggaggaggaagttattctttttcacataaacacacatggtgggatatcttcgatgtcgtgatacacttatccctatctgagatcatatttattgtatttcagagtatatctttgtcctgagacttctcaatattcat

SEQ ID NO: 22805 - DNA, 929 bp, Glycine max
  Intron number 1 from transcript Glyma06g33970.2 (locus Gly ma06g33970) derived from phytozome v7.0 (chr-ID Gm06; pos 35166262 to 35167190)
cggtttccattgaaaactgatcacggcttttctgggtgggttaaagttttcatctttcacttatcattttttgtctttcttgtcaatgagtgttctgcactcacctctgcatattttgatcatccttgtgctgcatagtgagaatatatgcatgtactgaacattttttgaacatttttgaacttgtttattattactatattggttctgatgcctccatcaccataatgtaaagatagagggagtttggcatgttctgaagtattattattattttgttgttgttgttgttattattattattattattattattattattattattacatcaagaaggaaagtactttttgggttggagctttgtagatgagaaagcgttattgagaggagagactactaaagatcaaggtagtcaggcaagattttccagctttccgtcagagattagtcatcaactttatggataggagtgttgagggtaggattttattagtgacttcaaaattaaattaagcttgattcgagaagtttatgtttatatggtagaaaaagccataaaagttttcatgcaaacttgaagttaggaggaattgtgtttgtacttgcttaattggcttttataaaagatatgatgtaagccttgggatttttttgattgctaagtgaaacgattgagggaattgactttttagggtaaacttgtagtgctagttatgtacttaatatcattgaattgaattttggatgtgtgggattgattccattttcttatgatagtagtactaaagcttaaggtgcaccatttaatatgtgtatatattgtgaaagatagttttgtttgtcttatacctaattttttgagtgtttttttttattaagtgtgagttccttcttctgctgttgttgcagctttatctagaactgaa

SEQ ID NO: 22806 - DNA, 503 bp, Glycine max
  Intron number 1 from transcript Glyma06g05030.1 (locus Gly ma06g05030) derived from phytozome v7.0 (chr-ID Gm06; pos 3558809 to 3559311 reverse strand)
cattctgagatagattctggtaattttattgagattaattatatttgatcggaatatcatgtgattttgtttggttttccattgtgggtgggggtggtggatagtgcattgaaagcaacggttgtgtaaagtgaattttttctttggtattgtatcttcaaatatctttttagtaattgctagatttttaatttttaatttttataaactattaaaatagtttcatactctcatcataatatattttttaaaacaattattggaacaattatcagataatcgtattatgatttgtgattattaaaaaaatcttgtaaagattatttttttctcattgttatagcattttaaaaaatattaaataaaaatgtcctacaaacatgtttcttttatattattatttaacaatgaaaaaattggttgattctaattttgaattattctatctattttcttacatgcttttagatttcggttgattgagcggcagtcgacggcgaaag

SEQ ID NO: 22807 - DNA, 1025 bp, Glycine max
  Intron number 3 from transcript Glyma07g15400.1 (locus Gly ma07g15400) derived from phytozome v7.0 (chr-ID Gm07; pos 15249137 to 15250161 reverse strand)
caagacaattgaacgagcctgtcaggaggtatgtgtatattttgaattcaaattacattttctctcagtgcttttgtttgtcattagttagttacatcttctcgtttggttctgaaaatgactaaataatgtgagagtagaaaaaaaatggaacaagtttcatctaatgtctattctaaatcgattgagaacactatgttgatgttgttgcactgttcatcatctgaattgtacttttctgggttggttatgtatttgttgtatatttcaaatattcacatttcatggtgggatcctataaatctttatgcccggaacagttaagagttggagtcctactgccactaaatcgattaatggctaatgatttagtttgcaagattctataaatttttcttccctaccgcaccacaacaacaacaaaatttaacctttcacaaaatatttaaaaaaaaaatctttttcatagaatgcaaaattgccttcttcacttatgcagattcatttgaagttacttgtatatccaaattaccaaagggcaaaagcaaagggaatgtgaacaagaaatttcagcctattgacttccaatttgtgaactgtgcattcgaaatttcagcctcaatatcacaccttgctatcataatataatacaaaaaagtttagcagcttaagaaagttccagtgcaactgcaagaaaaacttgttagagccttcctgaactaaataagcaaagcagggaaacataatgctgacaaaattgcaatgactacttaatgtgagagagtagaaaagaggaacaagtttcacttaatgcccattctcaatcaattaagaacactatgttgatgttgttgcgctgatcatcatctgaattgagctttctgtgctggttatgtatttgttgtatatttcaaattcaaatatccacatttaaaggtggtacattatatatctttatgctgggatatttgctgttgccaaactggtaatgtggaatttgcaggtcataggatattctgataccg

SEQ ID NO: 22808 - DNA, 616 bp, Glycine max
  Intron number 1 from transcript Glyma07g30100.1 (locus Gly ma07g30100) derived from phytozome v7.0 (chr-ID Gm07; pos 35155294 to 35155909)
tcgacgagcaagagcgcctcctctcgactctcaaggtactccgccacgtgcctcgggttttgtttccaatttgcgtcttcttacgtgcttttatcgtggtttgtgtgcaagttatttttctgaatcgatgttaatgcggttcttgattcaattttattagtatttctgaggaattttcttatgtggaaacaacgacaacgttcaaagctttagtatttcgcaactcttgcatgttttacttttgacactgtttcgcttaaaataggaactcgcgtgtttctcctaagctttgatatttcttttaatcaatgaatggaaatcgttaatatgattatgaatttgcttgctttcagttaacagttaatagttttgaaggagtttttgtcaaagtttaatggtaagttcttaatgttacatgaagagaactattgttgatgctatcaaacttactttgcatgtccatggtaaatctcatgccactctttaagtaggatttctttgaatgtttatgtaagtaaaatcattgactgaccttttggtttagtgagaattaattactgacatgattttgtgctttacagtctcagttaagccgtgctgtgtatttggaggatta

SEQ ID NO: 22809 - DNA, 917 bp, Glycine max
  Intron number 1 from transcript Glyma05g08970.1 (locus Gly ma05g08970) derived from phytozome v7.0 (chr-ID Gm05; pos 8821884 to 8822800 reverse strand)
ctttctttagggtactttcttttctcttttagttgttattgatctctatatctttgggattagtagtgtatgcaaatgacaatataaagagtttttacgctgttatccaatcataatccatatgataagtttgttgacttttacaatggttagtttaccaacaatggtttctaattgattgatattgtaaatattttctacatttatagtgcgtaaaattaaactcaaatatgcttgcttgtgtgtgtgtgtgtgtggagcttgtaattaataggaggtttagaggctaaagtggggtgtatctattgtggttagtttcaagatttaatgattaattggaacatatgcttgaatcattaatggatcattcttgggttaagctttattcctggtaatctgttgatgttacttgaatgcgctgttgataatagaagatgctgtaaatttagtaagttcaataatctgtttcaaatcatgatgtgcatttggcaatcattgattagtgcagttgcaatctattttgggaatttaggatacgaaaggcaagaatagtaatagtagtgccagttatttaccttgcttatcgttataactcttttcaaaattagtgtaagtttgcataacttcttaaaattgatgctaatagacctaccactggctaaattagttgttaaagttgttctctttttttctctacagcccatgggaaagtaatgcttttaagtgtttgtaatggatgtgtagttgtagatcttccccttcatgttttgaaaagtcatggtgatgaacatattgttaattctttgtaatttcatgaagtgcttcttgtttactattgaggtgcagtaatgcttatagaaaaaatttgtgctgtttcttcagggaggcgatcgcaaattctcaatttttgtacactg

SEQ ID NO: 22810 - DNA, 975 bp, Glycine max
  Intron number 3 from transcript Glyma08g06960.1 (locus Gly ma08g06960) derived from phytozome v7.0 (chr-ID Gm08; pos 4987358 to 4988332)
gcttctcatcatcacggggaattcgagtacaataaacaccaaaaagatttacagacacgagagaatttaacttaaggcttatttataggtttcttctcactcacgtagtgcccaacatttttcatattatttttcctgtttgcatgtgctttacctgtttgctcttctgttctatacttttcattcatgccactgtagatgtattttaatttgagaaaaaagacaatgcaagtgtaaaataatttttcagtatcattcaatcaaatattatctttttatgattaattaaataataatataaaatgttaatgcatcatcgttaaattatttttaattttaaaggtaaaagtatgcatttttttccccacacaagacaggttttgttgttatttttttataagctgttttctgcttataaattaaagttatgatctgtttagtgataaagcactaaaacttatttataatttgttaaaacccaataaggttatgcttgataaagcttaagcttaaggttaaaaaaattaattttaaatataaagttaaaagatattaaactaaatttattgaattggaagtgcttcataaaattagttattaatcaattagttatttttggtgtacatataattaattagttaacaaatgtaaaatgacatagaaaaacatgtttatatgatttttatactttttttatttttagaaaaaaaaaatttaactaataataatttaaactattgtagttagttttaaactgatataactttttaagagataaaaaattcattaaaatttaaaataaatagtataatattaaaagcggaactttattgaaacaaagtgcttcagcttaaaagacaactttattgggttgtagcagacaacaatttcttctcagttgtcattttcaattttttcttgttaaattattatattttaattagagggtttgggaataatccatataaaggagaa

SEQ ID NO: 22811 - DNA, 594 bp, Glycine max
  Intron number 1 from transcript Glyma06g16990.1 (locus Gly ma06g16990) derived from phytozome v7.0 (chr-ID Gm06; pos 13353122 to 13353715 reverse strand)
caccacccaagtctccaactcagcctcgccattcggtaagttgcaacgctataacttgctttattggtctttatttatttatttcaattttggagtatgaatcaaggaagctgttgtttagattattttttttgagtcgtaacatcgagttcaattaataaaggcattgcttggatgatcacaaaatgagtcacctctatttagagtatttggagcatgttcagccaggaaaactatatgaaaaacttcaaatttatttctaatgtttttaatttcttgagtttttaaaagttttgacagaataaggctgtgtgaggttttctctaaagtcattagcataaataaattgtagaagatgacagcaactaactctcataaaagcagttagaatatttttaaagaagggattatcgtgaatcttgtaatcaaaatcggtttttgtgtctgttgatgattcactatattcaataagttggtattgattacatatcaattaaacaaaatcggaatctgtctttgattacaatttgtttcagttttccttttgtatgttatttggcttccggaaagatcattgcgaccggaagcgtgttt

SEQ ID NO: 22812 - DNA, 501 bp, Glycine max
  Intron number 1 from transcript Glyma06g04350.1 (locus Gly ma06g04350) derived from phytozome v7.0 (chr-ID Gm06; pos 3014590 to 3015090)
taagtaacatcaaataaataccaaaccttcctaaggtaaatctctctctcccttttctttcttcttcaattctcatcctttcatgttacctatttccatctttcattattattatttttttatatttatatttctcccttaggaaaattgtcttaactaggagccttagctcacgaatatcatcttggctagtactatattagggttcaaattcaaactatttcaatttaggaggatctcaactcaactcatgttatcattattattaggactgtttcatattaatactgtcaaagtttcaattaattttcacatgttcaaccacagaataggttaccaaaacaaatattaagtttaagacacaatccaactgtatcttactcacgtcagattgaacactttttttttttttttttgttaaactttgattattcttttaagctcagcataacttagctctactgtttcttcttttctttttttctttaggttttgaattgg

SEQ ID NO: 22813 - DNA, 723 bp, Glycine max
  Intron number 1 from transcript Glyma08g23060.1 (locus Gly ma08g23060) derived from phytozome v7.0 (chr-ID Gm08; pos 17562943 to 17563665 reverse strand)
ttgcactttcagccaccatacctggcttaaagaaggttagtagttaagtcatgtcacatactttacgatggaataatcatgtgttaatgtggtgacagtcaataatttttttttctttttcagtaatttttggtttctatatttaattattctagctagttagttaattcatctattattagttttttttttacaacgacgaaaataaatttggaatctaaaatcttatacatattatgtcaccctaaccctttatcactagacgatcctaacgagttcacctgttactagtttgatttgtcataacattaatggcattaacactgcataaaactgagttcagaattagattgcacattgttacaaattaaatgtttaaaaagtacagtacttaaaacgaatttatgcctaaaactgaattcagtgatattccacgtggagcgtcaattgtttgattcatgggatgttatgtaagacttgaagttcataattttaataagcgagatcttcaacaccatggacattaatttcattagaatgcaaacaaagaaatctaactatatatctacctgtggcttgtctatattttgaaaaaagaggaataaacaccaaattttggctttaaaatgatcattatacagtgcaatttaatctgtaactcaagaataaaatgttttatgaattctagattgacaaggccactatacttagtgaagcaatcac

SEQ ID NO: 22814 - DNA, 880 bp, Glycine max
  Intron number 1 from transcript Glyma07g06490.1 (locus Gly ma07g06490) derived from phytozome v7.0 (chr-ID Gm07; pos 5230455 to 5231334)
gattggtaagcttaacaaattgagcaatgttatatatatcctctcacaaatctctctactactttaaagtattaaatgaagaagtaaatgtatttaaggcatatttggataaccattctgaacgaacttttgagttttgggtgttgaatgtacttttagataatggtactttttgtatattctattctgaacatacttttgaaaagggtgtaagattatctaaacaatgttttgaaaatataaaaggcatgtaatactcattatacaaaggaaacaaaaaaattagtaagaagatgttgtacgagcatctataattatttaaacaaattttgtataagacttgtatcaagttttttgtattcttatcatggcaattaagttctcaaatcatacaataacataggatttctttcctaaaattccacaacaaattcttaacgggggttatttaaaaggtggcctaatggacaaggcttctatctagtaggatctggagagggtagttgtatgcagtcttaatttcacaagtggagaaactgcttttaagatttaaatctataacctgcatatcacaaggtagcaaccttattattgtgctgaggttcatcctccttaatgaaggttgtttgatgtttgaaaaaaaatccatatgtcaatatttaatttaagaatttgatagcaaaagtataaagaacttgatccatgttttgtccttatatgtcattcaatttgagttatggatagaaataactgtagattaccatgttttactcgatgataagtatggtaaaataaataaaaatatgttctggttcaccatttttaatcctgctttgttgtctctggttgaacagtttcttctttctatttctcgagaact

SEQ ID NO: 22815 - DNA, 538 bp, Glycine max
  Intron number 1 from transcript Glyma06g15240.1 (locus Gly ma06g15240) derived from phytozome v7.0 (chr-ID Gm06; pos 11979936 to 11980473 reverse strand)
ggagcgtcaacatcaggtatggtggcattaagttccttcacataggactcaatagttacatgcatcagagtatcatggtaaaccaaataaccttttccaaaaaacaaaatgtccttttctctgtcccctcaattcaaaaattatactttatccaaaaaaagaatcttaactatgagaaaacgttgccttttaactgtggataactctttaattagaagatgaaaaattattacatgatttaggatcatttgatctcagtcaatttttatgacacgttattaaaatttttaattaggtgttgttacacattattaattattttgtaaattaaaaacagtatatgaaaattgatcagaaccacataatctcggactatttagtaatttctttggaatgagatgggaaattaagcagggataggtgatttcaattctgtatcatgaacatcatgaatttaagtcggtgaaaattcaattttttttctttcctttccttgattactcacaattatgttattgcagacacgtatctgttggaa

SEQ ID NO: 22816 - DNA, 775 bp, Glycine max
  Intron number 2 from transcript Glyma07g31600.1 (locus Gly ma07g31600) derived from phytozome v7.0 (chr-ID Gm07; pos 36583952 to 36584726 reverse strand)
ctgtcagactgtcaacattgtattagaaggttacttatctttctgtttgctctgagtctctactttgcatttcaagatcagttttgtgcatttgatggggcaagtttggataaacaatttaattgtttatttcagcaaagcctatcgcatgaaaatgagatgaaagcttatgtcataagtgtgtgattcagtaagcttatacgagggtcataaataactttcataatcttaactgaataccttcaattttctacttaagtgcttatatgataagataaacctggtagaagctcttttaaacacccactttcatgagcaattttatgcttcacctgtgatatgtacttgtgtgctctaaagcttgtgttaataatcttgtgtatttgttaaaatttataatatttttctcaaagaaaattctggtcttcatagattggttgctggccaaacaccaatgaccaatcacatttggatttgatgattgtatcatgattcaagttttcgacttgagtttttggtatggttgtattttactatggtaaatctccatgactggtgatacattatgtactgacatcaaatccttcatattttgaagttttcagttttcacctatgaaattgtattctattttcttgaagttgccttactttcttgttcaaaatattacatatgatatatggcattatcttttttgtgtggtaagctatttatattaataatccattccttcattacagctgatcaggttgggcaagttaagtgtggcagttgt

SEQ ID NO: 22817 - DNA, 874 bp, Glycine max
  Intron number 1 from transcript Glyma08g16980.1 (locus Gly ma08g16980) derived from phytozome v7.0 (chr-ID Gm08; pos 12467746 to 12468619 reverse strand)
actgcagctattattgactctgtttccaaagacggtaaaatttttgtgtttctcttttacttatggcttctagatctaagagacgtgtaataagaatatggttttcttctgttttgcatgagtagtgactgaatgtttcttctgttctgttcagttttattcaaatcttatatatgcgctcaccatttcctgggttactccttagatgctaatttcagctttgatttcatgttcttgtttgattttattaatattttagtcaatgcatcgcaatgttgcttttaactattggcaatttcttttggaaaaaaactaatcaaattcaatttagggatacttagttaagaaaactaagtatacacctaggttttaaatatcagtcccagtcgcattttggtttcctgtttgttgatatcacggcaaatcgcggacaaatgtggcctatgcagtcccaattgtggttgtgttgtggtcgccgacagttaagaaaccttgatgttgcggcctaaatcacagtccacaactgttttttaaccttaagaaaaaggaaggtagtttaagatgatcaagagaggaattttagttagttgccaaggtagtgtgtgaaatgcacatccaaatgagagaagagaggatattgaaaatgtctagttgagaggactgagagccccactcttcaagttgtgtattttaatttataacacaatagttgagtagattatggtgaaatatgttagtttttaatagaaagaggaactttaaatgcagagttaaagcatacgtgcaagttctgctttattgaggtaattaaattgtggttctgaagctgagtagttagtttttctgatgtttgttttgttgttacctttcagca

SEQ ID NO: 22818 - DNA, 539 bp, Glycine max
  Intron number 3 from transcript Glyma07g29380.1 (locus Gly ma07g29380) derived from phytozome v7.0 (chr-ID Gm07; pos 34172770 to 34173308 reverse strand)
gcaggtaatattaatgaaatcatccaattaaattttaactaatcattcagtacttacaaatcatccaattagcttctcaaaaaccaaactcgctggaacatgcaagttctaagctatgtagtttagttttgtgctcgtgttttgatctatatccataaaattaaatatctcttcccaagagttagccgaatcccccacaagattaggagaaactaaaaaaaatgacctccataactttcaagattctcaagatccctactcctagttatcgattcaacaaagcctagaagccttagaagaatctgatgaaactagaatagaatctgatgaatctaaggaacaatttgaagaatctttgacagaagcagaaaaatcttattctgataaggaagaagaggtcatatacatggacatctcaaacattttgatggctcgctccacagaagaaccattctatgattctcctatagaagaaaaagaaccagtgatctcaaagggttcatcctccaagccgaatgcaggaccttggttcacccttg

SEQ ID NO: 22819 - DNA, 678 bp, Glycine max
  Intron number 3 from transcript Glyma06g42210.1 (locus Gly ma06g42210) derived from phytozome v7.0 (chr-ID Gm06; pos 45425421 to 45426098)
attgcagtaaggggtaccccggaagcaattttaaggtgatggtctgcacgctctgtagtttttgtttaactgcaattgtgtcatataggcactataaaaaaaatagtggaatgattgtgtaattgactagtctctatgcagcttccacgtagtgttaagcatcatgcatggacttacctttgtttagatcacatacttaacctgtagctgcaagtccacagctaattgcttggcatgctcatttcagatttctgagaagaaaaccaatttacttttggtgtttaattttcattgttcttagtgtaaacaagttttacagtaaagaaacactttattttgatccctgtgttccagtgtcattctgaatcctactgacattgttatacttggaggaaagcagtgaggaatttttaattattgttattgcaaattacaagatgtgtaacactatcctacatagataccatgcaaatatctttgttatgcttctctgctcatctgtaagcttgcattggcagtgttattttttttgtggtgggtgtgtgcgtgttctattttgtggattctgtttctccaatgatcatctgaaaattaaatccttttcattttccattttttgaatttaatttgagaatctatgcagggcaaagcttttcctacaagaggtcttgaaagttt

SEQ ID NO: 22820 - DNA, 484 bp, Glycine max
  Intron number 1 from transcript Glyma08g14490.1 (locus Gly ma08g14490) derived from phytozome v7.0 (chr-ID Gm08; pos 10523585 to 10524068 reverse strand)
gtgcaaaaaaccttttagctttagtttctatagtggtaagtctatttgttatggataattataatctgtgcttatcttcaatatttcaatgcacaattgctttatgtattcatgtatttaaggggtcaatgaccgactttgtgaggcatcattcatgaacatgtcatgtatacccactatgtagatgaaattaatcaaaatgattttttgtccaacctgtcattcattttttggacttacctgaagtttcatgtgaggcatacctttagtcagcagatacggttcttctgctggtatgcatcatcaggagggattgaactcttgtgtgttctgcatataatggaattttctaccagttggactgataaatgtgactgcagttgaaaatatttatgtttttttcccttttcattatatgattggatacgaggattttcttctttaaatagtgtagttggcttccccaagagaactttataaagct

SEQ ID NO: 22821 - DNA, 618 bp, Glycine max
  Intron number 2 from transcript Glyma08g08290.1 (locus Gly ma08g08290) derived from phytozome v7.0 (chr-ID Gm08; pos 5950739 to 5951356)
gcactgtagccccaggctgccctgttaggaaacaggtattatatttccacttctctttttttccttttctagagtttaagaggttctgaaatttttacactatacccggttgttttgatgttagaaaattagtactcgcacttttcaataaaaacacacattctaatgtattttttatttattaaaatttaatttatccatatgtcctaattatgtttaactattcaaaattatgtttatccatatgatatattatgcgggtttattttgagcattgctatagaatataaaaaagttataaattcatggcaaatgtttgtgcatgtatttcacttggctaaataataattcatagaacaaaataaaaataaggaactagatagaaatctagccatatcctttatattgtttttgtgggaaaaaaaaatactatttaataaaaaaattattgaaaaattaattattaattttttattagtgaaagattcaaaatcaccacatcttccttcctctctcctcccttgagcgttataactcgactttataactcctatctaataatctccttactttttactagttcttatatttatgatatttatatgtataggtgcaaag

SEQ ID NO: 22822 - DNA, 686 bp, Glycine max
  Intron number 1 from transcript Glyma06g00450.1 (locus Gly ma06g00450) derived from phytozome v7.0 (chr-ID Gm06; pos 205911 to 206596 reverse strand)
gatttcctacgagtgtctcaccgctctcaaaggtaactccttccttctcttctttttttattttagggtttccattctctactctctctttctcgctaactattttgattttaggactagtttcttccctgtgccttcactatttgttctagataccaagctatatgacatatagactttttcttttcaacccctgtcagatctttttactctatactgtatccccctttcatttcttcttctatttatacataagtaaaagggaggacacctttttttctctgcaaacccccaatttacccgaaaacatgtattttctcaaccatatcacggattgcatactatagtttttctttgtactgaatggggggatttctttgctcaactattaaagcattgcttgttgatcatacattctcataacttagtgttctccttgttctgtaaacattttttttgtccccattgtaaacagttctgaaatattcaatttcatttttctgctgactgattttcagggaacaagcttaattgaaattctcatgtcgaatttgggtctaaaagcctattttcccaccttcttcagttttcactattattttactcacgcatcatcttatttctgtggtctactttaccatgtttggttgtaacaatgtatgttgtcttgtgggtgcagatttgga

SEQ ID NO: 22823 - DNA, 792 bp, Glycine max
  Intron number 2 from transcript Glyma06g38160.1 (locus Gly ma06g38160) derived from phytozome v7.0 (chr-ID Gm06; pos 40990972 to 40991763 reverse strand)
aatctgacttcagctctccctcatcgacttgcaaagtaactactgcaacataaattttgctttattattcataattttccattttatagtttttacatatttctgaggatattaattcaattcagtataggacttctggagaaatgtgactaacctaccttttaacataatctgttcaccatgttcttcattatcatgtgaatgccacataaacacaccctttgatataattttttatgattttaacatattctttattagcctacgaacttcatgtaagtattattgataatcttattatataattttttatgattttaacatattttttattatcgtacgaacttcatataagtattattgaaaatcttattctttactattattgtgtgaatttcatataactcttcttattactcaatttatgtactgatgttttggaagaaaaaaaaatgtgtttatggaattcttcctaatttgattacatttcacataaattttcttttcccttctgttttaattttcttggactctgcatgatgtcattgtttctcatgcataatgtccctaatttgattacattttcatatacttagtcaagccacattcttcctaatttccttttattacatttgattactctgcatgatctctattaatcacattcttcctaatttgattacatttcacatacttagtcaagccacaagcacaaatgcacaatctaatttcttttttttaccatctctttgatcagagggaattccaacaaaaatttggccctttgagggt

SEQ ID NO: 22824 - DNA, 574 bp, Glycine max
  Intron number 2 from transcript Glyma07g37700.1 (locus Gly ma07g37700) derived from phytozome v7.0 (chr-ID Gm07; pos 42682186 to 42682759)
ccacttctgctctctctggcttcgttcgagcacaggtttaccatttttcaaatacattacttattgcattatggtttactattatttagagtattggcaacttagagcttccaatgacagcacacattgccttttgtggttagtgaattatcatgttttaaaataagcacctggtagtatctctatgttgcataactgcattagcattgttgattaccgatggttatcctttaaaataacttaattaccgtaggtggggttgggggttgtgtggagcgtttgggtttaattcttctctggttgtgtagttataccattctattcacctctttttactctctttttttgacgggggatgaagctatgatacagtgatatgattaacacttgaaagtggagcagattcaggtttctggtagtttgtttgtttttgcatgcatgctggaaatttagatttaattgttatacactttgattgctgtgggacatagatgttttcaaggacacgcttttatatagtttactcacgatttctatttttacctaatgattttatgttttccttttcagggtg

SEQ ID NO: 22825 - DNA, 531 bp, Glycine max
  Intron number 2 from transcript Glyma06g15910.1 (locus Gly ma06g15910) derived from phytozome v7.0 (chr-ID Gm06; pos 12507550 to 12508080)
tttaggtatgcagtcttcaactttatggcttctgtaataatttcattctctcttttgttggaatatattgattgtcttaccaaagggggatggttgtggcagatgccatgtgactggctttttaccattcaatgtttcatctgctactagttctatagatgctaatcttttctcatgtgtaatgtttgcctttttttaataattgtctaatgctaggtatgaaaatacattgatttaaaaataatattttgcggaatgtgcttagagagattccatctatgtgagtaatgtgtgtaatcatgaaatggaaacattttgattatatttagaggagaattattcttttttgggagcatggagttctaaagttaaactaactttttatcgtcaaacatgtgatcttgacatttattatctgtgccggtgtcaatatatggactgaaattacaaaagagcagtttgttactctctcttgcttgcttgcaatactttacttatccatttgttttatgtgcagtttgaaatacatta

SEQ ID NO: 22826 - DNA, 495 bp, Glycine max
  Intron number 1 from transcript Glyma05g24420.1 (locus Gly ma05g24420) derived from phytozome v7.0 (chr-ID Gm05; pos 30609474 to 30609968)
gtgccgcttatacgttggtctccttcgttgccctggttggtgttttttctttcattttcatggaaaatcatgagtcttgagaaaaatgaagaagtttttccattatggccttagatatgcattgtttgtttttgaatcactttatctgttttggttttgttctgaacttatatatactacacaattgacaccaccccatcacatcaaatcccaataaggtttgaactttaaccactgaccagattttgatgatccaacactgatgtttctctatcagggttattccttagcagcccctatgaatcagtgtagcttggaaaacatgggcttttcttgcaaaatgtgaagtgttgtcttttgcagctagagatatgaattttgtgaggaatttggtagaaatatgtgcttatgggtgtttgtttccaagccagattttctcaaatgaatcaataatcataatttgtttattatcaggtgcaactggtgcgaattcaa

SEQ ID NO: 22827 - DNA, 433 bp, Glycine max
  Intron number 1 from transcript Glyma08g07540.1 (locus Gly ma08g07540) derived from phytozome v7.0 (chr-ID Gm08; pos 5396512 to 5396944)
ctttagcaggtaattactgattaatagctagtttactgaaatttatgtaccacctttgcatgagtatgactaagtgtatgagtctaacagtaggtgtctaataactagctttataattaccattcttttcattcttcatgtattgtatagacacttcacttttcaactgaagcatattttgtacaagcatgttagttttttttaaggaaacctttgtaaattctatttggacgtaaatgaaattaatctagactcagtttaatacatgatagaaaaaaaaaagtataggagttttacattgatggccgtagtacagtataatcagaagcagtttctttttgtttgctggaagctatttattttataacagttatgatcatataattcaaacgatgcaggaagattgacatcaaacataaagcaaacagggaag

SEQ ID NO: 22828 - DNA, 1049 bp, Glycine max
  Intron number 1 from transcript Glyma05g31940.2 (locus Gly ma05g31940) derived from phytozome v7.0 (chr-ID Gm05; pos 36968798 to 36969846 reverse strand)
gtcaaacaaacaaagagagaagaagaagaagcaaagtacaaaaccaccgaactctgctctttgtagtttttctatctttatataaacttgtcttctctcataacctcccctcactttttcttcctctttctcttctcaccacctacgtcgtttcgcgtgagtaccagcttttcctttgggcaattctcgtcttcggtgattcctatggtttcttcattgaattcggtttagcgtgactttttcttcaagttattattattattattattattatttcatttttggtgttaattgccgttgatattattgtgtgttgggaattattgcagtttcatgattctgttcctcggaattggactgtattgcgatttgctatgaatagaaaggagtaatggatctaatgagaattttgctattctgctttgatttcattttttactactattatttggtttctttgtctctgtgtgtgtgtggctgtgtgtttttagttactacttgaattctgtgttttaagtttgagaatgttggattttatggcaaactgagcttcaaggttcattcccggtccttgtaatctacatcagctctctctctctgttggttttatacctagaatcaattgttttgttcatagacttggtctgacactactcaaaaatcaatttctcgttcaaattctttgaagttttgaaaattatttcggaaataagtgtttttaagaaccaaaaaacaggagcaactgggaaatattttctcatcttcttctttgagtgttctgtttaagtgtgcagaagcgacagatttttagaaaacacaaatgtgctcatggaacaaacaatttcaaatacgccaaggacacaaacaaattttagaaaatagataactgtttttgaaaataataaacaaagccagcctaaaattagacatggtttcgccttttctttattttatttttaaatagaatcagtatgggagtttaacttctttcgttgcaatctgtgctgcttttgatgacatgtgttcgcatgcagataaagccattgaac

SEQ ID NO: 22829 - DNA, 623 bp, Glycine max
  Intron number 2 from transcript Glyma07g32080.1 (locus Gly ma07g32080) derived from phytozome v7.0 (chr-ID Gm07; pos 36991944 to 36992566)
ctgagcttttgtttcttaagttgccttcttccaatgtaagtttgtctttatgcatatggtttggttatttcttttgaactgaatcccaactacatgaaaaaaaaaatacaaaggattgatttcattatcatcatcatcatcacagaagtgaaaaaaaatcaagtgtgatatcaagcaaagttaaaaatgaaaattagttcttgtttgggcatcccttttcgttgttgacttcagtcacggcatcacacagttaaacttctttttcatctagcctcaactactaagcatattttttcttgtgttacattctgtttgggggttaaaaattgccataaacatttcatgttagtttttcttgtgttagatatcatcaatgagtgtggataactactttcctgcataatgcctcttccaattttcttatgtttattcccctcttaccattataggataatataattattttgaggtttcattctatttaaatgagctggtatctgtattgcagggtttccttccatataggatttagatggtggaagagcctctgcttgatattatgttaatcattgtctttattgtcttactatatgatgttggccaggattttttatctgacatac

SEQ ID NO: 22830 - DNA, 1022 bp, Glycine max
  Intron number 1 from transcript Glyma08g04560.1 (locus Gly ma08g04560) derived from phytozome v7.0 (chr-ID Gm08; pos 3245729 to 3246750)
agatccaggagacattctatctattcccattgcaggttggttggtatatatcaatatcactccagttgttattagtacgtcttctacacatgtacattctattttgtatttttagaaaaaagttttcaggaccactctcacgtgctttcaaatttattgaaaattattaattttggtatgtcatatttattattaatgattttatttcttaatttaaatatgagattcactaaaattaatcatttttaacaaattttaaccaaatcacaaagagtattgaaaaaacacttttagagaaaatattatttgcattcttttattttttatcactcatttcatttcaaaataagtgttatatttaaaaaaaatattcaaaataaatgttggatttaaatttttaatataatattattttttatattaatatttctaataaattatacttattttgagatagataaagtattagttaaaatttattaaaaaaaattaaaacgtacttgattttttctcttcaataataataaggaaaatgtaaaaaaatgttatgtaaatataacactttttatataattgaagatgaaaataaatcacacacgagtaagtacaaacttttcactggctactacttcagagttcagaaacagagaaagagacaagaaagaaagaaataaatccctgaaaaaaaaattgttagtgcggacaaactgctctattaaatttggatgtgggttagtccatatgttacagcctcaactttttttatccaagcagtaaatatggataataaatcgtgtaaaacataaataacaactaataatacgaagaaaataagggaaattccgtgaagtgtgttaatttgttatctctcttttatttatgttagcttcttttcaataaaggtccatatagggctttccctgctaataatattattttcataagataaaatgattggtcagatacataattaattactgcattgacataatattctgtagaattgtaccgtcctttgcagc

SEQ ID NO: 22831 - DNA, 259 bp, Glycine max
  Intron number 4 from transcript Glyma05g27850.1 (locus Gly ma05g27850) derived from phytozome v7.0 (chr-ID Gm05; pos 33714046 to 33714304 reverse strand)
actggacaggtgaacatttttgttatgtgctatttactgtatacttttctactccacaatgtaaatcttagtatgtcttttgattataacttatttaggggaaatagccccttttctgttttgaagtttcccgagagagatttcctgtttctgtgcgtataagtatttgttttccagaactaacctgtatcctaaatccctcggtttctgatatgatgcaatgcaatgattgaacatctttcaatgatcttcatgtagg

SEQ ID NO: 22832 - DNA, 439 bp, Glycine max
  Intron number 1 from transcript Glyma05g36290.2 (locus Gly ma05g36290) derived from phytozome v7.0 (chr-ID Gm05; pos 40142562 to 40143000)
tggtctcttagctcgagcccaagagaggaagaaaggtatatccacactttttcttcaggaagataatagtagttattacgtttctttgtagtttcaatctataatatatgtctgtacaaaataagcagtcccccccccccccccccccccttccccattatttttagatattatatgaatttgttgatatatgatttgaaattattaatacaagaaattatatatgcactagctagtatcttttatcctgactttttggaaaatctttgattattattgttgaagtacttttccttcattcctatctagtaactaccatttcattatatgtatatatataatctaacattgttgttatgcattttttttaatgcaaacttaattatcaggagtgccatggacagaagaggaacacagaatattccttgttggacttgag

SEQ ID NO: 22833 - DNA, 611 bp, Glycine max
  Intron number 3 from transcript Glyma07g01190.1 (locus Gly ma07g01190) derived from phytozome v7.0 (chr-ID Gm07; pos 718757 to 719367 reverse strand)
ggtggccaaggctaccaacactgctgctggaggtgattacttttctttcaaacccaaaccttttatgttgaaagtatactaccattgttcataaggattttgattttctttgatagcattacttcagtataagtccctctaaatgcttctttttgggaccctggaactagaatagggatttatttcgatctcagggtaattaatgaatacttgtttataaaatagtcactgactagtaatccctgaggatggtccttcttaaaacagatttggtatgcaacttgctttagtgatgttaaattacttattaaacaaacgagaaaaacatataacaaacaaagaagatcatgtccaatgatggctatcactctttcattaaatttcttaaattaacattttctaatattataatttaaaagatgtttgaaaatattaaaataatctcctctgaaaatttccaccctatttcatgtaaggtggaaaacatagagacgaacacagttatatttgcctttatctattcccttttaatactcattcatatcttacaagtcaatgtttcttctctgattccaggtacaacttgtgcaactgttttgactcaggcaata

SEQ ID NO: 22834 - DNA, 427 bp, Glycine max
  Intron number 2 from transcript Glyma06g24600.1 (locus Gly ma06g24600) derived from phytozome v7.0 (chr-ID Gm06; pos 22162873 to 22163299 reverse strand)
gaggaaattaccttgccagagaaaggttagaactattaggacctgttaagtttgtttgatagaacatttttttgtctccggttcttgtgtccattaatgatttcaaaaatgacatttgttttacattgttgttttttaaggatttgttggggaagaaacaacagttttggtgttttcatgattttctttacaaatctttgaaaacaataaagtaaaaaagaagatgatttttttttttgtaactattggttaaaataggaaacggaaaatgatttcttaaactaaacaagcaccttgctttctgtgttttgtgactaatttaaaattgtttgattttttccctctctatctaaattatgctttgtcaaatatcattgtgattgattggcttaaatgttgttgacttgttgtataacttttgcagttg

SEQ ID NO: 22835 - DNA, 874 bp, Glycine max
  Intron number 1 from transcript Glyma05g25670.1 (locus Gly ma05g25670) derived from phytozome v7.0 (chr-ID Gm05; pos 31717918 to 31718791 reverse strand)
cagagcaatctgcagcagagattgctatagagaaggtatcactcagttccaatcattgtgtaaattattaattcttattatgtcatcattctgtttatggttgttgtgaacttgtgatatggacagcatttaattttcttcagtcacaattatgttgaatctagctacagccttatctcacctgccttttgaatttttttatcaatttgttctaacaagtgttatctcacatgccttatgaatggctattaatgattatatttagttttagtcctactttgaagacgatcatggtcaagtgggtaggatgggtttgttttcttgcatttgagaatgtcaatgccagacactctggtattgccacttatgtgaatattactcttttgtgtcttctaggatagctaaggaagtattttcagtaataatcatgcttgtgtaatgtgttattcatttaaccggaagtctggaacttaaattgccggaattttttatggatgttttttttttggccatttccctgtattggaggggattttttatgtgggcttgatcgtatttatccggactcattgtctcattgtttcaaacatatatataatctctcaaaaatgttatggataggcatataatttttttttctgatattgattctactgctacaatttgttttatatgtatgcatcctatttcaatggtaatgtgatgttttcttataaattttttctgctacataggaactggctttatattgttatatcttttattcaagtgtttattgtcttgaggattatgacattttaactttcaccgtgatacaactattaattagtctcctgcagcttggcatttgtacagaggccattgatcccactcc

SEQ ID NO: 22836 - DNA, 838 bp, Glycine max
  Intron number 2 from transcript Glyma07g02590.1 (locus Gly ma07g02590) derived from phytozome v7.0 (chr-ID Gm07; pos 1745743 to 1746580 reverse strand)
tatatcttggggctcagagtctcccctcgacacaggttctattccactctgctcatgttattggtttgcttccttccatctgtttctgcactgcacatttcattggtcctttggatgttaatgtgcatgcgtttcagatacataccaaaagcacaagagtcttattcagttttcctccatcgtattccgcaaaagcaaaagtcatttcagaagctgtttttgcttctgttctgtttgccattggcaactcctctttctttcctattccatccctttctccacaagttgttgtgtgctttcttggttctaatctcatttggacctcataaaataagggaaacggaaaaaattagataaaaaaaaagaagcggtggaggattagattctaagaaaaagagaaggcaatgttcctcgtatcatggaaaggtgaaaaaagtatggttaagctagcctgtcattgacacatatatgatgtatccactaagcctactttaataagaaactgcaattggattggatatgatgtcttattcttattttcaaccagcctcactgaatttcgtacgaagttcttcatctgtagacacctaggtccacacaaaccttactcttctattcagttcaaatattcctcaggatccacctgtagtgcccttcccttcattttaatttccatttgattacttttaattatatatctatttctagataaaaaaaaaacctagaccgaaaagcattagctataaatgttttgatacttgatcaggcaacaataagtaaaaaacttatcttggcatatgcaggagatttggcattggcacaaaactagttgaacatt

SEQ ID NO: 22837 - DNA, 469 bp, Glycine max
  Intron number 1 from transcript Glyma07g07140.1 (locus Gly ma07g07140) derived from phytozome v7.0 (chr-ID Gm07; pos 5803459 to 5803927 reverse strand)
tcggcccgagggaggtattattgctttatattcatttggttaaaagttagggaactgggattttgccttgtgtttctcttcaatcctccaaatttctaaatcaaagaagacattttcttcaattatcatgttagaatcacgcacttaaaagcttgagcatggatatgtattgggaaacaaatagtagttgtaagtttatgccaataaaaaagatacatttaagggataaaaatgattattttgtggcagaaagttcagatacattggattcaaaacatttttgtgacttgcacttatgacatgtatgtatgtatgtaaagttgtagatttgcaagacctttcctttaaagaatactttggtactggtatgaaatttcgttgtttgatgaattaaaacttgctttgttcttactttttttttcttccttgttcagatatttagcatattaaagcacgcattaacctccaa

SEQ ID NO: 22838 - DNA, 816 bp, Glycine max
  Intron number 3 from transcript Glyma07g01040.1 (locus Gly ma07g01040) derived from phytozome v7.0 (chr-ID Gm07; pos 608037 to 608852)
ccattcgaatccaagcagtgtttcgaggtttcttggttagtggaactctttcctacttggttaatttaattcaaccttttgcattatcgtgatgcagcttgttttctcctcaaggatttatttatttttttagttgttatgagtttctggtgttgaattgtttgagaagcagaagcagatactccattctatacttaagacagggaattctggatagaagaattagtgctagcctgctaggcaagattccatgtttaatttaagatcaggacctcctaatcatactatcacagtatggacttttatagaagatttacaaataggttgcatggtgcttttgttttgttaatttcacaattttgaaacgagccaaatcgtggtgaaacttcaactcttcaagcagttagtattactaaagataagcttttgctatgagttatgaagttcactacttcactttgacttgctatggtttgtatgtaatttagtgttcaatcaataatagttcactatgataatgtaatttagtgtttaattcataataggagtgttggacatcaacctgcaatgtttattgttttctaaaattctctagccctgtgtagatgggggttgattacagaaggatctgccactcttttggtcgttcattctgttgtgttgggggtttcctattagtatacttaaaagtatgtcccgtgtgttattgtgcttgcacattttttgtcaagttttttctccatttatttgtttcttttgaacttttgttattgatttgcaggcaagacgagctttgagggccctgaaggcagtggt

SEQ ID NO: 22839 - DNA, 894 bp, Glycine max
  Intron number 1 from transcript Glyma08g18130.1 (locus Gly ma08g18130) derived from phytozome v7.0 (chr-ID Gm08; pos 13609112 to 13610005 reverse strand)
cagtacgacgctctttcactcgccaatcaggtttttctttctttcaatttctataatttccttcagtaatttaattttagcttaattttatttgattatcccttttttatgtcggaattcacgtgagcgttttgagttagttgtaagtttgccaggacatgcatcatgacaaaagtagtagtagttagaggcttttgaataattcttctgtttctagttttggtttgagaaaagttgtaaatggtgatgttttttttttttttttttttttttttttttttttaatgtttgggagtaggatcataccgaaattatgatgtctgggattctgcactgggtgtaatagatgttctatttttatgagcatgattcttgaattttaatgcagacttgatcaggttatgtatttcaagtttttgtgtaatcaattgagagctcttgacctggtagttgttgctgttagatgtttctgagatccagttgatgctcatgatttcatttttttttccttttctttttctggtaatttaatgtttggaaagtgcatgatgttgttacatatggtcatgacttgagtattaatttaatcacagtggctaactggttatttgttttcaggaaccttgatggtattgtcatgcagtattgaattatgttgttaaatatatgcgtacaatattgtttggaatttcgatttcctcaactgggaataaatggccgttctttcccgtgtaggcatgatcattaggtattttgcacatttaatcatgattcatgagctccttgtaatgtttaagcatttcaatttgttttttatttgtgctactgttcattgatcctactggctcttctatgtggcattgcaggcttccttggaggttgacattgttgcat

SEQ ID NO: 22840 - DNA, 961 bp, Glycine max
  Intron number 1 from transcript Glyma08g07960.1 (locus Gly ma08g07960) derived from phytozome v7.0 (chr-ID Gm08; pos 5706469 to 5707429)
atatctcaacaaacgtcgccaccgccgagaggtaacagtttcacatcttcctttattttcccactttcaatttcaattcatttcaaattcctttattgtcacaagtttatgagctgcccaggttaaaaagatttcatttttcactcttgcttgcactgaatatcgctcacattcagaggaaatatattacaatggaatttcatatgataattttcaattagggttagcacacagagacaaccctgaccgtggttaaatcaaagtttgcagcttgggaaattggtgtcttgtttgtgcaagtttcttttaattactattgggcttgatcccttgttttgttttttatatgttgaagatttttttctatcggcaaatgttaatttattagttttgttagtagggggtcaaacctgcgacctttaagggtgtgtttgatttatatttgagaaaactgtttttagttttcaaaatgtaactaaacaaggttgttcagacaaactggtggagggcggtgcaaggtacaaagcagagtgtggaattgaggaagaggttaaacaagacgaaaacagaagaaaaagatgagaaaacatttctcagctgtttctgttttttggtttttaaaacatgttttgtaaacaatatttggatgaaaaattaattactgagtggtgtggaattgttttagaaaacaatttttaaaaccaaaaggtgagaagggaatcaagcaggccctaattcagttgtgctctggattctgtttctgcttctaactgaagctctttgagcttcaccttttcttccctaattactggttcacctttactttcctaattactggttaagtatacaagagataatttgtagattaatcaatgtaagaaatgaaatttctatgcatgttatgtgatgctttgattcttgtgcaggctagttagagctgcacataaacagggtgcgaaca

SEQ ID NO: 22841 - DNA, 523 bp, Glycine max
  Intron number 2 from transcript Glyma08g05320.1 (locus Gly ma08g05320) derived from phytozome v7.0 (chr-ID Gm08; pos 3778594 to 3779116 reverse strand)
tcaaaattaaggctcaggaattgaagggtaaagaggtgagttattacttctgtatatttatggtataataccaggggtttttgtttctctctctttgcttcgattgttcctatttcttccgttttcttgttattctaagactcccatacaaattgagttttaaaagggtaaataaattgatacttttgtccaaaggaaaatgtggagattgttaatctccaccaaaaggggaggaggttagcaatctaatatgtatgtatgcgacagaaaaagtgttataattaatgaagaatccttcaaaaaacaagagaaaatgatgatatcagaaaaaacaacagagaagctaagaatgcagtcatcaaggctgcccaatctctttgcacgctgatgacagctatatttatagtcatgcactcttgaacaatcatggcagaaaatttaaattcaattcttgtatgtatttgattcatttgtgccgttgatttcaggtcagagttaatacccgaattctctatcagcaaac

SEQ ID NO: 22842 - DNA, 589 bp, Glycine max
  Intron number 1 from transcript Glyma06g01340.1 (locus Gly ma06g01340) derived from phytozome v7.0 (chr-ID Gm06; pos 848672 to 849260 reverse strand)
gtataaccaacagaaacacagcatccgtaagtttgaaacagagaaagagacgggaaacaatgtgcatgaacaaacttgggtttgacttcacttgtcgtgatctgttttaaacaagtacacgtgtattgtgtctttatactcttgcaagttgcaaagaatgatttaagctaaattttatatgggaacggggtgatgtgatgcgattcttgttcctccaagacaggcactgcagtcgttgttttagtcttaatacagcagtccacacgtgcagatgagttgaatttaaggttaaaacacgttttaggtccatttgcattggaaatgtcataatcatgcaagtgagagagcaagttgagacaaaatactgagttggatagtttccttgggagagacactattctaacatttatgaaattatgtctagatccaaatctcgattagttagcctcattggtatttgtttaggaggagattcattatgtctccaaaagccatagtatatattgacaagagaccattggcagatccatagactcaattctacattcaaaatcaagtcttctcttctcttttcttctcttaaggaaaa

SEQ ID NO: 22843 - DNA, 1035 bp, Glycine max
  Intron number 1 from transcript Glyma08g40110.1 (locus Gly ma08g40110) derived from phytozome v7.0 (chr-ID Gm08; pos 39809134 to 39810168)
cgaagagatcctcctcgaacgccccaagcctcttggttctctctctctctctctcttttattcgtttttttcctttaatttaggtttttcggttattgctaggatttgtttcataattggtttttgaaaggcgcgtgcttgattgattgggtttgcttgtttgattgattggttatgtttttttgtgcctgtggactgtgataatgtctgtgatgaatgctatttacttgtgttattggaaaatgcaaaaactgtaattggaatgaatggtttggtttctttttgtttttgaatctggggaatcttcggaatttagaaatacattacataatatgggactgtttgttgaattgtttttggcctttcaatttggttttgtgataccgatatttgcatgaatttgctttgctttggagaataagggtttgccttatttctattttttttttttttagttttttgaatgtaactatacaagattgctcagacacccggtggagggtgatggaagaaacagacgaatttagaattgatggagactgtataaagaattgaggaagatgttgaacaagatgaaaaatatctcagttgtttctgtttttttttaatgtttgttttggaaacaacattcgaaatttaatagatttttggatgataaattgatttttgagtagtggacaccaatctcttggttaacaccaagagagggggggagagagaattgtagtggtataataggtgatatgtgatagagagagagagaaattcagatagagaaaaataataggtgttaatggagtgtgtgatatgtaaaggtggcctaaattactgtattttttttaaatgaactctctggttatgcattaaagtgaagataaacttgaggtcaatttatatagtataggtaccttcatatccttttgagtaattgcaggattgttatagtggaggataataggattggtctatcatcagtatgtaatagctctatgattctgtgattgttaataggtgccaagacagaggagccaaaga

SEQ ID NO: 22844 - DNA, 857 bp, Glycine max
  Intron number 1 from transcript Glyma06g20460.1 (locus Gly ma06g20460) derived from phytozome v7.0 (chr-ID Gm06; pos 16901225 to 16902081)
tttggaattaattcgcttctctttaatctaaattcgtaagcttttcttctctgtctttgctttttttcttctaattttttaggtggggatgtgggttaattcatgtgtttttttttttttggcttttgagttttattttgttgggttctttttttcagtcttggaactggaaaaggggaaaagggtatatggggttgctgccaatttaaattagaagtgatcttctttactttcttttcaattttttattatttaattttcttatgttgatttgttggagggtgagaaactttgtgctttgaatttgggcatgcacgctgtcatcttgattctggttttatttttatttttttcaattcgattaattcttaaaattttaccctttttttcttagatttttatgccgattcgtctaatgagatctggttcttggatgtgttgttggaattttctttctggtgatcgtgtgtggttggatgttgtcaacgttttcttgttcatagtcttgtttctgatctgtgttcatgctctaaatttttgtgccaaatcatgatggaccaatagggtgtttgtgattcagtatacactttcaattaatgggtgaagattgttaatctgtcatatttgtttgattatttgattgttgtgagatgtgcatgtcttgttaatggatattattctttgtggcacattgaaaattgatgtttgtggtttcagcttaaaattgtcttatggtttttggaagtatttttgtcatcggtatattggagttgtcctgcttattagttttaattttgatggatgaaaattgaaaaacaaaaatttttttggtaaccaggttgattctttccgttgac

SEQ ID NO: 22845 - DNA, 808 bp, Glycine max
  Intron number 1 from transcript Glyma07g33980.1 (locus Gly ma07g33980) derived from phytozome v7.0 (chr-ID Gm07; pos 38916519 to 38917326)
ccgtcgctagaaacttccgttcctattgctcctctgtgagtctctcgatccatctcaaacgacgtcgttttgttcggtttttttagtagttcagatctgtagttcaaccagctgaaactgttaaagtttgagttttttatttatttttttgcattcccaaaacggcatcttatagaaagaaaattgtttagttttaatcaagttcattatgaagttccattgttacttgtgagagtggatatttcgggaaattatatagttttttttataggattcgaattttttgtttagattggtgtgatgcgtgcaatcaaaccgctatttatggttatgtttttgaggagaaagtagaatacttcccatatatgttactcatatattgcttatgttcccattatgttgtttacaaatgggtttggatttagttgaagagtctagtctatcataattcatagcgggtcgaaccaatgctcaaattcctgtaaggagaggtgttcgcatttagagctcaaccatgtctcaatcaggattgcctcagaagaaggatatggatatatttagggaaaagaaaaaaaatgtttcattggctggaattgttctttttttggcattttgtgtgttgttctttctgattatcttggtaaatatttgtgtctttacaatgtgttctttaaatagggagaagaatttgcacttcttgaattattttaagttggaatcttacgagggttgaatttctgtgggcatgtatatgtgtaaaaaggatgtctgtgtacatctctgaaatttgatatatcttgatttaagg

SEQ ID NO: 22846 - DNA, 858 bp, Glycine max
  Intron number 1 from transcript Glyma08g16580.1 (locus Gly ma08g16580) derived from phytozome v7.0 (chr-ID Gm08; pos 12151376 to 12152233)
ggacattggtgggtgccatctaagctttttgatatgtaagtttcccttcctttccacgttttgatgttaagccacttcctagtacagttgattctaattctgtgagtgagagccaagggtagtttcaggttggactgagacacgtaccacattatgtccacattctattttcaaagagaacatagatatgcatatatcccatcttggcatctatcttaaatatgtgtagttgctcctgaatcctctttttatgcaatttttactttttaaaattacattcaagagtacttccctttgtgaacagaaaactgtcatagttaaaatcatgcacaattggttaatattgcaactatcttccctgagaatgagggatgtgcatagcctcatttgaatgttcctaactgtcaggataagctatctgtcagctttcctgttggatgggaattgcatctggctactttttctgagcatatttttctataaattgaatataacttaccggcagcaaatgttctattagcagaaacgtgtttattagcataactagtttgccaaatcagcaaatccttctagactctcccattttgcccttttttttgtctcttctggcttatacctatcagattctaggcctttgatctgattcattaagcaattgaccttgattttccccatcagccctaacaaattcattattcattaaatattcattcaattgctttttaaatttatatttgttaggaataatctgtgccttcagattttgaaatctgttttttttttttgttcctgtgtaaaatgctcctcttctttctttcaacaggggctgctatttccaggttggaagctctctgaaac

SEQ ID NO: 22847 - DNA, 716 bp, Glycine max
  Intron number 1 from transcript Glyma07g13780.1 (locus Gly ma07g13780) derived from phytozome v7.0 (chr-ID Gm07; pos 12818547 to 12819262)
ctgtagttcttgaccacttcgaaaaggctcttcaggtcaatgaccaatatatacactttttattttattttatctgaagcattaattactcgcacaagacacacgtatttataaattaaaatacgtttatgagtgccttaattgtcctagctcattagtatttttcatgttgatgaattctcgaggttcatgttttatgtggtaatcctcttttccttttttttttactctactaaaatgaacaaaagtacataaaacatacattttcaagttttggtgatgatattaggagatcatatttcagcaaattcatgaattattatgtacatacacgtaatattagtactgttagtttttttcattaatcagttatataacttataatacctagcttctatagtgagtgggagtcgaatgccactctttcgtggtggaaacaaaattttaagtttgaagattttactatctataagatctttcaacgcataaaggtttaatatgcttgcttatcgaattagtttctttaaatgaaagaataattaatatgaaattcatttggtacaactctttcactatatgatgattttagttttcatgcttcacaaatgttacattgcatacttttgctcacagtaatgatactcaacgagcaatatccctcgaagaaaatatatattacataagttttaacaattttgtttgtttgagttgcaggc

SEQ ID NO: 22848 - DNA, 707 bp, Glycine max
  Intron number 1 from transcript Glyma06g44640.1 (locus Gly ma06g44640) derived from phytozome v7.0 (chr-ID Gm06; pos 47507185 to 47507891 reverse strand)
tcctccccatcaacccacgtttctcctctattgttctttctctcctccatgttatactacatttactcttgcatttagtaattagtagaagtccaccacaaaatccaattacggcatagttatgtttagtcgctcaaactaggatgtctttttattcctccaaataaaaatttatattttctattctctcaaataaaaaaaaccacataatgggtgtagttcaactgacaaacttaatgcatgttgagttttgaaaaaggacctaagtttgaccccacaaaatactatactcttaggaaaaaagaatgaagttttaagtgtgactaagtttctaccaaagattaatcttataattggttcaaataataaaatttgagatattttagaatataattggagaacctgaaactctaacaccagtgatattaaacaaaaaaaaattaattcttccataaaaatttgaaagactaaaaaatataattttttatttaaggacctaaaaaatgatttttttttttaatttcaaggactaaagatataattaaactttcaattgtttataaggttagtgaactcataaaagctttgtgacatgaactaaattagcaactctcacttcaaatttgaattaatgttcatcattctgaccttttgttttaattgttcaattcaatgcttgaccacagatcagagaccaagctggtaaa

SEQ ID NO: 22849 - DNA, 509 bp, Glycine max; identical to SEQ ID NO: 21755
  Intron number 1 from transcript Glyma07g07170.2 (locus Gly ma07g07170) derived from phytozome v7.0 (chr-ID Gm07; pos 5902242 to 5902750 reverse strand)

SEQ ID NO: 22850 - DNA, 825 bp, Glycine max
  Intron number 1 from transcript Glyma05g30230.1 (locus Gly ma05g30230) derived from phytozome v7.0 (chr-ID Gm05; pos 35657748 to 35658572 reverse strand)
aagtggtctggaactcccctgcttttggaagctgcgtatgtccttgttcttcctttttcaaacattttatgtgtttttgtaatgtggggtggtgttatttattagtcttgtttctaatgttttgttcaaattgtgttgaactatacgaatgcgtgcgtgtaaaggagtgtcaaatggggatattattgtcatgtgttttagttaggcatgacataatggactgtagtgtctaaaactagaatttccaactgaattttagtagtgtatgggggtgaggtggtggaattttgaagcattacgtgatcctttcctgattgttttgctttctgaagtcttttgtggttggaagagattgtttagatgacaaaaagattatcagattattaagtttgacacatggtgcacgtcttatgattcatataggaggatgttgttctagtggcacgtggagaaatcttgattgaagttcttagttcagaagcatgatctggaaatattcagctgaactggggaattagatttatctttacatcatgtggttagttatgacttatgaggatgagtgtgaaatactttagttgtgtcgttccctcttgttcttatgtacaacatatattgctgttttcaaccctgagttgaatcccttgttacttcatatgcagcactcgactgcagctcacactgtcttctacattatcatacactattctttttttttttaaattgtctacaatttttggccaattgtaaaatttctatgttgtaacttccatttattgtttggaaacagtgaattattatctaacgaaaaaaaggaccttttct

SEQ ID NO: 22851 - DNA, 553 bp, Glycine max
  Intron number 1 from transcript Glyma06g41830.1 (locus Gly ma06g41830) derived from phytozome v7.0 (chr-ID Gm06; pos 45109902 to 45110454)
acgctggcattttgttacccgagaaatcctccaaggtttactctcccaatccaattcattcatacccttttgaattcctccttttgggtcttcgattttcatctcaaagtttcatcttggcttgatttgttcaaatttacttattccatttgcactcctttttttaggggtatttaagttctccaattttctgtgtgtgatattgtgatatgatatcgtacccaggtgggtactaattaagccgatgcctgctgttcaattttttttcttttggattgtgatcctgtggttctttgtattgtagagtagttgtcttagtgtatttccaataacaattaaatttgatgattttgagttttgttggttgaaatggtcaaagtctttaccaagttaatgtttcagtttctttagactgataattgacaatttatcattgcaaatcatgcatattgtgttaaattcttgatttgttgaagtgcatttgctgagttgatgtatttttacatgtttttctttagctaaattccgaaaaagttattgctgttggccctgg

SEQ ID NO: 22852 - DNA, 772 bp, Glycine max
  Intron number 1 from transcript Glyma06g35090.1 (locus Gly ma06g35090) derived from phytozome v7.0 (chr-ID Gm06; pos 36919075 to 36919846)
tgtgcttgtaccactcccagggaaagtgcactaaggttgcagtttttttatgacccgtccactctctctttgtttctgtttctgggtaatctttgttctgtccaaatttcaagttttgaacgattctgggtatccctgttgctttgaatgccatgtgtttgatcaattgtttcaatggtaaagaatgaaatgattctgctgcgtaatgaactgccttatattgagagagagattatgtatcaggtgagagaagtgttttgagcaagagggtgagaggattacatatgaattatacaactatacatgaatgattaagattaaaagatatctaataattatatgaccatttaaaaaagtcatggctttgagatttaatcttaagcctttatgatttaatcttagtcattacattgttctgagtagcagggtttgatatgtgagccaggttttgtgggaagatagctagttaagtcatttacttgtagttttggaggagggtattgtaggatagaaattagcttcattctgttgtaagttacctcaaattggttctgtaatgatgacatggcaccaggatgattactgattaagggaatccaacccttgatgtttatcaactatataagaatattattagaagatgccaggtgaattgattggcatgagttctggaaaataagactttgaacttacaaactggaaagctattgatagttttatatgagaatgtaatatttgtagttttgttgttttcttttcttcaaatttgcag

SEQ ID NO: 22853 - DNA, 642 bp, Glycine max
  Intron number 3 from transcript Glyma07g12840.1 (locus Gly ma07g12840) derived from phytozome v7.0 (chr-ID Gm07; pos 11283605 to 11284246)
cctagagaaaaatccttcagttgtttttgtgttaggtaagcagttaatagattacattcaagttaaggatctccaacactccaaagtcatcttcgctctaacctgaaatctgcatgttttttaaaccctcaattctttcttcattgttaaacctgaatctgcagttaattgttttttaggttctttgcagaaaactggtttaccttctagacaagaaatttgacttattagtttggaagtacatcacaatttttactattcaacactataattttttattattgaactttaactttggaaaaggaaaatttgaaagaattaacatacagttgcaatacttgcatcctagaattccttttaacatgataaatgaaactaggaattttaatggcttgacattcatcccgattctgtctttttgtaaattgcttgcaatcactaatttaagggcttagttttcattgtttagcatataacacaccattttttttgttacgttctcttttcttttaaagtgtgaatttatttatccatttatgtctaatgtgttcattggaatttacagtagattttttctgacttctaagttggttgttgatctgataatgatataggtggcccaggaagtggaaagggtaccca

SEQ ID NO: 22854 - DNA, 804 bp, Glycine max
  Intron number 1 from transcript Glyma08g13970.1 (locus Gly ma08g13970) derived from phytozome v7.0 (chr-ID Gm08; pos 10165640 to 10166443)
tctctcccgtgtctcctacctccgctgtgttccaggtatttcacatccctaacgatttcggtttcttgattcggaaataaaacttcacggtttatatttaccctgcgtttatccctgatcctttttatttgtattatttggattctatagaatgttacattttctatgcgtcattgcactgtgccttttcgagtgttgcttaggctttagttatgcttattttttttggtttttcattctgattattctgagaatgtgcgctgacttgaggagaattaatggtttaagtgctatgagctgtaaagcttaatcattgttcattacctcaaagtatataatttgtgcacacaaaaaaggattacaaatttagatctagttactcaagagcttttagtgcaattctgaagaattgaagttttactctggtaacatttgctgatagacgatttaatgggtattaattttaagtatgtatttttatttagacttgggacgcggctacttataaagttcagcttctgtccatcatagaaaactgactcctattttccgtagtttaagttttaacattgcttagacagacgattatcgaaatgaacctaattttaattggagaaaaatactaaatacacatgtccgactcaatgaattactgtgttattgatgattgatggtggcatttctgcctggctggtttaattgttggattcaatcataaagtgggtcacactgatgaggttatttatcctttgttgattattttgttcaggtgatagtgggtggtgcagtattcgttggaggtgg

SEQ ID NO: 22855 - DNA, 233 bp, Glycine max
  Intron number 1 from transcript Glyma07g39040.1 (locus Gly ma07g39040) derived from phytozome v7.0 (chr-ID Gm07; pos 43638412 to 43638644)
ctggtatgctcatttacttattctattaattatctccgacgttagtttatttaattgaagctagccaaatgaatgttttgacggtattgtatcctagataatattgtttgaaaagtaaggtaaaaacttggtcttctctccaagtctaacttgatgtaagcaagattttttttttaaatcaaatttcatttcatgcagttgttgtacctgaccaagccgttgtcctggattgg

SEQ ID NO: 22856 - DNA, 413 bp, Glycine max
  Intron number 2 from transcript Glyma07g39040.1 (locus Gly ma07g39040) derived from phytozome v7.0 (chr-ID Gm07; pos 43638816 to 43639228)
cgtgccaaggttagttttgacgagagatgattttcaaatggtagtaacattgcgactctatctaatctaaaatacttcataaccatagataaaatcttagttgtatgattatgtccatgttcttttcaatataaatacatgcagaaagttagggataacattaacatatactgatatacctatagcgtagtctatcacatttggagtatgaagttaacctttctgactttgatctggcagcttatttaaatacttgtttgagattgtagtcctagattggtcccccaaaactttgtttatctacatattagttggcagacataagcattacaatttcttgcttttgggaagaaaaaagattgacaacatctccttgatttggacctgtttttgtttcaggttgaaaaaacagc

SEQ ID NO: 22857 - DNA, 626 bp, Glycine max
  Intron number 2 from transcript Glyma08g07850.1 (locus Gly ma08g07850) derived from phytozome v7.0 (chr-ID Gm08; pos 5628828 to 5629453 reverse strand)
cttctaaagttgttgaaagagctcacatcaacggcgtaagtttcaatattctctcttctattaaagttcgtgttttttatgcttagcctattggaaagtactctctctttttttttttaacaaagctcaaaaacagttagttattttgttcatacatggccagaaacaaaacaaaatattataataaactcagcagaataagtgagtttgttattaacagaagagaaataggccgccctcttaatttcgttgttttttggtttaacttctcattttggtattatccgcaaatcaaagaaccagagtcagacaatggatcagtgtttatttctttatttgaaaatttctagaaatatgtgcgttttcaaccaagatgttttgctaatatccctgccattatttaatgagagatgatggtatgactgaaatttaaggttattttcaatgttttattatggattgtgtttttcagttaattcaaagttgttgttacccatgatggtaaaagaggattgcccaaggcatcagctgctgtgcatagggtttccttttttagtgataggctccttttttaattaatactatttgctcataataacaggtgaaagttcttgctctgacagatc

SEQ ID NO: 22858 - DNA, 937 bp, Glycine max
  Intron number 1 from transcript Glyma08g15890.1 (locus Gly ma08g15890) derived from phytozome v7.0 (chr-ID Gm08; pos 11584709 to 11585645)
ttcatcttgcttgcaaagactggggtgtctttcaggtaccacaaagaagcactagttattcattcttgcttttaatttttttttttatttgtaagtatccaatacagataccagaaactgagcttgaccctaaaccctaaacttataacaattcaagcaactgagtttgagttagatccccttaattctagctttcaattacatcctctagtcttaaatataagaaaatgtgtataagaaaaaaaaacactttttttcatcttaaatataagaaaatttcaactaaatttatcttatttaatgatcttcctctaaaatactcttcatttatttgaggtgttagttttaatgattctttcttattcttgataccaaatttgaatgaaggatgagttgagagaaaaattactttttaattgaaattgatggaattaaatgtgtttaactaattttctttagttagcctcacatgttttctttttcttatattgtaatttgagaccggtgggattacttcaagtgttaatatttctatgtttttaggcatttgttctgttaatagtaaattcagaattttcacaagttgttggtgtgaaaattaatggccagcttataaagttatatgaaatagatagaacagagttgtatatataatgtaacttgaagtatttctatttgactttctattttgactgtgcaatttcagttcattaatttcttttcccttttggttcttttaaaaaatatccttaattcatggacttttatcctttagaaaagtgaacaacatccgccagagttgtgtatttttcccattttgggttttagaaagctaattgaactgaaggcatgctagtgtttaagggagagatttcaacattttttacttccttttcacctgattttccattttttccccccttgtagctggtaaatc

SEQ ID NO: 22859 - DNA, 614 bp, Glycine max
  Intron number 3 from transcript Glyma08g03570.1 (locus Gly ma08g03570) derived from phytozome v7.0 (chr-ID Gm08; pos 2521409 to 2522022 reverse strand)
acagtgttccgcagaaggttagattttatttcatttttatcttttgggagtgaattgttgattaaaagggcctcgacaatccccaccaatcctgcactaatgaaaactacaagttacgtaaatcgagtttatcctgtcacgttaatcttatcataatcatcatacatcccgaattaacgatttctccaactatggaacatcatcggatccaaattaatgaaagaaaacaacaagtaaccgcatggactggtttgaattgaatcggaatgaacataatacgtgttacagaaatcgaatttattcagtcgtgttaatcttatacaatcttgtaataataataaactataaaacgtatgtcatcacgaattcacgatttctccaaagtattgacatcatcgaatcgatccaagtgaatgaaaggaagaaaaaaaaattaaccacttggactttttattggaaaaacggttgcacgagagtttctgataggttatcgtaaagtttctagaacgctagctatttgcaattgaagcacaaatgcttttaatttatgtcatttttttatttaaaatttgctgacagataattgctaataaagatagtccaagaggggtaca

SEQ ID NO: 22860 - DNA, 814 bp, Glycine max
  Intron number 1 from transcript Glyma05g34620.1 (locus Gly ma05g34620) derived from phytozome v7.0 (chr-ID Gm05; pos 38895451 to 38896264 reverse strand)
cgcctttcacgttgctgccaagcgtggcaatctaggttccttttttttttttttttcattttcatggaataagttcttcttatggatgttgctattaattcagttaagtcaatgtttttatgattcgcttttggacttggaatataaatacatatgatagaatcggaaaatcctaaacggttcaaccagaattgcatagccatagtatttaacaccataccctacatggagaaatattagtgtagcaccaattcagaaaaaaagaaaataaaaaatcggttgaggtagttttgacacgtacaaaggaggtcaccgaaagtgccaatcagaagagtaaattgcacagaagaccaaaaaggatattggagagggatcacataggaaataatatgtttgaaaagttggatgcttttgttgtttctttctttggataaggaccaactatcaaataccaatgcaccaaaatcatgaacgaccatggatgtgtcttcagtgttgattttttctctttctaacttgcattctgaatactcgagtcttttttgattgccatggacctgatgatgacacatgtgtaagcttttaggattgtagatagctgcagagtgacatgtcatcatctatagtactcttggatgcaatttttcttataatgcttgtaggtcaaacaatattagaaatcagggacaaggtgaatggagtattatcatgtttcaatatttgattctaaataaggattttcaattatgatatctttatcattgtcaatccttttccagatattgtgagggagcttttgaatacttggcctgag

SEQ ID NO: 22861 - DNA, 702 bp, Glycine max
  Intron number 1 from transcript Glyma05g30350.1 (locus Gly ma05g30350) derived from phytozome v7.0 (chr-ID Gm05; pos 35735677 to 35736378)
tcacataactaagagacagagtgagagcaatagtagatggctagtccacacattgcactgctgaaactcacctccatcttcattgtcattgcctcaggtaattcattcttttaagctttatttgttgccaaccttagtgaagcaaaaggagcatttagagcctgacaaaattttgatacagttccttaaatgtttttacttttgttttccaattggaattgaagttttacctagtaaacatattatgacctttaatatataaacttttattatgtggattaccgagatgaaactccaattctaataagagaacaacacaaaaaggcacgttttctcttttaaagtctaatgttttgtttggtttgcacaagtgaggctagccctatgtgtagagtttcttccattcccaacttccgatattcctatttcgattaatatattaaaaaaaatcaaatttcaactgaatatttttcttggttcatcactaacatagttggtaactagtaatcctctgccattgcaatgcatactaaattctcatcatggagttttgaaccaaattttaagttcttaaaacaaggagctccttcacttttgaaaaaacaatttgcccgagttagatgaaaatttacttttatgcttgctaatttgacgtgttggttggcagcacctgagctgtgtggaagcagtaagactttcact

SEQ ID NO: 22862 - DNA, 337 bp, Glycine max
  Intron number 1 from transcript Glyma07g04120.1 (locus Gly ma07g04120) derived from phytozome v7.0 (chr-ID Gm07; pos 3002999 to 3003335)
aaggatctcatcaggactcgccatcagattgaaaagttttacaagctcaaatcgcaactttagggtgtttctttgagatttcaggtttgtttttgcgcattttccttgctcaatcagctctgcagataagttaaagattatgtgtttagcattgtactactgtggtgcatatacctttgacattctgagttgaatgggaaataataattaacgaaggttcagaagaagagaagaataacatggccttggttcatactacagtagtatgcatactgtagcagccttgttttgtgtctttcattttcatttaatttaacctaccttagatggttagggt

SEQ ID NO: 22863 - DNA, 584 bp, Glycine max
  Intron number 1 from transcript Glyma05g37900.2 (locus Gly ma05g37900) derived from phytozome v7.0 (chr-ID Gm05; pos 41392950 to 41393533 reverse strand)
ctcgcttcaaggctgagtttcccgtttttgacaaggtaaaacctttgcttattctcatttcccactgcctgtgatttctttcctgtgtataaaaatcaactccatgccagtgtctatattcttgatagaaagaagtgctgtgatcatggaattagctacttgagtacaaattttttggggtgcagtgaatgctttctgttaacctctaaactccaatttccttgagcaatattctaaatggattctgtaatcaattttgtgtgaaaatcgaagttgattcggagagcagttgactccttcaatgatttcccccagtttcagtccttggttgtgtaatgcattaatatatgaaccatttaagtagagatgaatagattgacttcaagattttgtattcttccttgatgtggcgttaatagccccttccaaatactaagcaaataagagaaaatcggactaggagaaactaattctggtttgatcatggtcaagtttgaataaatatttcactttcctgtgtccaagtttgaataaatatatacaatgagagttgagaccattttttttgcatttaatataggttg

SEQ ID NO: 22864 - DNA, 1035 bp, Glycine max
  Intron number 2 from transcript Glyma08g12880.1 (locus Gly ma08g12880) derived from phytozome v7.0 (chr-ID Gm08; pos 9428419 to 9429453 reverse strand)
attcgatcaaaagtcagcaacagctatatcaaaatgtaagaactttgcttcttttatttttttcctctcttcttctcttacaaatgaatagcatttgggaggtgtgtgttggatattgacaccaaacacgtgggagtggtactaggttgctttctttgtcccactctcagtgtcaatattttaatgacgcatatattattaattaattagttttgctttagaccttaccactatcttctgatgtatgaatgcatccataatttgcaatattttaatcaatatccttcgtttcgttagttttcattttatttgttataattattcattcttttgcggtcctaatgcaactagtttagtatgattgtaaatatatgaaaaaaagatattttaacactcaaaaggtgtctacacttaaaaagagagataaattattcatatgatttaattagctgatatgataaagacagaaagaaataataatgataataatacatttcttaatataatttttaagctaacgtattctatataaaatattaggttgacatggccttgccatgatcattaattaagatatgcccaatcaagttctgatgcagagaaatagattgattgaagagtctacttgtgacaaacctgaattttctaataaacactaatattttatataatataataaatataatactttaaatgtttttgacgttattccttaattaaaattaattaattttttattaaaattaaaactttattttgattactcattcactaaaattagacattagttagtaatgtaaaactttaattttagttagagaagaacgttacggaattaaaatattatccaggactcttgagctcccacctcaaaggctcaaactgagaatgtgctaaatatcaaaatcaaccgaaaaggacataatcttatttgctttgtactgttgacaatttttaagcttaattgttttgattattattctttcgaaccttatatggatgaaatttgtatgcttctgtttgtttggtgaaggc

SEQ ID NO: 22865 - DNA, 721 bp, Glycine max
  Intron number 1 from transcript Glyma08g12880.1 (locus Gly ma08g12880) derived from phytozome v7.0 (chr-ID Gm08; pos 9429576 to 9430296 reverse strand)
ctaaagcattttacaagcaccattggccggtaagagaattatgttttcatataattttgtgtcaatttcaaataaccacaatggtaataaaaaatttcaggaccatgcacgtgccatatatgtttttttaggagtgaccttagagataaaacgtaacattttataattttttaatgaaatctttttttttttcatacgatatatagttatctattattccgtcttaggtttataaaatgtcaaatcgcgtggattagtgtttgtattaagcacgtccttaacatatcccgtatttgtctatggtcttcaatagattcaacccgtccgatattgagtatctcatttctacttgtcccaagtttaaatttgtaaaataaggtttttttataaaaaaaattatattaaaaatctgattttagaaaaaataaaatgattgttacatatttatttttaattacttatatatcaataaatttattatagtgtatttgtttaaaaaattatcaagaaaagaatcttaaattatgtaaaaaatttaaaataaaattaacaaaaaataaataaaattttaagaattttattatcagaagataataacattctcattcctaaatcattaagaaagttgaataatcttggagtacctgatgaactcaaatattttcggacaaagtcgaaatggtttcaagggatcaccatgctttttttttctctacagagt

SEQ ID NO: 22866 - DNA, 742 bp, Glycine max
  Intron number 2 from transcript Glyma05g25430.1 (locus Gly ma05g25430) derived from phytozome v7.0 (chr-ID Gm05; pos 31539745 to 31540486)
ctgctgtgattaaccaagatataggtaccaaacctagctacgtacgttcatctgctttgtcattcgtttattttctaataatttttatgttgttggttacattattagtttctcatatgaagcctatatatatttgtcatgatatttttctcgtcgtaaagtatatatgtatgctcttttactaagttaaattgaaaatatattaatgaaaatagaagcaactaaggatccattgggttgggcggaaagaaataaaatgaaactgaattaagataaaagttttaaattaaatagattataaaaatatgaatttcatctcattttattgttttttttttcttgtttttttcactgcaaactacagaacctaaccgaacaagaggtgccttagtcacattacaaaagatagaaataaaaacaccaaaaatccccagctacaccaatacatgcaacccctaaaaccaaaccaacatataaagatccctttatagaccctagtacacaaaatcaaaagtttatctctacaaaagtgaaataatcaaacaaatcccattcttattacaagagaatgcgatttatattgacgaaataatcaaatgttagtttttgttagtagaaagattcgagctcataatcttttttttttttttcttcatttatcaaatatgaaatcaaattttattttaataaaggaatgtattgatgaggaagaggatgataatgatttaacctaataacagca

SEQ ID NO: 22867 - DNA, 398 bp, Glycine max
  Intron number 1 from transcript Glyma08g04990.1 (locus Gly ma08g04990) derived from phytozome v7.0 (chr-ID Gm08; pos 3572393 to 3572790 reverse strand)
tagccgcagatctctcagggcttgcatcttctcaggtaaggtatgtgctctactcccatttgtcccttctacgcgttgtacaaatcaattactggttttattgagaaacagaataaaagctctcatttttattttttgttttaattatttgatttttttacaagttttttattagccaatagaatgtgttaagcttgagtcggggttgttggtggtggtttgaagattggtttctttaatttttttagttgggattagggggatttaatcctttggaaaattggaagtatttagggaatgttctaatcgaggtttggacctttttctattttccttaattatttagggtttagggtataggccctctaaagttgtgttgtttttgtacagttgtgaag

SEQ ID NO: 22868 - DNA, 991 bp, Glycine max
  Intron number 3 from transcript Glyma06g12370.1 (locus Gly ma06g12370) derived from phytozome v7.0 (chr-ID Gm06; pos 9547419 to 9548409)
atcctctgtataaaactgagagggagatcctcaaggtatggccagcttgttctgtttcaggctgtaagtaatatgtgaattatacagtttctgtgcttcttacaattttaatgaaaattggggatttaagaataagatggatacttattaaaggaagactaaatgtgacttctaggtagtatagggtgagattggaggaattaatgctgtatctgcatgagcttgatcaattacctgtgaactgagtgaagtatcttcctctgggcctaggagactgattaattgtttttatgaatctagtccttgttcttgattcacaaggactagcgtttggaagtacatgttggtttctttgttgtgctttaggaattaggacaatgaatctgattaaatgattgaagggagtgttttaatgagtttatatggcaaaaagggtggaactcaattgtgcatctttgtattgaataactacaacaggtatgcttgacatgtcacttttaatttggattgctagttgagttaaaacattcacacacacacacacacacatatatatcttgcttcattttagttggagtgtgggttgaaaggcaagattttaggaatattagacgatttaacaagatatgaactaacaatgctggtaaatatcattctattagtcttaatgcctctggagaatttattcctacttttatgcgtaaatacctgctacaactacaagctgtgaaaattctgatctggctttgactatgtggggatttttttcccttctccttagagatgttagttgtttcttgcatctttccttataggtattgtagtagaggaaaatttattataaatttgtagcaataagtccaatcattgtaaaaaagaaattaacatagttactgaaatgatgctcttggtctttgctagaatgtctccctcataggacttctttcctgttacaggtgtacttgacaaaacactacaaaaatcgaaggaa

SEQ ID NO: 22869 - DNA, 962 bp, Glycine max
  Intron number 1 from transcript Glyma07g09440.1 (locus Gly ma07g09440) derived from phytozome v7.0 (chr-ID Gm07; pos 7879405 to 7880366)
acaacccttctcttctcaacgagagaaaccctgttgtaagatccccatttccaccgactgggcatccccaaaatgctatcctttttcttatgaagctttgaaaattagatctttgtgatgttgtgtgtgaaaaagtttgtgcttttgttgaaagggtaatgccattttcagttctcactttttttttttggttaattgggggttttggaatgatgtgcatatgttcagatctacttggttttgactcatgatgactttggctgccgggtgtaatctggttccttgtatgattaagtggtaggtttgtgatcttatgaactagtaaacttagtgaggtggtaggaaaagataccaatgtcatatggggattaccttgattgtagcactcttgtttgatttgatccttattttttgcaatactagcaccttttttgttcaatatgtcagctacattaggaattggaagacaaatgtgagacaagcatggtgccttgggtgttaaatatgctaggtaggtatgatggagattgctcagggggttacagcttattgacaattgtttttcatgacagttttttggcgtattttggttgaagaggaattggattggttttcaaggggaagacttcatatttttagacttatcatgggaaaggactagtttatggcttctctttgctgatcattttgttgggttttcatcttgtggtttatgtgacagatatggccaatgtaaagggataggagggtgttattgactatctatttatccgattgcttccttttgtgattcaagtattaaggttttaaaaaggtggggtgtatgaggcattagtaagatttttgcttggcttttctatgtattggtattttgatttcttgctttttaggattaggattccatatgattcttataaattttatatgcttgaggctgaggatctcatctgttatacatgcag

SEQ ID NO: 22870 - DNA, 791 bp, Glycine max
  Intron number 1 from transcript Glyma07g07240.2 (locus Gly ma07g07240) derived from phytozome v7.0 (chr-ID Gm07; pos 5950924 to 5951714 reverse strand)
aaacttttctcttctctttgattcttctctatcaggtataattcttcaccctctcttctttgatttctcctaaggaataaggaaagaaaagaagctcttattttctatttcgtgagaataactgtagtcaggtttgtgaattaatttcataatcggtgccttttgcgaattaatttggtaatcggtgattttattcggtttaatcggtttctagttcgccgatctaaaagtgtttgatgagttttagatggtttgaccttttttttttctttcaatgaattttgagatttgcgttgttgaatttggctgctgttgtttgaaattttaacttttaacttatagatctggacatgcttatgactgagattgaaggttggattttattattttattgttctagtttcttttttaattatttatttaggtaaggtaaattttagacgctatggtttttcccttatcagaattttggtcccaataatattttgtgattggttattacaacttcacaaggttttggtcccccagtgaaaattatgaagactaaaattttaaaccctttatctttaggaaattttggttagttggctgctaatttctgattctctttaaggtttacatcttgtaagatttagtttttggtttggtggacctttacaatatggttcaaagaagatgatagcatggacaacagtttaaaaaagcaaggataatcggaactaattgtttctcgacacatactaatgtaaaccatttccagtgaatctcacggcaagcaatccagcaggtgt

SEQ ID NO: 22871 - DNA, 799 bp, Glycine max
  Intron number 2 from transcript Glyma08g19570.1 (locus Gly ma08g19570) derived from phytozome v7.0 (chr-ID Gm08; pos 14784395 to 14785193 reverse strand)
aaggtgaaattaatatattcctaatattttttatgtgttaatgtttcattgcagctatgttctttagtttgactttaggttgcttgaaaatttggtcttatgcaattcatgtgactgaccttaccttttgtttgttggttcaagtgatactcgctccctccaacaaggtcttagttcgagtcttatagatgaaaaaaaatatggttgggatgagagaatttcaccaaaggtgaccattcaggttctccaatggagattagtcatcgactatactccatataacaataacatgttagcaaaaaaaagaaaagaaatcagcttagggaacatagaatagaacttatttcccattttttccctctttttatttttaattttactatatgagcaaataaggtttgagaacttatttcagttctcatgatttttatttaaccattccaaacttcttttttttccaaaatgagttttccaatgttgttcaccattttctcagataagttttcagtgtgcaaaacaaatgctaaatggggattccaatgccagtgtatttttctgttttcaacccatattagccttgattgggatatgttctcaaaatctttatggctactattttgaactgccttactgtttgattttcgtgagacattagcactagcatgctgaatatgctgagcatttatttttttgcccggttaatttgccgtcttacataatatttcttcttagatcgattaaaatctttgaatccgtctttcctttgagctgcagctcctgaagtgggtgctgacaattt

SEQ ID NO: 22872 - DNA, 368 bp, Glycine max
  Intron number 1 from transcript Glyma08g07700.1 (locus Gly ma08g07700) derived from phytozome v7.0 (chr-ID Gm08; pos 5527837 to 5528204)
aggacggaacggagtggccttggaactgcttcgtgaggattctgtttctgattacgaattaatttttaactcaatttcttagcgtcgttgattactttatgtttatgtttatcacaaatgcattatcatcgagaatttccgtatgcggattttgatgttgaattgtcgattatgagagtagatgtttgctgattgttgtgttatgcttatgaattatgtgattcttggaatattttattttattttatattttgagaaatctactgattattaaatgacctggctatgattttctttgaatgcttatgagcttgatttcttttgtctgtgtagccgtgggagagttatcgttcaaacgtgtccataga

SEQ ID NO: 22873 - DNA, 824 bp, Glycine max
  Intron number 2 from transcript Glyma08g07700.1 (locus Gly ma08g07700) derived from phytozome v7.0 (chr-ID Gm08; pos 5528264 to 5529087)
agctcctgagaattccaacagatttgttttttaaggtgtgtaaattgcaatgtcactcaattttgaaatatcctatgacttgattcataactaaaggaaaaagaaggaaatagttgagggttgctaaaattatatgttcttaagtcatgttgatctgtttagtttaattagaaccgctcaattgactcttgatttgataatcaaatttgtgtcatttgtacctgagtaaggtgttgtttagtgtttgcgtgtatacttttattttggctattagtaagatgtttattgataccgttatattttctgttttcttattcttcctctattacaaattatatgatatttaaggtttaaatttcataaaaaatattaggtaactttctcatatattcttcatttctataactaattacttatttattcttcttatacaacactcccattaggtgcaatattcattaagggtaatcttgaaataaaatatttaatttaatattaattttataaaatgacatctattttagaatatttttttttctctgaattgccatataatcttaaacaaaaggagtattattttattgattttagcttcttctccaaaacctaattttaactaatccataagctgattttaactgaataaacatttttcatttttcctttttatttctttttcctaaaagtgcttttgtagaaatttatctgaccagagttgtacatgttgcagcttccttagaaaattttgtcaagatattcatattcttcttggtggtggtgtctattgtcgttcattattttccatacatgttttcagagacggt

SEQ ID NO: 22874 - DNA, 783 bp, Glycine max
  Intron number 1 from transcript Glyma06g22410.1 (locus Gly ma06g22410) derived from phytozome v7.0 (chr-ID Gm06; pos 19209486 to 19210268)
gttactgttttctttctccacattcacttctataggtattggctgtctctaattgtttccatggagctcaattttagttttacttttacttctctgagttatcgagttcccattttacattttgtaacaagtttggctcttttgatagaactgtgattgaggaggttgaagggaacttgcattgatctctagatttgaatagggtcatgggtggatgcatggtttgttaatgttctaacaataatatccctgaagtcaatttggatcctcactttttttctgtcggttcatatttttttgtttggcattttaactgatcaaatcagaaagtggaagaagaaatcaatatattccttttaaatgtattttcttttaatagagctacagattcatacagttacacccattatggatatgataactaatttagataagttgatatttttttttgggggggggggggggggttgggggattctttggatgtgaagattaatctctctttaaaatctgtaaaacgaagagggaaaatgaaaacaagaaaatgtttaggctcttaagtcccaactgtttctttattgaacttggagaaagtgtgatgctgctcgtggatacatattacactctttttattttttattttactatatctgtttgattctctaatccagatgggaaagaattgagggagatatatagagctctgatttgttgaaaaatttactctatagagattaatttaaaattgatcaatatttcttgcttgttcatttgcagaagcct

SEQ ID NO: 22875 - DNA, 686 bp, Glycine max
  Intron number 2 from transcript Glyma08g08040.1 (locus Gly ma08g08040) derived from phytozome v7.0 (chr-ID Gm08; pos 5779360 to 5780045 reverse strand)
agctcattcaagggctctcttatatccctttcaaggtggggtgttcttttaatctcattggtgtgaaaattatgatcttgtgaatagctttggttggtattggtttgggagtgttgtgaaatttgatatgtgaccttgaatgtggcaaattattaactttatgcctgctcttgtagttacgtggttcagcagtgcttttttagtgtttgttgagtaggttgattataaataatctcttgaaatggaatttgtatcattgctgttcactgccatttcattggaatgttttctaatctggatgagcatgatggaaactacattgcagcttctgctagatttttgtcttttttgactggatgctttttaatatctactaaattttcaacaatatgtacctagattttttttctctgatttataattcatcaaggtttttgaacttttctaattcattgagtatcgttttacttttttcatatgggccccttgtcttccccatttgttttcattcaggcttgccagagtcgttttattttttagcttatgaagtcagatgtgttacaatgaatgaaatttcttgtcatttattgaacggatactattgcaagaatgtattccttatctttcattgtttggtcactttgttctcagggccgagtaaagttgaaaaacccggatcacaactt

SEQ ID NO: 22876 - DNA, 660 bp, Glycine max
  Intron number 1 from transcript Glyma08g16170.1 (locus Gly ma08g16170) derived from phytozome v7.0 (chr-ID Gm08; pos 11786992 to 11787651 reverse strand)
acaaacaaagccaatctcctcctctgacccagctggtgccctggtctctttctcttctttccctttttcattaactgcttctctttttgctcttacccacatcaaattttcttcatttgttgttgttgcattcacccagttagcaaatgagaatcgtttgataaaaagtcggacgactcagattttatcttaaaaaaactttctctgatttaatactgtgtgagagttcgaatttggtgactgcaccaaatccatttcgaatcttgcataagatttcagggagaatttggctataccaatgggaattcttttctgacatagcttaagaatttgggggaaggaagggttttttctatgccaatataggggaaaacaagtatatttgttaacttgtggtgggaaggaagggttttatgaatgctttaatttatttctttcattctatggtggtgaatgtaaattaccaatgaaagtattatattagacaagaaaaaaaaaaggtgagattgatattgattactgttagaatttggttacagttagagaagcatgactactttatcagaatccatgaatatgatttgtttttccccttcttttttaatattttacttttccttcttagattgtgtgagagctgaacctgtgatctacaagaag

SEQ ID NO: 22877 - DNA, 738 bp, Glycine max
  Intron number 1 from transcript Glyma07g07270.1 (locus Gly ma07g07270) derived from phytozome v7.0 (chr-ID Gm07; pos 5979771 to 5980508)
gtattgtttggtaagtcaaagactctttttcgctgaatttattagcatttgtttttttttttctgttgttggtttcatttatatatttattttgtaaaggagtgtccttgttttgagctgacttaaggagcaaggactagtttttgctactgatcgatcaaaccccttttgttaagaattaacttttttgttttaaaattgtcattttaaaaaaaatttaagttgatgtttggtctgtttgttgagtgaatgaagattgaattggttattttggtttgatgatgatgaataccacttttaagcttgtatttttcttatttgcttttaagatataggataattaccaatttgcctcgtcttgatgggattcatgagctgaatcatatgttactccttagattagtatctttgtagtttttaaaatggcggccaattgtctaattagatatactgatacaattctgcttaagtcaaagtggaatatcagatgtggtcgttcttccggtatctctgtgtgctcatgacttaatttaacattgatgctgttaatagcatagttcttggtatttgatggctcaattacatggtgtacaatgtatgtgttgtggatggtttattaaaatctggggtctgactaggagtaggagttcacttttgttatccatgtgacatagactttctgttagcaaggacgtgaggaacactattaattttttgtttccttcagcgctgctgtaa

SEQ ID NO: 22878 - DNA, 583 bp, Glycine max
  Intron number 2 from transcript Glyma06g07260.1 (locus Gly ma06g07260) derived from phytozome v7.0 (chr-ID Gm06; pos 5284800 to 5285382)
tttgttagagaactatactgcactcaactacacaggcatgctctaagagctcatgcactattgataattgatgactagtgtgttttcttgagtggtagatcatatcatactttctaacacactttttcttattagaagaaagaggagtgctaacaacacactttcttgaactttttactattgaatcaaattttctaaaagatacaaaatgataaatgagacaaactaaataattaatgattttcaataaatttcagttaataacaaataatgtattcaaaaagagtgtatcacaatgtgttattagaatttcttagttaaagtttcactagtttaggaataagatctatacatttagtggaacttatatgaatttaatccaacaatagtagagagtgcgttaaaaagagaatacctgtgaatgtattactatcatttctcatgttttctttcctttaaatatatatatatatatatagagagagagagagagagagagagagaaagagagaaagttatgagattatgagggggtttgatgatgaatgtttttgtgcaggtctagtgaagataataaagaaat

SEQ ID NO: 22879 - DNA, 548 bp, Glycine max
  Intron number 3 from transcript Glyma06g14550.1 (locus Gly ma06g14550) derived from phytozome v7.0 (chr-ID Gm06; pos 11422556 to 11423103 reverse strand)
ggtctcgtttacaagaagtacgttactacaaagtggattttatcatttaactattaatttattatgtctaacttcctgctttgtatttttcttttttgggaattttaattttcatgtctgcatagtatagtacggattgactaaaaaattactttcttcttttgtaacgccattttattgaaaggtttccatattcctcttatgattgatgaaagtaggaaaacaaaacaaactatcttactctagaattaaacatcttgtatattaggtacattcattattgtgaaccatttattgttttgtttgcacactccatacgataataatgttttagcatgttttgtagttactcttatttgtgttgcttataaaaagaagcttttacgcctttatagtcttcggttgtgcacaaaaattccaaaagttcttttttcataggaattggtttgattttctcaatcaaaattccttctttattttcatgttctatgatccatttactcttgcttgtaggtaagaagaggggtagatagagctgaaatcaacag

SEQ ID NO: 22880 - DNA, 831 bp, Glycine max
  Intron number 2 from transcript Glyma05g36830.2 (locus Gly ma05g36830) derived from phytozome v7.0 (chr-ID Gm05; pos 40585150 to 40585980 reverse strand)
tcttgtaagatctatcaaaccaatctcccactttaatttttttttttttttttttttttttggggggggggggggggggggggtgtatttgtgtacttttagattagattgtttcttcttcaccatgtatgatttctgatgtgagtatcagttgcgtgattgtatacataacggtgtatgatcagggaaatatggtgaaactaatatcacaccaaaggttttaaattgcggtttggttgtggtccttgatgctgcaaaaacttctgataaatgcagttgatgaaacatcaattgcggttgtgttgaatacaaaagccttgaccgttgtgactgaaatcatggctgtggaccgtattttaaaaccttaatgtgaacataacccttgtgttctcatctagacatcggggaatatgtgaactttgattctttgcaggttgaaatttaacacattcacgcagttagctaattgtaatggttggattaagattagactattcgcattttttttcctcataaatcagactaaaaatattaaatatgcatcctaaatttgaacagtccaatattgacatgaatgcataaatgcaccgaatcctgtttctgagagaggatatgtatgtgtccttcaagacctatttttcttctttagactgcacttttttttaccaagcactccgtttctctaaagcctaatacattctttttgcatagagcttcgatagtggaaattctttagaattctgatagttgtataggaggatttgtgttttttgcccccctattggaagaatttggcttatacaaaatagtatatcatctatttcagggaca

SEQ ID NO: 22881 - DNA, 1058 bp, Glycine max
  Intron number 3 from transcript Glyma05g08480.1 (locus Gly ma05g08480) derived from phytozome v7.0 (chr-ID Gm05; pos 8360548 to 8361605)
actgccagggttagtcacaatacccagctattcaggtacgacaaatcgtgaatttgcatgacgattaaaatgcctcaccgtgtcatattaaatgtaatgatttgtgtctgtgttcgcgtgatgctgcttttcttttgttttctcctttaatttttatttacgattttttaactagtttttcattagatatttctttcattctaaccctgcatgcaaacctcgctaagaagtgcgcctcttacccttttgtggacctgaacccactatgtgctgttcctaacaaagttttcgtgcatgttagagctatagtaatgctttagtaaagcgaatctttgtagttccttcccatctcaccctggcgtatccttaaatccacgttcttgctttctaggagaaaagtctgggtgtgggttttcatcagagaattaagcaaactattcttaaattttgtgcagactgtttaattttgaagtctaaattatcttatttgattaatagttaataaataaataatattaatggtgttcatattttttctattgataatgaagccttgtttcttatcacatccaattatttataaacaaaatgctagtcaagagaattgaagtgcttatcataatatgcactgcaactgaagaaaaaaactggaaatttagagattgagttgggcatttggaagagattctttggagtttacttgagcttatcgtacaaaaagttaatcaagtgtttggttaagtttatgaggcttgtgacctttctttaagtttcatggtgaagcttgtcagaataagctgtcagttctcgagtgataaggctcttaatttaattcaactgtttgcacaaattcaagccaaatcatagaagacatgggttcatcattgttgcacatattcatgatcaaatagcaaaatgttctcaatattctcattactattttaatttcatgtgtgaaaatgcaataacagcttttatcttctatttgtataactgtttctcttcccctgtgattgatgccaggttttcatttgatcccactcagaaattgggtctgg

SEQ ID NO: 22882 - DNA, 532 bp, Glycine max
  Intron number 1 from transcript Glyma06g43520.1 (locus Gly ma06g43520) derived from phytozome v7.0 (chr-ID Gm06; pos 46561869 to 46562400)
ggtggcctcacaattccttgcagtgaagatgtcttccaacgtataacttgttgcttgaattgacaataaatctcacattgtaggggactaacgtagattagtgaagacattttgtacaataggcgtcttctcaatttttaaaaacctccgtttcttgagcaagaggggggaaggaccattagaatgacagattcatatttcatagagcatgtctttctgtggttaagtgacatgtcgtatcattgtagcgactaccaatacatttatagagaattcatttctcattcaggatctttgcctttctacttttctcttctgtctgtttttgattttatacctttaattagcttgtattttataactcataagtcataaccatgactcatttttcattgcaaagaaattgattgataaatgataacaagtacagtgtacaatgttgtgttcacgcaggagatacagtggtatacacgacatatatcaggaatcaatgcttaaaaagatacgtataattgtgtccagatttaaaatt

SEQ ID NO: 22883 - DNA, 636 bp, Glycine max
  Intron number 1 from transcript Glyma06g12640.2 (locus Gly ma06g12640) derived from phytozome v7.0 (chr-ID Gm06; pos 9810708 to 9811343)
tgttaaaaaaaaattaggcgtctaaagggccaaaggtattgcctttgttcctctctcatcgcattcatagtcatgtagtagtatttttgttttctgttttctgttttcatgtctttgatcacaataacttttttattttattttaatttcccccagtttcgtttctgattgttttttctttcttccgttccccctttatgattttatttttcggttttaatatcatgtatgccaaatttcaataaaaaaaaggaccttttcggatatcattcctgtgaattgatcttcctgttgagcctgtagtgcaaagtttgaaactttcagccaagtcttaatcatgtaattgagaaacaagtgacgggtatttatgtaatgtgctgaatccctctaataagattatgctctttattttattttattttataattgtatttatctttctgttgtttcctttgcaaattgcctttgggggaccttgtatttttcttggtttgtgactttgtggtgattatcgtcttgctacaagctttatttttcgataccttaaatctagggattctctatggccttatcctttgtttattttttacttttgtgacagcttagaaagttgaagctttttttgttgaggtgaaa

SEQ ID NO: 22884 - DNA, 771 bp, Glycine max
  Intron number 1 from transcript Glyma08g41620.1 (locus Gly ma08g41620) derived from phytozome v7.0 (chr-ID Gm08; pos 41580546 to 41581316 reverse strand)
tcagaaaaatctatcagcctttgcacttagctcaggtggggttcttcttttttgagctccttgtcttaatgtgattgttggaattactaatggtaataattaaagtgaaaaaaaaagtttcatcattttctatgtctttcatttgtcaaagtgttttttctttgttttattttggaaattgtttttctttgagtgtgtgttttgcttatgaaacttgtggagttagtacacaactttctgcaagctggctgtctcaaaatttgcccaatttgttgagtttaatgttttgttaagattcttgtatttcattgtttttgtttctctgaacttgtaaatgcttgtaaatgtgcatgtaccttcaaactttaaccaagagttgaatttcccattttggaaccatggaatttgaattttggatgatttatattattcacagttcagaatggcaaaaaccactcatggttccatttcattggtttgcttgcttactcttcttctagtaaagttccacacatgacccactcaaagtttttctctttctttttctattccttttcttttctttttgttttcaatttaaaatattgtttatgcttatttgattattcagttttctggtaaacagattattttattctgcttttttatgggtgtgctcaatgactcaaaatctttcactcaaaagggtctttggttttgattttctattattttaaaaaatctaatgttcttctcttttttgtgacaacagaaaactgatttggtttagcc

SEQ ID NO: 22885 - DNA, 783 bp, Glycine max
  Intron number 2 from transcript Glyma05g24070.1 (locus Gly ma05g24070) derived from phytozome v7.0 (chr-ID Gm05; pos 29984623 to 29985405)
tgcctccaacaccctcaggcttagctccttccgtaattctcttgttctttgagtgctgtgattgaggttctttattgatgattgaagatgaagtgttaatgtatcaagtgaccaaattagtttccagaatcatgaacatgggttaatttagtctctgaatttacaaaaattaaattttagtccttcaaattaggtagctaatgatgttcattttagttgctgatgttattaaatgacagttattttagtcttgaaattgtaaaaaaattaatcgtatttttagtctgttgcaattgtgcaattttggtctcttctgttacaattgcgccaattgggttcctcaagatttcttacatctactatattggatagaatcaggatggagggatgtgattggaaatgcagaaaaaacttaaggatcctatcggcgcaattagaaaatgtggtgggaatcaatatcgtacaattatgatgtaattaacaaaaaaaagggactcaaatgacttatatcaacgatttcaaaaattaaaatgacatttttacagttttatagattggattgactgatactcgtaatttcatggactaatttaatgagttactcaatttcggacaagtgcattgtgtagagtgatgttttaaatttgatgctttaaatatatctggtggggtaaggattttattgttgtttttttgtttttgtattatgcttaaacataactttccttagtaaaaaaaaatctttcctttagaatcttaaatttccaattttgatgaatccag

SEQ ID NO: 22886 - DNA, 695 bp, Glycine max
  Intron number 1 from transcript Glyma05g29560.1 (locus Gly ma05g29560) derived from phytozome v7.0 (chr-ID Gm05; pos 35146833 to 35147527)
caaatccgttgttatttctggattcattgaatcttgggtaagatccaaaattacgtaccttaattcctcattgggaagagaaatataaaaagaaaagagagaaaaatgataaaagtaaaagatgatatgattagaaaaaagaataaagattaaaaagactgtaatacaaacataaaagccaggtgtgtaaaaagatatatatgctgttcataagtagcagaaggaaatgcgtattaaattgaatttgactataaagtcttcaatgttgaatagatctgatttttttgtccagcaatagttttattccctaatcttttttatataaaaaaacatttaaaatatattttattggacaaaaaaagaagatatatttatgaaaaaaatatttatatagtttcaattgccttattttgattttgggggttatttttaaaactatgatatataaacaattgaatgagaaatataaataattatatataatattacatacgatatcaatcattcaaacaattaaatggtaatgcataaattgtttcaacctacatattcactttactataatgtgacaatgacttttctatatttgaagataagaggatcaaaccttgtttcaccgcatccttatacttctaacacatagtaggtgtaaccgtgcagggaacttactttttgcaaacctttttattttccta

SEQ ID NO: 22887 - DNA, 799 bp, Glycine max
  Intron number 1 from transcript Glyma06g41730.1 (locus Gly ma06g41730) derived from phytozome v7.0 (chr-ID Gm06; pos 45041989 to 45042787 reverse strand)
ccagtaaattcataacgtgtgtcttcccctctgaagttaatgaacacatcgtatctggatgcaccggaacatgttttcactactacaaaagtgtgattcaacatcgttgaatctaagtcagttataaaataaccgttgtaataaagcttgtggtggcatttttgaaattaataccaactttttataaagcttaatgacgggttgtataaaccgtttttgataaaatgttatgaaggcggtttttataaaaccgcctttgtttgtaagcctattactacggttttttataaaaactgcctttgtctcatttgtagttattttattaattatttatgctttagtctttggaacgcgcatgcctttccatctccctttcgcccttcaccctgctgtgaccttcgtacatctcactctcgcccttcaccctgccctgacctccacaagctcatcgtgaacattccccaacttgtgctccgtcctgtctccggcgaagggtagggtttttgtgagaacggaaacacctaaccctaatattgctaccactccaagaggtaagggttaagttcagatgcctatacccacaatgttcaacatccttagtttttctcttttttccattttctactggaaaaatccgattttgttgtgttagaatagtagagattgtgaatttgaggattttgtgatatgggttttaattttgatttttgtttgattgtagtggtgggattcgaaaagaagcgtggaccaaactctatgtgtagtggtgggattctattttgctcatctcttacactag

SEQ ID NO: 22888 - DNA, 853 bp, Glycine max
  Intron number 1 from transcript Glyma06g48100.1 (locus Gly ma06g48100) derived from phytozome v7.0 (chr-ID Gm06; pos 50420692 to 50421544 reverse strand)
cacgcaccaccatcaggcatgttctttccatgctttcaattttggaaaaaagcttaaaattttgtaacactttaataaaaactaattggaactggtgctagttcagcttgatttataaccccatttttggccaaacaaatagggttgcccattttattattattcttttgaaattttcaactttcttatgctgtggatctttgacttcagttggagattttgagttttttttttaaccctcttttcagatgttgttctgagataatccagataccctttaaggtacaaaacctctgtttttgtcagagtagatttaaagtttctccctttatttttattcatttttgtgtttggattattggtgtggtagactttgtgatattcttcggttcaaagatttaatggggttatctgagaatttaattgatgggttttgttttgttgattgagttttattgctttaccggcagttattccttgaataaaagaagatccgtgttcatctcactaatcaggtgctgaagattcgttttggtgttccctgcaggttttttacttcatagctgcagaattccttgcactttgcttggtttttgtctctttccttgagggttatcggattcttcctttgccaaatcttgactgctatgttcttcagttgggatgaaacatgatgaagacttcggctcgattttacaataaagggatattggtattcagtgaagtgaagttaacatttgagatacagaacaagagaaaagcaaatttgatgtaactttttctgattttttggcctggtattgtagaggagtttggttgaaatctgatcagggttattgtttactgattttcg

SEQ ID NO: 22889 - DNA, 629 bp, Glycine max
  Intron number 1 from transcript Glyma06g01040.1 (locus Gly ma06g01040) derived from phytozome v7.0 (chr-ID Gm06; pos 608622 to 609250 reverse strand)
ggaaggttcctcattcccaagtgcctacacctttggtaagcaaatgtatatctttgatgttgccatattattcattgtcataaattggaatcaaaatcaaacaattctatgtttgcattatattgacaagaattagaatcttagaacatgggtttgattcataaagtacggttactggatctgttgatcactttcctttgcctggagaacaaggtttagttgctttgaataatttcaactttcaagttctcttgccttgactttccatggcagagatgcacttctttttttaattttcctgggtccaacttgggaaaatacttaattgaattggtgatacaaacattgtgatgattcttttttcacttgttttgatttgacataaccaactaagatgccaatcccttttttccccttctctttaactttaaaatgactgtacttcgcctcacttcaaaatgcattttgcttagtgttttttttgtaatgattgtgttttggaagcattgttgattaagtttaagatataatgtgtcagaggttcatttattatggatagaatgtttctgaatttttattaagatttggttgtagacagagtttttcggggtgactgttccacaaagcag

SEQ ID NO: 22890 - DNA, 899 bp, Glycine max
  Intron number 2 from transcript Glyma07g39790.1 (locus Gly ma07g39790) derived from phytozome v7.0 (chr-ID Gm07; pos 44170528 to 44171426 reverse strand)
cttacaacatcttggacttacaggtatttttttatatctataaacctattttgcacacaaacaaaactgatatatgatgatcattatattcattttaatatgatgaattttttcgtctttgggaaaagaattatgcttatgttagggattattaacttaacatatggcaagacttgtgcaaaaaaatgaatccagtgtgattaagtgcatgtttggtttgcagttggaaatgttgtgatgcatgttccaatgcaaatttaatgggtaaaaacaaaatgaatgcaaaagcaagggcctagatctgttggcaaaattacttttgcctgaaaggtaattttgcaactgcaaaccaaacatgctctaaattgtgaagggaaagccttattatttttcagaaacttggcattgaatgcacttttctctccttttagagcacaaacaattgttcattttgacatttttttggagttggtgcccttttcttggtctaacatagtcctagggttgagctttctccctggaccgctggacgtcttttattttctgccttttcacactctttgattgcatgtcccttatcttcttggaagaattttgtttcagatgcacatgatcccaaactcatttcagggacatactttttcaataggtcccaagatatactagtagtatactatcaatgccttgtcataattgtagtctcatgtgaatattttccattcattttgactcgtgaagggaagtcaactgggctgatgagatgataattcatgttttgttatttcttttggaggctaacagtgtgggaaagccaccttattgcggccactcctagcccccaccttaattgcggtctacttctagcctcttcttggtacttttgcttcacttggtaactg

SEQ ID NO: 22891 - DNA, 745 bp, Glycine max
  Intron number 2 from transcript Glyma07g03460.5 (locus Gly ma07g03460) derived from phytozome v7.0 (chr-ID Gm07; pos 2426214 to 2426958 reverse strand)
ttgcacatcagaagggagggctatcaaactcaaaggttctctttttatttcttccttttttttttatgcactctctctctctcttaatttttttctttaatctctgcgttttgattgaattcttaggattgctctgaatcggtttagtcttcttcgtttttcttcaaattcctcgtgacagatctaatctaatcaggcttttgggggtgtttcagacattgcatgcatatggggtatgttttctgattccaaccatagctggaaaaaaaaagttgactcctttttttcccttttaccttcaattagcttttacacttctatgggtatctgtgtttttccctatattgattgataatcatgtgctaggatgatgacccttaaagttattcctttatctctcttgatttacaccgttgtctagaaaattgatgaaaaggttttaagataggttacgggttatatgtttttgggttgaatttgtcaatcaattaccttagaattttcaattttctgaattaaagagactgggattgcagtttctgtaaatcaatttgaattttgtgtccgactcaagcaggattacctctagtgtagaatatctgtggtctcttaccaaaaaagttgcattttgtggctattaaattgaagtgtctgaattatggtggctgttttagacgatcgtatgattataatgtggtgcataaccgaaattaatgctattgtaacagagcagtggttgtgttgg

SEQ ID NO: 22892 - DNA, 791 bp, Glycine max
  Intron number 1 from transcript Glyma07g17060.1 (locus Gly ma07g17060) derived from phytozome v7.0 (chr-ID Gm07; pos 16702018 to 16702808 reverse strand)
gattggactcatcgaaaccgtaggttgtgcccggtttggatgtttgagaggataccgttggatattatcaataacgtggatcgtgcggctgtgctttttctgaattcttgataaaaataaaggaagaaaaagagttgaaaacggtgtggttttgcctcttcaatggtaaacggccaagaaaaagaaattgtgctggtgtgtgtttttggatgttagaataacgaaaccaacttcgggtctgtgcgttattttgtaattccgtttcatgaaactgcaaagaaaattaaaaaaaacaacaattaagtttttagtacttaaattatggaattttgaatttttagtccctaaactattttttaaaaatttggtttctaaagaatttttcaattattaaaataatttttattgttaatgtcttttgttaaatgataaagtgtcatgaaataaaatggattaaatgtcacgtgtatttcatacttatttcacacaagttttattatatttaaataaataattataatattatgttattaaaatgtaaaagaaaaaaaagaagagtcattgttgaatcctatcactctaagcatccataaacttacaataactacttatgaggagatctatgatgcgaagtaataatttatctttctcatttataatctatagtagtattcatgaccacttaagtagatagctaaatgtttaagaaagattatttaaaacacataaccacaatttttttaaaaaaataatttaggaacaataaatttaaaacgccatttgagaactaa

SEQ ID NO: 22893 - DNA, 516 bp, Glycine max
  Intron number 1 from transcript Glyma06g36940.1 (locus Gly ma06g36940) derived from phytozome v7.0 (chr-ID Gm06; pos 39266451 to 39266966)
attttcttgtattttttcaagtgtattattggatctttagcctgtaacccaaatcatgtagaattcacgtgctatagtggctgagtcaggtagctaagggatgcatgagcatgatgcatccatcctaaagtgcatctttcatgtccgactgtaaaactgctctgtgtatatgaattcagctttatcagccttttgtttttataaatgaaaaaaaatatttttttaatttaatttccgtttaatggggagagagaaagagagacaaaaagcaaaagaatcaaagtcctacattcttagctttacttgtatgtactagctctacgacttttctattaaaacttgtatgaatgcttttctttcttttttctttggatggggatctgctccataacataggaatgaaggacacagtaagaggatcaaatcaaagaaaggttgtaggggtggtatttccaacttgtataatatccctgctttttagaaaaatatttctggctaccttactgcagaagattg

SEQ ID NO: 22894 - DNA, 251 bp, Glycine max
  Intron number 1 from transcript Glyma05g29040.1 (locus Gly ma05g29040) derived from phytozome v7.0 (chr-ID Gm05; pos 34722888 to 34723138)
atcattttcacgctcggaaccccaaaactaagaaagtaagggttcattttgttaaacttttggttatcccgtgtgttttgactcttgagcaccagctgtttgataaaataatccaaccattagtttccatttcttttaacttaaaatcttttcctgacttttctgtttcttttctcgataatgattctgacactcttctcctgtgtgacactgctgaacagagagagagactcctcattcaagataaatag

SEQ ID NO: 22895 - DNA, 955 bp, Glycine max
  Intron number 2 from transcript Glyma05g29040.1 (locus Gly ma05g29040) derived from phytozome v7.0 (chr-ID Gm05; pos 34723955 to 34724909)
cctttaattgtccttgtctttgaacgctataacaggtaatttatactgttttgggttttacttgaaatgatttttgggcatggatttgctggagctaaagagactagaattgttggtaatacttaaggcaagagtgggatggaacaaatggtaaaactgaatgagatggtaaaaacttctctacaagcactcttaagagaagaaaataaaatggacatgggagaaatgaatcaaacttcttaagttatgttcttcatcctttttagaagcttccttttttaacttctttatgagtactgataaacctaataaagctcagcacctatacttcccttatcaaagacagcatttggaaacatggggtgggacaacttgcttgttggttaactttggatactttttctccacatgcatttgaattggggcccaagaaaacagttttcacatgtgatttgattttctttttcctcgattgaaattatggaagtaaaactgaactttctttcagaagtgagaaattggatgtatccatttttagtttataattttgattctcgtctctaatgaagtttcttcttctatacacaaaattcaattttttgaaaggctttctgctggcaatggtttgctatacctacttcttttaagctgtcatttcttcacagaaaataattgttgtttattcagaggcacgtgataatgcacatgagtgtggaagtgcataaaaaaaatagtatttagaaaagaaattctgtaacaattttaattaaatgtttctttttgtttgtaaaaattgaatatatgaaaatgccacatccccatatataatgaatgatacgttggtagcgatttcaaataatgttagttatttatagctaattttagcctttagtttggtgtttgattttgttattccacagggcatctgataactggaaaattttgaaagagctag

SEQ ID NO: 22896 - DNA, 449 bp, Glycine max
  Intron number 2 from transcript Glyma07g01280.1 (locus Gly ma07g01280) derived from phytozome v7.0 (chr-ID Gm07; pos 814157 to 814605)
cgatattagagccccatagcaaaactgttgacccagttaagtccaaaggacaaaggtagcactaaaattctttatggcttgtgaataaaataattcaatactatgcttttgttaatgtatacatgaatatttatactctccctaacgcaaaaaagttagctaagacttcacaaaacctctctccttctccctcttcttgcacgcgtacacacacatgcacactgaaatctttcataaagaaaaacgtggttatggctgtggccaccataagattatgcatatttaaaccaaagctagaagtattatagagtgtgtgagaaaataatggacaatatttggattgtgtttgtgacagtgtttctcttatgcactgtgatcctctacaggaacaggcttagccttatgcttaaatcaaaacgtaagaataagcttccattaggcactcttgg

SEQ ID NO: 22897 - DNA, 677 bp, Glycine max
  Intron number 2 from transcript Glyma07g27310.1 (locus Gly ma07g27310) derived from phytozome v7.0 (chr-ID Gm07; pos 30297377 to 30298053)
atcttcagaagtattttgattgctcaaatattcaggttctcttctctcttgtctggaatcagttcagtttcttaacttcttgtttcattcattgcatctatgttttgattgatttattttggttgagaagtgataacagtttgagtatatggaacttttatgtagttttaattgttggaatggattgtctgtatagctctattaacttttttttttgtccattgatcatagccttgtatgatttacagtatctaaattattcaaaagggtttaatctagattccaggaaagctttatcttttaatgcgagtttagaaactagttgatatgtaaaatatcacctcaacttcactagacaatgtgaaagttataactactagcttatgagaaaacatgaaaaaccacatctagatggtgaaatcaaacacgctattaatccttgagggaagtatattactattgattttctatttccatcatttgtgtaataaggcatttctttccttgaactataaattagtataattggggatcttaatgcttaattggactatctgactcacagatcccaaatgaccttttagttttttaagctctgaatttgcgtttctaattgaaagatgaatgactaatgatctgaattttcttcttgcaatggtgacatttttggcagactt

SEQ ID NO: 22898 - DNA, 709 bp, Glycine max
  Intron number 1 from transcript Glyma05g38230.1 (locus Gly ma05g38230) derived from phytozome v7.0 (chr-ID Gm05; pos 41615524 to 41616232)
agcctggttgaagcttgtacctagagacattggcccatctcccaaaagttattgctcaagtaccatgttcactgaccaattgacgttgagaagcgtgcacagtgcacaggtggcttatgctacgggcaaagaaccttagttattttgaaaaataaatgttagtcaatcagaatacttaaagatattatattagttaagaaactaagataagaacatatttaatgtgtaaataataagagaacataaaaaaaattatatataattttttattttctaataaaaatatttctactaacgaatatcctaacatttaccaacaaaaaatcatctcaaaatcagaatcacatgcccatgcatgttccctcacatgtattacaattaaatcagaatctagatccactataagaagaaattttccattccttccatgtaccaacattgtacccttcgaacgttttactttctctaaggatcttccactcctaatttttctttcaaaaggttgagttgagatcaaacatagaaatgggtatgtcacaatttgttatgcatgcaatttcttcgttgactttgcttatgttttcgtcatttcattcatcaatatcttgaattactaaataatatttagctcataaacagcaaaaattaattcatataaattccatttttcgcaggccagtgacgacgttgttgtaccctttgtgagtat

SEQ ID NO: 22899 - DNA, 717 bp, Glycine max
  Intron number 1 from transcript Glyma07g39070.1 (locus Gly ma07g39070) derived from phytozome v7.0 (chr-ID Gm07; pos 43665346 to 43666062)
ttctttaccaataggtacttgtgcttctgggtctctatatttcagcatcaagtttgattttattttatttttagttgttttgtgtgactgtgagtgatggagtttctaggctgcaaagggggttatgctctaaggaagaatctttcattgcctgtgccttctgccatggggcatttaatccatacttgtataaatatttttgttcaatttcccctatgatttttgattggtttcattaaatgcccaaagctaattcagactcattttattcttttctctcattcactttctttttttcccttatgttccgctgaatcaaaaaaagggataggtgggtatctatattttattcccccttccctctctctttatatgtagttgctgaaaatcgtgaagttttaattgaatgaagacattggggtgagcttaattaaatgaatgcttcttttcatatgcatgacccgtgatcctcaatttattgacattttttcatctcccttgattttagccctgcttgtttgagaacacatatccaactatgaagctgggtttataaattaaatgttcacaatctctgcctttattatcagaaactgaaggtagaggtccttttttttttgtccaatttctactctattagtatttattaaaataagtctggaatgagataatcattatcatatgcgaggaatgctaaccccaattgtatatcaggat

SEQ ID NO: 22900 - DNA, 738 bp, Glycine max
  Intron number 2 from transcript Glyma07g39070.1 (locus Gly ma07g39070) derived from phytozome v7.0 (chr-ID Gm07; pos 43666119 to 43666856)
taaaactaaactctgagggctgtaatctaaatctagtaagtatatcagttacacttttacttatgttgtatttttgctatgattctgtgttggactttccccctatcccatattatagataatagactgtcattgactgctactggaatttataacaaccttaaaagtaccctccccatggaatgatcaggaaatactactggttagttcattatttgtatacacatgcataatggaatgggggaaatgtcactaatggacctttgtttttggtaactgtattcattgggggtgaatgttccttcagaattaagctgccaagtgcatgcctaaggtagtgtttgtataataagaaactcctctaattagtttctatagaagttttctcttttgggtcttgttcattaaaaaaaggatacatttatttttaagagctttacaaggattgtatttggcccaacttctccttttaaggagaagacagcaacaacaagaaaaccttatcccactaagtgaggttggctacatagattacacgataccattcggcaggttaaaaaccaaagtatgttgggccaaatgttacgtattcttgtctctgatatgccatctcatttggatttgaattttggacaacaggcacatgccaccaatacattgtatttacttaaatttaatttaattaaaatattaacaagggaagaaagggttgaactcttgcttggctgagaaggttct

SEQ ID NO: 22901 - DNA, 887 bp, Glycine max
  Intron number 1 from transcript Glyma06g15850.1 (locus Gly ma06g15850) derived from phytozome v7.0 (chr-ID Gm06; pos 12460772 to 12461658 reverse strand)
acattggcgtttttcgatccattgacattttggaggttcgttgctttcccactttactttactttcttttcataaaacatatattaaattaaattctgggtcgtcaacaagttggttgagtaaagtgaatgagttcttgtaaacttcttgatattatgctgtctttgattcctactgatggttatgcgtttttgtgcctttaaatgacatgacttacttcttgtgcttagttattcggggctttgattattgggtgtcagtcacaatgttgttctgattgagggtttttataatgccagagataaattgtgtcaaggacaaagtttagatgctgtattttagattttttttttgctagttttctaattagaaatagaattatagtttcgtatcgataattaacataataaagctaaacttcatattttacgggagaataacacaaaatgtaactaaataattgttttaagttttatctcttttttttcctctaaacatccaagacatttgttggagcgtgtttgtattacccacattccactttccaatgcatgttccttctctcacagtgggttggcgttgaacgtgactaaattgtgtttcaaacacacccttagatatgtatgtttttttattggtttcttgcatagcttgtcaatgcgttcattttatttatatttccctgaaatgtttttggtttgagggaatagactgtttccttaggaaaggttccaagggtcgcatgaaattagaagaaaatgcgctagaaaatgaattttgatactttcggtattgaagcaactttttttgtgttgagcctacacaatggtgcctctttagtctcttacatgattgtttgattgcattactaggtttcagcaggcatc

SEQ ID NO: 22902 - DNA, 1012 bp, Glycine max
  Intron number 1 from transcript Glyma08g09390.1 (locus Gly ma08g09390) derived from phytozome v7.0 (chr-ID Gm08; pos 6710875 to 6711886 reverse strand)
actccaaaggttaaaaaacaaaaatcatttagaaatgccattgccacatacctctgaacccgcattcctgtacgagttgagatcagccttaccacgcgccaccgggacttggaccagttgaatttgcgggcatgcctccttggcttcatcccctcgcattgaactgcaaaaaaaaaataaaaaaatcacaggtaaggtgaatatgaaagcagagaatagaataaaataaacagtaaatggcaaatttagtatctgaaactgtgattccctgtcatttttgtccctagaattaacgaaattcaaaaaataaaaataaaatccagaatatgtaattgtaatccatcactcactttagtccaaagttacatggaaagagtgacttaagtgataatattaagctattaaatttagggacttagatgaaatgaattacaattggagatacaaaattgaccaattactctataaaatgaacagcgtggtaatgtgggagtgttgataataaccgtttgacgccacatcggcgagcctcatagctaacagcaatgagggctccacctttgtaggagttgtactgtatgactgcagagggcaagcctcttaaatttggttgctttctctgttccactacacaaacacaaacaacatcgtataatatatcactaaattcacttctcaaattaaagcagaatggaagggttatgttaccttgaacatagaagcaatccatgtctacatgagcaatcactcttccatcgcacgtctctcgcctcgccaccggcatctcctcttctcttcttttccctccaaatctgtttttcccctttttccctctgcaccacactcacatcacagtcacactttataattattttcatttattacttttgtttatgtgttcatcatattttgatttgggtcaagtttcattttttttcattttgggcttctaagaacctaggcccataaaaaccaagccccaaaacaaacctttctgtaaccctaacactgc

SEQ ID NO: 22903 - DNA, 592 bp, Glycine max
  Intron number 1 from transcript Glyma08g09990.1 (locus Gly ma08g09990) derived from phytozome v7.0 (chr-ID Gm08; pos 7171866 to 7172457 reverse strand)
tgcagtttccttaattttgaaaagtttgatcaaaagtcaacatctgataaaagtatttatttagatcaacatcatcattagaaacaccagcgtaattcaatctctaatcttcaaagatatttgcatagcgaaggttcagatacagctttgaagatatttgcatatctgttgaattatgtgcatttcggtgggtcatacacaacaaaacaatatattatatatatgatggagcatttcttgactagatataaatcaaacttctaattaattaaacttttgaagtggcgagggttgaaggttcataacaaagaccaggattggaacaagaaactcagctagccgctattgaaaaaatcaaaaagtcaaacgacaaagtgaatactaaaaaggaaccacgtcaagcacaacaattactcatattgtatacctacccttctttcatttgaattatttctcatcttcttgtgcttcttattcctctaatttgccaatggataatgataataatgttcatgtgaggttcttattctttacatcactattctttttcttaacagcatccattagtgctcaaaataacaacaccaaacac

SEQ ID NO: 22904 - DNA, 759 bp, Glycine max
  Intron number 1 from transcript Glyma06g07750.1 (locus Gly ma06g07750) derived from phytozome v7.0 (chr-ID Gm06; pos 5687181 to 5687939 reverse strand)
ggaattttgaggtgcggggattttgtttgtttttgttatttatctgtttttcttactgtgtggatggataacgtggttcttgaatttgattgcttcttcctattgttaagggatataccggtgtttagttttcgtggatggtgatatcgggagtggctgttgtaaagtttgaatattctttattaatatatactgttattctgtaagttgattccttgtgaatttagtttgtttgactactagcttcttataggtgtttagtttcataccaaagggttggtatagcggtattagtgagaaccatctatttagttagagaacccgtgatcagtgagaaccatctatttagttagagaacccgtgatcgattctcactgtgtgcaaaatttccttggaccaggacagtcatgagccgcaagtgagattagtttctgacacactgggttgtggggacactcatggtccatgacccaagaccaattttaggtttcacattgcaaatttgatttcttacttatcaagagtttccaaatacactattagtaaatgtataaaatcacatgagatgcggaaccaaccatgctaatatagtgtattttctctaatttgccaataaaaaataaaactagtagtctagtacaaactaaatggcagacaaaaacaaactatgtggcatcactggcatgcattcttcccaaagataaagcacaattataacaaaaatgttacaggaaagtgagagtgaggaagatattttgg

SEQ ID NO: 22905 - DNA, 605 bp, Glycine max
  Intron number 1 from transcript Glyma08g10900.1 (locus Gly ma08g10900) derived from phytozome v7.0 (chr-ID Gm08; pos 7949299 to 7949903 reverse strand)
accatcttcttcttcttctgctgtctcccccataggtatcgtatcatcacactaactttctcttccttttgattttcctcccctaacattcacacacacacacacacgtgccaaatcccattcaccagagggagaggacactttctggggggttttgtttcactgaacatcgcgatgcttatacgactcgtgtttctgcaattcacctttattttcacttttttattatcgcaattttctcttttccccaaattttaaagcataacctagaccagggctttcacacaacacaggttacggctgtcccagatctgatcccgaaatttgtgttattacagagaatgagataattcattagaacacttcaaattttcgccgtaatttctttattcatgatttttgccaaggtttaaaattggaaagcagtttagttgcaattctggatgttgtgggaaattgtagacaaatgcggctaatgtggcggaaatttgtggtcacgccgattccaaaaacttgattttgatttttggcattgtattattatatgatctaaattaacatgtaggattgctgatgctctggtatttttccccttcattgattag

SEQ ID NO: 22906 - DNA, 468 bp, Glycine max
  Intron number 1 from transcript Glyma07g36640.1 (locus Gly ma07g36640) derived from phytozome v7.0 (chr-ID Gm07; pos 41982069 to 41982536 reverse strand)
gaagaagatcaagaccaagacaagactaagaaacagtgagtaatagcactaataataataacaataacaacttaattatttttctcaattttttattatgttttttttttttaaaaaaaaggaatgaattctgtatgtcattcaatgtggttgtggcaaataataataaaattaaacgaggataaagtcggttacagttgctaacagacaggggtgctgagtggtgacaattgatgggagattaggaggtcgttttttgtgtatgttcattgaactttaaagcaatgggttttcgttatactgtcatttctctccgatttcatcttcttttgcttaattttgatttcttatgtttgttgttataacttattataatgaaacccaacaaaaacatgttaataattattggtttttgctaaaattccatgcttaggctcaagccaaaaaagaagaaccaaaagaagcaaa

SEQ ID NO: 22907 - DNA, 571 bp, Glycine max
  Intron number 4 from transcript Glyma08g37570.1 (locus Gly ma08g37570) derived from phytozome v7.0 (chr-ID Gm08; pos 36344916 to 36345486)
cagtattccctccaatttagcattattatttacctcattatttgttgagttctgtttgattattccttgtataattctcaagaagtctacttttttttattggtgtcttttgtaggtactaaaggagttgaacctatacctaccgttcagtactaatgtgttacccagtgaaactataatgatgagtttttcagatcttaagtttaacttcaacctaaattgttaaatatttgaattgaataggagaagctttaaaagttaatggaaagttggatcgttcgaagatttacatagaaagtagttcttgtatgcctctttcatttttttccctttcctccgttaaatctctccaagatttttacgtttgtgacctctaccaatcattgattattattgagtcctatctatcatgtttcagttacaggttacaaactaacttgttatttaccaatagttaagtcttaatgaacttggccatcaaggaagaatattaggtgctcttcatgatcaagtctgttgcatttatctatttccagggaggaaaaactagtgcagcgtgccaaactactta

SEQ ID NO: 22908 - DNA, 847 bp, Glycine max
  Intron number 1 from transcript Glyma06g40700.1 (locus Gly ma06g40700) derived from phytozome v7.0 (chr-ID Gm06; pos 43864076 to 43864922)
cctgccaaagtttatattgtgtatgcagtatgctcacattttaacctttgttgtcttctttaattgattctttatatatgtgtgcactcgtgtgttataattatagcttgttaatcattacctgacatgcatgatgcatgcttctcggtatggaatttcgttcattgggtttcttttatttcttcaatgggttcttaaatttgaaatcttttagatttcaatgttctttgaagatcttggtgtctaactttgaaagatatgatgcattcttgctctgcttctgtttttccctctgttctgtaacgatacaatggtttgtttgatcattggggatgttgagagattttccataggagccatgaatgcttaaagtcttgtgcttttctattttcccaatttgtaagaaaacttgattgtgttcctgattcattgactttctgaatcattgaacatcttctttggtattccatcattgccattttctataatgaaagcacatttcaaaattgttactcaattagaaaataggttttcagagcttgacaagttgtaagctgtgtgcagataatatccatctacaatgatttgcaaatatatcaatcaactagttcttatttgatatttaactttccttttgtttttattcttttactgataaactataaccttggtgtttgcagtatctaccttttcataatgtgattttcatttcctctttctgttgtattgtccccaataatattgctcaatttcccttttcattttcatcttgtactgaattattgacgatgtttcaatcagcttcatttacagaaagaatttttattttttttgcaggtattactca

SEQ ID NO: 22909 - DNA, 919 bp, Glycine max
  Intron number 3 from transcript Glyma06g26590.1 (locus Gly ma06g26590) derived from phytozome v7.0 (chr-ID Gm06; pos 24376120 to 24377038)
ggttctttacaagtggtcaagtttttcaaggagagaaagtctcagtctagacatctttagcctattattgatgacatcattcaaaaccttagcaaaacggattagataactaagctttcccgttcctatggggaggccaacctctaggaaaacttcctggtgaactatgggcatcatattgagtctcattttcttgttatagatgttgttcccccaactatgatatcctccttactgttagaggataggagagggatagcttttccacactttgttgcactgtagttttttctttggttttacccagtaataaaaaagaacaattgaatgtgtaaaaagtgtgacaattgcgccttgtccttaagtttttgtagaccattttgtcattaaattgtaatgttcaaggaccaatatgatattaagttatacgaaacgtaattgtttcatttcttgcatattcatagctaaattagaatttttattttttcaagaactaaattgtcatcatggctttacactttcatggacaaaagtggatattttcctggtgttttattctaaaagcaacttaatagtaaaattcaatatttaattttttatccaacgtaaaagctatccaaaattacttcaacttaattcatgtaggtaggacccagaatcaattcttcaaagtgagaccaagcaattgaacatttaactaaaaacaccttagctagtacttcagtactttaatttatttttgacaactcaacataaaactaagcacatacttaaactgatttttgacgactcaacataaaaccaaacgcacattaattgttaggtatgctcatttttgttatgctatagtttgttgcttcattaggataatattgcggcctgagaaaaagatttcacatacacaaaggaatttgttaag

SEQ ID NO: 22910 - DNA, 323 bp, Glycine max
  Intron number 3 from transcript Glyma07g02940.1 (locus Gly ma07g02940) derived from phytozome v7.0 (chr-ID Gm07; pos 2016772 to 2017094)
gaggggtaactatgcattttaaaaaaagaagaatcaaaaaagttttatgaacatgctaataaaaagttgtttcttttccttttgggtgtacttttaaatgtatgtgtacaaaaaaaatgagataaagattattatacacgtatcacataaaatgtcatttttttatgttcaattgaactagctagaagttaaaaataataataatcctgtaatggtatactgtttgcttagtttttgttctttttcactcggttttcaatctcattggcattctcttgaaacacacagggcaggccaccagattggcaggacttcgtgggaat

SEQ ID NO: 22911 - DNA, 869 bp, Glycine max
  Intron number 1 from transcript Glyma06g10940.1 (locus Gly ma06g10940) derived from phytozome v7.0 (chr-ID Gm06; pos 8296249 to 8297117)
actagcgcgtcgcggcggaggacacacgctttcaagtataaacatatttaagaaaagaaacacacccaccttaggacttgaactcacaaccacaagattaagagccttacgctctaccaactaaacttgacggataagttaaaattaattagaggttgaatttattcatccactattttggcatgcatatcggaaatttaacatattacatgcaagcaaactaaattgatctttctaccatgaaaggactagtcaaaaataattttttcatcagtaaaagtgttttctatatttgaactatgataccaaacatttagtttattttataaacaactttttttcctaaaaaaataactgaaatctcaaaattttagctttctcatacataataaattgtataattttcaattaatagtaaagagtttgttatagaatatattcctagcccctctttttataaatcaaaatacatgatttaaagtgtaaaactctcactcttttcactatgtcaattatatatatttgttcaaatgaaaaaggcttatttatacgaaatgcttttagtaaagatgcacaaattctttgtattgcaccaaagcaagttttacagcttttcaggcattctagttacctttcttttacttgatttaaaatgctttagtcttccttttaatcgtgttcctacatttgatatatcatttttcagttttagcgaatttatttaccaagtgctaataatgacacactactgcttaacagtctaatttgttgtctaaaatcctatggagttgaatttgaaactaatttgccacttttactatgcatactgattgtttgttgaatcagggtgccattgatatcatttctcc

SEQ ID NO: 22912 - DNA, 690 bp, Glycine max
  Intron number 1 from transcript Glyma08g11590.1 (locus Gly ma08g11590) derived from phytozome v7.0 (chr-ID Gm08; pos 8456431 to 8457120 reverse strand)
ggggagtccctttcctgtgtttttcagtgcagcaggtactacatcatgaccaaaccctatgctttacagtttttgcttgaatgtaatatatgtattgcctcaatgtggttttgagttgttcttggtttggttagttagcagtttcactttgttgccttttatatgtgtaataataagctggttttactaggatgtaattatgggtagtaataaaacaaacaataacgaaagccttatctcaccaggtgaggttggctacatggatcaaggacaccctggttacctgttgtgacggatctgtgtttagtatatctaatatcaacgagtgttgtgttggctgccgaaggtttaacacgaccctcttccattacattggcttgagattggctatgcataggcggagttgtggtgggtagtgacaaaaaaataaaaagagagagaaatattgaagttgaatggattcaatggaaaaatccctcaatttgttgctgagattctcttttcactgttgaatttgtgatatgctgtgtacaatgctgcatttttttccttacacagaaattgttgataaccttgttgctgtgtatatgcatgtcttttggtttgtaatgatctttgtggaggtcaactttcaatgctttgatttgttttgtaggtaatagtactggagggctgttgggtttagctcct

SEQ ID NO: 22913 - DNA, 826 bp, Glycine max
  Intron number 1 from transcript Glyma07g10270.1 (locus Gly ma07g10270) derived from phytozome v7.0 (chr-ID Gm07; pos 8574249 to 8575074 reverse strand)
agattgttgaggttcagttcttgcccctttttcataataaacacttagcattatcataagcacataacataggaccacatacgacaattactagtttgaaaatgatccatggacactcaagtgtcaatctacacccatagagagaacaagagagaaatgtagacatggtaagtgatatatagcgtgtttggttttacatcccaatgtagtttttcatgtttactaagaaactagtagttatggcttacacatcttagaggcgatttcttgcttctcaatgggtttccaaacgaacatataatgtgacaagaaaagagagatagagaaaaatgctggatgttaattgagtgtttgcattgttggggtgtcaacaaatattactcttactagttagttcacttcattgtggttcttgtcttaggccctttttggagaaacttctcaataaaaagcaaaatgtaaatggaactttttccttaagttaaaatcaacttatgcatatctgcttttgcataagtgagagctttttacaaagttgaaatgcataagttgattttaacttatgagagaagtttgatccattttcttcacttgtaagtgcttgtggggaagtttctccaattagggtcttggtagttgtgagttgcatttgaaatgtgcatttgtttgtcatccttgacagtcaagttagtatgctgttacttgctgtgtgattctgtgtatgttgaatggtgatgttgactttgtgttgtgtttgaggaacatgttgactgattggctgtagtgtgcagcgtcgaactggaggattggttacgtggaggtcagg

SEQ ID NO: 22914 - DNA, 311 bp, Glycine max
  Intron number 1 from transcript Glyma06g07660.1 (locus Gly ma06g07660) derived from phytozome v7.0 (chr-ID Gm06; pos 5615265 to 5615575)
ataagtgtactaagtcatcaaagtttcaggtaagcatgaagcactcactttgtcgtcaaaggcagattttttttttcttcaaatcatcaatgtttaaataattgtagtgataagagaagtaatcatttgtttctttgaattgtttttgtttcaaaatacaaaaacatttgatccagtatactgtatttgctcatcccaaaataatttttataattctactaagttgcaaattcattggtatcagttggtgatgctggttgaatatccattatgtaggccaaaggagtttatacaaagaaaaccaccaagct

SEQ ID NO: 22915 - DNA, 514 bp, Glycine max
  Intron number 2 from transcript Glyma08g08720.1 (locus Gly ma08g08720) derived from phytozome v7.0 (chr-ID Gm08; pos 6222421 to 6222934)
ggacaaaaagctgtcaagaatagcccttacccaaggtacaaaacgcgttttttctcgtttctttgcacccaaattaagatcaaaacaaaaatcaagcctagctaaaattttcacataaaattacttctcacacaaattccctttgccacactttccacaagaaggaaagatgtcagttccataaaataaaataaaaaactcatagatctttacatttcaaatgaatattctatttctaatatgacttactagttattatgattataaaaccaagtgccaaaaagagacattactccacctgattaaatcctttagagaaaatcaacaaattaaaagtaaaaatcaagctagaccccattattattttcttcacacacacaatggtttcgatttgtttaatttaattaccaatattgtagtagtaatggccaaagtgaaaaatgaagtttaatagatgatgaatatgatgataattgcaggagctactacaggtgcactacacagaagtgcacag

SEQ ID NO: 22916 - DNA, 528 bp, Glycine max
  Intron number 3 from transcript Glyma06g24840.1 (locus Gly ma06g24840) derived from phytozome v7.0 (chr-ID Gm06; pos 22642769 to 22643296 reverse strand)
ttcgcgcaggagacatcgtggtttacaatctagatgtatgtatcatcccccattataattttgttttctattggctatgaattttgaaatgctttggaattctaatatatgaatttgttgttattcaccatcatgcttttgtacttagtaagtaaatttatcgttgacatgaatatgtttgttttttcatgaaaacattatgatattatttataaatttataaattttttattcatatcattgattttattttaatgaaatttgatctagaaaagtggtaaaattgaaaaatacctccaatattacatggcaagacacattgacatgttgggactaagaatatatttttagtgtaaaattcttaagggatttcctagattaccaattataagaaaccaacatgatcttgaaacctatgattctcacaaacaacaaataaacaaataatacgtatctttctccataagaagatttgtacttttctccataggaagacttctctccggtgtactttgatttccttggaag

SEQ ID NO: 22917 - DNA, 873 bp, Glycine max
  Intron number 1 from transcript Glyma05g08550.1 (locus Gly ma05g08550) derived from phytozome v7.0 (chr-ID Gm05; pos 8402756 to 8403628 reverse strand)
gtccgcgcccctgacacaagaacaataacaacaaggtacgcacgctgttatgttatgtctcctctctctacgtttaccatttttatgttcaatctcactatcagtgtcatcacaaaaacgtgaacgctagctggtgggttgtttatctttgcttctcaacgttcttgcaaaacttgcttcttgtgttgttgttaaataaacaatttcttatcccaaaggttgtgttttcgtgtgtgttttttggtgggtattttttttcttctttttttggttggttggtttgtccaactgcatattcttcctactcttttctctcttttaatctctctctctccaaccgtatgtgaaaaaattgttctttgttctttgttgtttctgaaatctgaactttatttgctctgttgaaagatttgtatcatatttctctttttctttgactttcaccatctgggaagagggaaagagggggtgtttagtttgtttttttgagtgaatttcccgtgtttcacattaatttttaatgctcatttacgaaataagagtttgcatgtattgctaagtttggaatttggttctgcatatatggttgttgataatttccagattggaagcctgtttacgctgatttggaatgttaaggatggtggtgttttacttttatgcctttcttaactttcttgtatcactgttttttttttaaaccaagtgttgcaactgtttcattagatcacattttcctctctcaatggaactgtttattctttgactcattgcgatggcaaatgtctaaaatgcctaagtgaagagttcatgtttgtagtttttctttaatttaatatctttctgcttttttttttttacaggggcattgta

SEQ ID NO: 22918 - DNA, 389 bp, Glycine max
  Intron number 1 from transcript Glyma08g20820.1 (locus Gly ma08g20820) derived from phytozome v7.0 (chr-ID Gm08; pos 15798257 to 15798645 reverse strand)
ccttggaactctctcgtaagcatttcgtgtcatgtctttgtttgtttgtttgtttttttttttttctgtagcaaaaacttagatgcaattcgtcacatgtttttgtgttgttcttctatcaaaactagagttttaccttcataatttgtatagtaaaagtttgcatttgcattaaaaattaatgtgttattgaggtgaaactctaattttaaggtgagaacacggtactaaaaagtacgaattgcatctaaattttgtatttttctaattttctctaatactctgttttgccctttttttaaaaaaaattttaaatttgcaaaatgcattgttttaatgaaacgaataaccgagtcttttgtttctttgtttcggatttgcaggacagg

SEQ ID NO: 22919 - DNA, 626 bp, Glycine max
  Intron number 1 from transcript Glyma07g18670.1 (locus Gly ma07g18670) derived from phytozome v7.0 (chr-ID Gm07; pos 18702991 to 18703616 reverse strand)
cttctggaatcgctggcttcactgctgcttactgggtacgtatattttactttcattttcttcataaacacaaactctagtcaaatttgcttcaaaagtctaaaggctagctccctagccaaagtttttaatattgtgataaattatggaaagaagatgcggctgtggttttgttacaatctttcatattgtgagaaattgcaaaacaaagtcgtccatgtatccgcaattgggatcccatgtggggttatggagaggccaaaaactttgatgttaaggccatatttaaactgtctttggttgttggtttttggttttcagcacaaatactaaattcagttattttcattttagaagaaataaccttttttttcttctttttatcaattttgataatagtttttttttatataaaattaatgttattttcctaaagtaacaatttccaaacatgttaatgttggtataaaaatcaacctattaatatttgatcattaattttgggcaccaaaggaaacccacatgctgattattcatttattgaatgccaatttggtttttgattgtgtgtgcattaaatatgttgtgcaggttggaccaaggttgaagagtgatagggagaggtt

SEQ ID NO: 22920 - DNA, 569 bp, Glycine max
  Intron number 2 from transcript Glyma06g14980.1 (locus Gly ma06g14980) derived from phytozome v7.0 (chr-ID Gm06; pos 11750264 to 11750832 reverse strand)
agctcactgcatttcatttttggtaagtttttttaaacaatttagctattagcaaattgatatatgattaagaaatgacaagttatttgtgtgtctaatttttggtgactattacaagtgtgttgtttccatttgtgtgattttgtatatgagtcattcaagtgtttcataattgaattgactgatggggttagtctaccctaacatggagaaccaagtattaaatccttaatgggaaagatgtttacatttagtatttgtcattcgaataagattgcctttgaaggaggatacatgtggggaacaagaaaaaaagttcaatggaggactgataagctttaggtaggattctttaaattagaagaaatggggcttaattgagttgtcatttcattgatgaaagtattaaagtttaaacttttgatgtgattttttaacttttgttagaagtagctccatgctgcatcctaacccatttgaagtataatgtcctagagttgaggttttaatatgtatccttgaattcccatgcagctacaactttgacaagttggcatcttcttgtaaca

SEQ ID NO: 22921 - DNA, 774 bp, Glycine max
  Intron number 1 from transcript Glyma08g04450.1 (locus Gly ma08g04450) derived from phytozome v7.0 (chr-ID Gm08; pos 3147313 to 3148086)
ttcaagacccttattctcgttggtgcttccccaaggtatcatcttcttttctttaacttttgcttattagtttggtttgttttgttttgctacccttgcttgcttggatctcttggatttgttcaattgttccttactatgaacatgatcagttaaatttgttgatcgaattgaaatatttagtaaaattaattattaatttagttgataaagatgaacaatattaaaacacaaaaagttatgatagaacaatgagatttttttttataattaaaatatgttagatccaattttgttgaataaatttataagttagtaaaataaattaagagttaattcaaaattttgttaacacactcatgatttcttagtttatttgcaattttatagaatacaaaaatattaattatttttggacatgtggtccacgatcaattcacgctcgaaatagttcgagtactcgtacggcggggctgtgcctgtctttaataacacttccgtaaaataaaattacacagagcattgaaaaaaaaggttcttagtttaaatattaaaatacaataacatatgatttatttagatagaatatttatctattctaaatcaatgtaaatagtaattttcaccaacaaaaaaagtgaatagaaattaaaattcaaatacctctataatatatactttagtcttattccacctttttggctataagtgtaaaaggattagtccttctaacttgttggtataataatatgtaatgcaggtttctaaattcag

SEQ ID NO: 22922 - DNA, 353 bp, Glycine max
  Intron number 1 from transcript Glyma08g01980.1 (locus Gly ma08g01980) derived from phytozome v7.0 (chr-ID Gm08; pos 1310002 to 1310354 reverse strand)
agaagggtttgcagcacaggcgatttgcaggtaaaaataataacaccccaacaactcttctttttttattataaattatattttctttcaaaaacaatcttgttcgaatgaatgtcagatattaaatgttatagttcttctaatgataatttaagccttgattcatcgttaggttataagagagtgaattgttgtatctcattattgtctgttaataaacatcatgatacagtaattattctaatttgcttgttatttttatttgtataatttttctttaaaagttggtttgattgaagcttgttttatttgttgaaggaatcgaacttcaaagtagggcgttacagtgcgga

SEQ ID NO: 22923 - DNA, 1048 bp, Glycine max
  Intron number 1 from transcript Glyma07g01030.1 (locus Gly ma07g01030) derived from phytozome v7.0 (chr-ID Gm07; pos 600206 to 601253)
ctggcagattgtgctgttgtttgtgaggagctgtttgttcaatattcatgcttatgatatttttttcgtgcctaagggatttgtgttgaacttaatttctatacacagtcactagaagataataaacttatcatatctaactatttctgattagattacacttttaccatatagaatattttctccaaatagaattcattgattagtaccagtacccaatctatttaaatattagttatttatgtttctttcgcaaaatattttgtttccttttatagtattgaaaataataatattttttcctctttttaaacaaaatattctggtgttatttatgttccttattaataatttttatcttttataatttattattgctaaattaaagactttaaaaaatatttacattacaataaaagaattaacaacttggatttttttatcaaaaagaaacttaaattttaagatatatcaacatgtattatctttttattactattttaaattattttttatttctctcatctcatatttatttttcatgttattatttagtataaagattactatatagaatatatacaataaaatatatgaagaaattcgtccgcctcttacatatttgatgacctctccaataaaaaaatttgtaatacctattccattccgaattgcatcaattatttttttataaaaaaaaattgaattttactaactttcttacactcataattaaagaaagatatatcataggtttgaatgtacttctaactttaaggttatgagtataaattagaatttatgagtgtaaatgtaattgggtaaattatggaaaaataaactaaacatcaaattgtatcaaacattcgtcaaaattttgctttaatgaattcttataacataattgaattttttttcttttatataaaaatttacaattaattggtccgtctcagattagtgtttaattaattttccctgaatgagagttttctttgaaatcttaattacaggtggaagaaggccttagacactgttgctgttagtc

SEQ ID NO: 22924 - DNA, 1023 bp, Glycine max
  Intron number 2 from transcript Glyma06g13640.1 (locus Gly ma06g13640) derived from phytozome v7.0 (chr-ID Gm06; pos 10759558 to 10760580 reverse strand)
cttctgctgcatttcctgttactgctgctactcaggttttaattgagcttaaaattttaaatgcatttgctaggatatcttattttgatctatggaagttcaacaaagaatcatataataattaattgactgctaggttcttggggttgcctgacttgcttgcagtcatgtaattaaacttcatattttagaaagaaaactgctgggattgatatgccttgaattcccaatattcactgttaagctcccatttgcaaacacaagttaaaggagaccacttgtttgtttgttcattagttgctttgtggaactgtcaagatgatcgactaaggttgcaaaaaatgaagtggtttctctctcaatgtatcttttgattcctttcagttaacatgatataatcaacatattcggtcgttacagctgataaggtgatttttctttggttacctacttaccataggaaggaatgatggatagcttatggttttgaggatgtatgatgattgatgaaatagttaaattttgttgaaggcaacaaatatgttcaaattataacactcagcttttgacatgctaggacacttgaggcaaaccacactactttgtttggagtatggttccttctatacgtggggtttgattaggaagcctattacaagtttggttaaaattagactatcttcagaaacatttctctcattattctgatggtcttttgaataaatcctaagagcctcacattgatgtccttcacaactttgcagatttgacttgcctcggggaatcacaaggcctattttcataatatattcttcttttcttctctgattaaaataaaattttcaaattattcagttttagtagcgtgtcatgtcagttataaatgttagcaaaagtttaaatttgtgaaagacaaatgtgatttacacatgtcttcaaaagaagcagttgaggagagaatgcaacacccactatgttttccttgcagaggcttcccccattgtcaactgagcccaatcgctg

SEQ ID NO: 22925 - DNA, 767 bp, Glycine max
  Intron number 1 from transcript Glyma08g27520.1 (locus Gly ma08g27520) derived from phytozome v7.0 (chr-ID Gm08; pos 21816672 to 21817438 reverse strand)
cagtccttcggtcagaccgagatcaactgggacaagtattctttcttcttcttttcctttttttatttattttctgaacgctgctgttgatttatcatttttgttcttgtttgctgtatttcgacatacccgtcattcgaaaatcataaattggtataccatggcctctaaagttttgtttttttttgaataattttattgggggtgggggagttatggcttctggtttgtttgtattttgtgaatcgaaaaagggtaagctaatttccttcaaaagaaaaaggataaaaaagaagcttgtgaagttcccgatttgatgggaactactaaacagtgaaagattatttgttaataactgcatatgtgaaatcattgtgttgcattctttacttgtctgcaacaggttatctttatattcatatagtgatttactcgataagacgacaattttgagttcatatataaaagattcaagataattgcattatactgcttgaattaatgaattgattccattttcctattaggaaagttctgtatgattctagatatgccctttgtaaatttgtgtgctctgtctgtggatgctgattcttcatgaagattgtggccttctgccgtcttggccttgctttggtttattaatagcatatcttacagatattgtgacctttctgagctcatggtattataatgaactttccatctacaagcttttatcctaatgaaattctcccaatcctgcaggctagataaaactagattct

SEQ ID NO: 22926 - DNA, 903 bp, Glycine max
  Intron number 1 from transcript Glyma08g02470.1 (locus Gly ma08g02470) derived from phytozome v7.0 (chr-ID Gm08; pos 1703306 to 1704208)
ttttgcattccttgcgccactgcgtcctcgccaaggtactcttctttcctttcgatatcccaaccaatcatttatgaatgattaagctcctaatacctgtcttcatttttcaacaatgcgttctatgttcaattggctcgtttaatgttatgaatgttgatgagggaagtaaattgtacacgtttggcatgtagacaacacttctttcaaggatctcttgaatttggggattatgagtgtttttaatccttttattttcttggttaaattagttatttatttctctatcggattcaatttggttttctattttttttatattggttttaaagatatgaggatcaaattgaataaaaaaattaaaggatcaaattaaacctaaataataaattaaagaaaaaaaaattaatttagcccattttcttcatttagtagttgatggtcaaattggagatttttttttagcagtgcaagtttaaatcagtactgggcaaccaatcatagatgtgtttgaataccttacaaacaaccacaattacttacttttcccttacattagaagaaccaaatccctttgattataagacaggtgtccacaacaacagaatgcgaaagtagttcgtatattattggagttgcactcgatctagcatacaaaacatgatttgaaacactttagtcagaatgcatatatggtagtgttgccttctcttgatggaacataattatgtgctttagggttgattgtttatggccttgccttcatattccaacttgattaccggatacatttgagtttatgttttcagatgtttatacatagttatgcttctgttttttaagttggttctgttttctgcctcaacagaaagtgaagaacttttccctagctggacaggaaaa

SEQ ID NO: 22927 - DNA, 263 bp, Glycine max
  Intron number 3 from transcript Glyma08g00490.1 (locus Gly ma08g00490) derived from phytozome v7.0 (chr-ID Gm08; pos 198847 to 199109 reverse strand)
ttggaaaacctcgacttgaagcatttataaccgaggtcttcaatttcttgcttttataattttgtttatatgcttcatatgccttctgttagccattaatttatggaattctttcctttttctttttttctccattcccttttgtcatgatgggatttgatgtttccatttgtccagtaatctcctcagcctcaccatcatcatcatggtcaccagatttgatgtaagtgtttcttaatgcagatttcccaggctaaatcctc

SEQ ID NO: 22928 - DNA, 726 bp, Glycine max
  Intron number 2 from transcript Glyma06g24770.1 (locus Gly ma06g24770) derived from phytozome v7.0 (chr-ID Gm06; pos 22498947 to 22499672)
ccagggtggaaaactggtgactggatttgcactaggtcagttcacattatcatcatatattgttttttttaaaccatgatactggtgtgaagtatttactaatttttccgattattgatctctgccagagaatctagttgtgagatcttttctttcaattacatttttttcatcaacaactcaaattagagattttgcctaagggaatcgaatccaactttaccgagaccaataacttgttggttatcatcatgtacttagagaactgaaatagtttcctttctattggtacaattttcttagctcaataaccctgcattctgttgccaagtcctactatcataaaagccgaacaatatagttcaaaagcatgcaactaagtttaccctcaaaattaagctacatttcttccatgtattgaattattagtactcctccttttcttccccccagatagagggagttgtactcaaccttgcatatcacaatacattggtcacaagaaaagaggaacagtatttttgttggtaaaacactgaaatgggagagtaaggaccatgtgtccatactccacgaaaataattgagaaagaataatacaaatggtggtcattggtcaacataaaattactgtttattatattacacaatataagaaatgtgaaatacattagattctttttcacttattttctgtgtatcagaattggctgtggagtgcataact

SEQ ID NO: 22929 - DNA, 662 bp, Glycine max
  Intron number 1 from transcript Glyma05g22660.1 (locus Gly ma05g22660) derived from phytozome v7.0 (chr-ID Gm05; pos 27971253 to 27971914 reverse strand)
tattggccaggtttatcggttgatcagcttcgaaggtatcgtatcgtattcttctcatatcattttttaataaaaggtttaattattcttcttttttctatatttttagaaaaagtaatatagaatctggctaactagtactcttaattaatgtattggttaagaaattagaaacaaaaaatattattataaaactacaagagagcgtaaaaaaaatatgaataatataattttatgtatttcaataaaaaaaaattctcgttttgttccttaaccaatgtttgttaatatttataaaaaataaatagtgactagtttaaaatattttattttaatctctatgatctttgttgtacatagtattctaattctaattcggctggaatagttttcaatgaaacataactgtgattttgaaaaaaaaaaaaaaaaaaaaaactctatagttgctattttgatttttataattacaatgactttagttgattttagactacaagaaccaagcggattacaaaaatataattataagaccaaaataagatgtttgaagctgtaaggaataaattagaaagttattgaaattataggcatcaaaaggaaaattaaattttaaataaaataattagaaaattgattatggatattttggtgggccttag

SEQ ID NO: 22930 - DNA, 347 bp, Glycine max
  Intron number 1 from transcript Glyma07g08120.1 (locus Gly ma07g08120) derived from phytozome v7.0 (chr-ID Gm07; pos 6776309 to 6776655 reverse strand)
ctccttgttcattggctccaacgaactcgaaggaggttcgtttcacttctcgtcacttttttttatttacaataatatatatatatatatatatatatatatatatatatatatatatatatgtatgtatgtatgtatgtatgtatatattgcttgataatgttttgattttattaaatgaacttgaaatttaagcatctgtagtgtagctgaatgttttgcttgtttgcattggtgtcgttgtgaagaacagtgttggttctagggtttaccagtttctgtttttctgttattttattctgttcgtgttttgtgttgtgtaggttttctttcgctcgaggagattg

SEQ ID NO: 22931 - DNA, 694 bp, Glycine max
  Intron number 3 from transcript Glyma08g08450.1 (locus Gly ma08g08450) derived from phytozome v7.0 (chr-ID Gm08; pos 6050290 to 6050983)
ctgctgtgattaaccaagatataggtaggtaccaaacctggctatgttcatctgctttgttattcgttcattttttttttatgttagttgttgataataatttctcatatgaagcctatatatttttgtcatgatttcttctcattgtgaagtatatatatactaaaatgaggtattacacttttaaaataataaaaaaaatagtagtctttcactgctagaaattttgtaaagattttaactataaaaaaatgtataagtaaagcaaagtcatagtccgatttacttcattttgtgggctttttatacaataattttaaaatcaaaatacccaattttgataaataaataaaaacaacgtaagaaacatgcggcatataatttaaataaattaagaatgacaattaaataattaaatatatgtgtaataggtgatataataataataagatagaaatatagaaaataaaaacatttttacaaaaacaggttaaaataaaaaaaatatctacgtacaaggtatagcttgaaaattatttgcgggacatgaatgattttgattcattccatctgttgtgttgttgtagttacaatcgatctaaaaaagtcgaaaataaaatgatagatattggaagggagtttgtaattaaagaggattcatatatcatttttataatgatttcatctgacagta

SEQ ID NO: 22932 - DNA, 810 bp, Glycine max
  Intron number 2 from transcript Glyma06g38980.1 (locus Gly ma06g38980) derived from phytozome v7.0 (chr-ID Gm06; pos 41925570 to 41926379)
cagaaaaagcgtgcaggttagttctcattgtgctttaaatagaatttcaacacgctacagataaaattgtaaaggatagcatttaatatttattttttgaagaattatttttatggaaaatgctaatcaggattcttagaacattaattaagaaaattgaagtagaaatatttttattgaaaaataaaaatatatattatttataatcttttttgtcttgtcttaatattttcacattaaatatttttttgatttggtttcttaatcaatactgttatgacacatttgttagcaatatctttttttatatatctaaattatgtcagcaagagaaatgctaacaagacattattatatgacatatgctttaaaacagaatctatattattgggttatgtgggaaatgctaacaaagattagatctacgtaattaattaataagactaacagtgtgttgaaatgaatgcgtcaaataataataaaatctcaatgatgctaactttcaacaatatatgcatacaataatttgttattttgaacttttctagttattatatatgcaatctttttttttcttcttcttcccgttactctagctagtcatcatagatagcattagttgattttgtgcaagcaattactttctttttctttaaaaaaaattataatagaataatggaaatatcagaaactatgactatagatagtttcaaagttaagtactgagtatctaattgcataattataagaaaacctctagatgatgacagattttttttctttctacattatgcagaaaagtctacactg

SEQ ID NO: 22933 - DNA, 893 bp, Glycine max
  Intron number 2 from transcript Glyma06g03550.1 (locus Gly ma06g03550) derived from phytozome v7.0 (chr-ID Gm06; pos 2476290 to 2477182 reverse strand)
caggtaccgtggtttggtttcgacgtatttctgtttaactaaaatatttactgtggactaaggtccaggtgttttttgcttatagagtttgccaaatcaatccaacattcgggaaattcttatttactaggagtaagagatttttcttaaggcattaagaaaaaaaaatgttttttttcactccatatgtgctacatgactacctttgcgatattgatggccacatggctaggatgacggtaggatgtaattggtatttaaattcaacaaaataaaatataataaataaaaatagtataataaaatcaacattcttaatttcaacaccaaaaaaatagtacaatcaaatatctttcaaatatatttttctgctttttaaaacttttttattgaatttttaaaaaacttttagtaccatgtaaaactatactttaaaaataaagtaaatagtgtaaggattagattttttatgtgcatattaaatcacaatcacagactattatatataacaatgttaatttttataataagtgttttaaaaattatattaacaataatttttatttgttgaaagtgtaaattttttcttatcttagcaatacataaaaatgaaactctttaaagtttcacataaaattttattttcattttgctttcaaagccaatattaagagttcaaaaatagttgatgatgttgagagtaaacaaagaaaattatacgtacaaaattcatttatattaaaatggatttaagtatagtccatgttaaggactaaagtattttttagaaaaagaagaaatggctaggttatttttggttttttcttgggtattgaaattgaaaactaatatgctggtggttgttgcagaacacatcttcaatagagaatcag

SEQ ID NO: 22934 - DNA, 918 bp, Glycine max
  Intron number 2 from transcript Glyma06g08200.1 (locus Gly ma06g08200) derived from phytozome v7.0 (chr-ID Gm06; pos 6025215 to 6026132)
tctcaggttaatcaacctcaaattcattcccttttttttcaattaacgctttcgacgctgcatttccctttcgaatttgtgcatcggcgaccaattgcatttgcgttgcgttgttccatttccttataagaagaaaatagggcttctcaatgaaaacaaaacatgcaattcgcgtaattagggtatccgtgtcgtttttttttatttgtttccgatttctcaataagtttatttgaggccatttcacaattcaaatcctcgtacaatacatttgatatcttttttttgaaagatcaatacattttatatctatagtgttactgtttccttactctcttacatgaataatttatgattatcgtgttgtttgtatcaactttatttggtgcatatccatctagttttctttttccatcaatgaaattgcttctgctgcggtttattgttgtcatttaaggtctcgtgaattgtcaatttgatataattgttgcttctgttactgactagtgtattatatgtactagtgtattatatgtatgtatttgtgatttgcaattatttttggttccgaacttttaggtcattaatgtgcgccagtataatgattgccaaaatgtctttaatcagtcaaagtctacgaagatatgccaagaatttttaacttgtggacccataacgcataggatggttgtctcatttaatggttgaactgttaaaaaattgtttttgatgatgatatgcactaaaattgttttatgcaattggttgattacgagaaatagctcagttttatactgtctctaaatattataaattcttttctctctgattctatttaaggtttctttctatagttgcttggaacttctttccttttctccattttgtttattctttgttgtttttaaaattgtgcag

SEQ ID NO: 22935 - DNA, 830 bp, Glycine max
  Intron number 1 from transcript Glyma06g26610.1 (locus Gly ma06g26610) derived from phytozome v7.0 (chr-ID Gm06; pos 24403258 to 24404087 reverse strand)
tagcaccaagagattcttcgttggtgacaatctcagtaagttttaatatgagttcgttctcatcctactaaaatttagtcatttatttttttttaaaaaaaaaacaagttcattgattcatttatactaaaaatcactttcatatttttttaagtttaaataaattggctcatactcttggctaaatgaaaataaataaagtgttagtcattttaagttcttaaattaattcatactcaaactaattagtagaatctctcatttaattgataagttatatgtgagtgtttttataaattaacttatgcataattttttttacagtaaaacttatggataagttaatattagcttcatctaaaaaaattaggttatataatatattaattatatttaaatgtattaatagtttattatgtgagaataaaatacattataattaatcatggtttaatatttttttagttgttgtaatttattatttttttgtttatcatccttaaaaaaaatagtccttataatttatggttattttgtttttcattctttaaatagtatttttttttctactatacagcattatctatatcgttttaagtacaaagatgaaaaacataacaaatattatttttaaagactaaaattaaaaaaattctaagaagaaaaaaatattaaattataaaaactacaaagatatttaaactattaatctttaatgcaactaccttcgaaaacaaatcattaatgtaactatagttgcttcaatcttttgactttttatcgacaatggaccagttttcaacatcagcggagagcattcggtgggaatt

SEQ ID NO: 22936 - DNA, 782 bp, Glycine max
  Intron number 2 from transcript Glyma08g10760.1 (locus Gly ma08g10760) derived from phytozome v7.0 (chr-ID Gm08; pos 7827951 to 7828732 reverse strand)
caagctgaggaggtttccaacttggtacctacaataaactttcttcctttctatttttttttcttaaatacatttttcgtcctgaaatttagtgttttttttatttatttttgtatctgtaaattatttttttgttttagtgtttttatatctgtaaatgttaatttgttagttttgtttgaaatatccgttggcggattcaaatccgcgacctctttcctctcccttctcgttcactaaccattggaccaaccttatatctctccttcctctctatgtttgtggttctttttattctcatgctttgtgagcaagtgtggccacacacaaattacaagatacaaattgatagtacacaagaagatactagaggaacatgtttgagggaaatatgatagaaaatcggttaaggtaatttagacaagaagactactgaaaacacagtggtgcgaacggtaagtatgatcattccaatggtgaaagagagtagattgcatgaatttagtctttgactgagtttcagtggtgtgtgtgatccatataactgaccttggctagagaggtcattgttatacttgagtcatattgatagatccacgagcttgatcggatttgtagattgttatatgcttactgatcgtatgaactcttatttattggtgttatttataagtgttcaagctagctagctcggttatgctgattgactaaactgcattaattaatttatttgattattactttcagattgaggcgtttggtggacaagctcttaccttcga

SEQ ID NO: 22937 - DNA, 743 bp, Glycine max
  Intron number 4 from transcript Glyma05g29830.1 (locus Gly ma05g29830) derived from phytozome v7.0 (chr-ID Gm05; pos 35317663 to 35318405)
ccgataatattactgaagccattgataataggttacttcctctcttaattctttctctattcacaccctacatgcagactaatcttttatatcgtatatgcagagtttcagttaatccttcttacagtcactatctcatgtttataagatcagagagatgctggactggacatataatactagtagaaactgtttcaggtcttttttgctcgaagctaaaatgaattgagcttctcctgtaagctaaaattaacttatgcacttaagttttatagaagctctctcgtttaacttctccaaaagttgaagtgcataagttgattttagcatacgggagaagttcagtttattttaccttcttattttcttgtactataaatacttgtggagaaatctatatggacaaaaccttaatatagaaaactagaccaaaaacaaatcattttgatactccggcaagtctttttttaacaacccctccaaaaaaacctgtaaagagtttcatttcagctggactatagaataagaaaggaaaaaatgatcagaacaatagtgatggagttttagattgtgatggctcataatatacactcaagagaaacattaaggtgggggtgcaactggggaggagggatgcttgtttggaagagatataagatattattaagtttgcatcttatgattctctttctagtaataaactctgaaagcttttgttattgaatttatgcagtttgtcgcgg

SEQ ID NO: 22938 - DNA, 846 bp, Glycine max
  Intron number 1 from transcript Glyma07g06140.1 (locus Gly ma07g06140) derived from phytozome v7.0 (chr-ID Gm07; pos 4863269 to 4864114)
ctgccacaaaagcatactttgacacccttcaactggtatatctattcacctttctctctttcattttatctatctgggtatttaactaatgaatcaattcaaggatgatataaaattctgttgtatatgcttcacattttttccttatttttctatcacaaaaatgtgtaaaacagccccttaattataatggtattccacatcttttacttgtatgttgttctatagcttttttttttttagtatctgatagggctcgagtcaattatatatctatcaggggtcatggattatttgcttttattgttactgttaataaaaattataatgttatcagaaaaagtgagaagaaatgtatagtatcactcatttgatgtggccaaacatcatagatctcacagaatagaagaggacttccacaatttttgtgacaacctaatatttagtcttaacaattgcactcaaatggatgttatatcaatccataatttgtggtaaaattaacttacactaagcatgaactgatcaatgatttgtctttttttcttaaatcatatattaaggaatttaatctaaaaatccttagttttgtggaatggattgaccttcattattctttggccttgcatagtttgatctacgaaacctttaaatttcaatcagcaaattcttgtaatcaagctgcaaaaagaactttattgacatctcacaccttcacataattaagagccatgtgaaattttgtacaatgtccataacattccctagtttgtggcatgtagtccaagctttttacaagtattatgtttcatttttctttacagtgcaacaatcacaaaagacaat

SEQ ID NO: 22939 - DNA, 946 bp, Glycine max
  Intron number 2 from transcript Glyma08g28090.1 (locus Gly ma08g28090) derived from phytozome v7.0 (chr-ID Gm08; pos 22354205 to 22355150)
gccagtcttctgggaaggtaagcaatttttctctgtttttatattttttgatttacttgattttgaaagaacatggcccttaatcatacggctttcaagtctagagtctagacatagtgaaatactctttctacggataatatataaaatagtatgtttgaacttttaaataccgggactaatactatttttttataccgaaattacccttctttctaccactcttactacagaaatggtttcaatttttttgagttttttttcattataaaatagtcatatcaatcaaatggcttgaatcctctttatgttgaaaatttggaaaaatggcaaaattttcctccatttatacagtgcagaatctatgacctatatatatcaattaataaggattttttgagtttgaagaagaagaaaaaaaactttgttgctttggtgaaggagctgttgactagcaggaaaaaaacccagattcacttaaggaaagccaaaatggaagtagatgatttcagttgaatggctattcttggatagaacaaaaagatttaattatgaacaaattgtgtatatgcactgatcgtgtaaagaatttttatactgtcatctaagtttgttaatttttacaacaactaccttaaaaataataccaatatgattgattttttaaaagtatactatgcataaaaattaacctcttaaatttttttcatattaaactctttaatttttcaatatatacgagtttgaacaaacttatacaaacaaagtcattttttaataaagcatgctatggttctctatttctttttcacatcattctattattcctttaatgttttttgagctaggatgtatagataattatgagattgcttaatatttgttggaatgggattgagttgaaaaacgtgcaaattttttggacagcctagtgagcagaacacgt

SEQ ID NO: 22940 - DNA, 763 bp, Glycine max
  Intron number 1 from transcript Glyma07g30140.1 (locus Gly ma07g30140) derived from phytozome v7.0 (chr-ID Gm07; pos 35187189 to 35187951)
ttttcccagcagttacgccggaaaaggttcctcttctcttttattatatttcaaaatttagaattttattcactgagaagaacatgttttttcaaattgttttttttaattggaaaaactatttttttttctcgattgttattgaggcatggcacggtgtcgatttcgtttcttgtctcactgaccaatttgaagaagtgtttgaatttagtgttttaaatcgcttaagagaaaaagaaaaaaaaaaacctgtgtcagatagggatttttttgtgagttcatgtgttggtatccggtaatgatatttttatttcaaattaaaaggaaaaaaaaagtgttgggaaatcattggttacctatgcagtggttattgatgttttttgccagagtaagtcaagtgatttctcaatgtagtactgggaatgtagctttctgggatttttaggttttggtctttctccctttgatgccttgctattgcttcttctttctgtgaatgaccctttggttggttttttattgtatgattacgaaatgatggtgataatggcatctatgcccgatcctctctgaagcttttaaatttttaagatagctacaaatgatcatttgtgacctgttaaattattccattggattggatgtgcctcccattttgcacaacttctatagaatggttgcacatttttcgggtttgatgatccttttatttttcttctgaaatgcaggtgcaggccgtattattactcttgggagcgcagga

SEQ ID NO: 22941 - DNA, 1055 bp, Glycine max
  Intron number 1 from transcript Glyma07g00750.1 (locus Gly ma07g00750) derived from phytozome v7.0 (chr-ID Gm07; pos 407205 to 408259)
actcgccgttcccctctcgatttccccatcgtatggtttccctaatcaaattcattctaagcttattttttgtaattttactttcagtaagtgctgcgaatttggattcggattcgccgtcaccctgctatgtttattgcctgattacctcaattctttgttgaaggataattgatttactgttattacatttccttgcttctaactaaaatcaaccaatcaatattggctccggtttagatgcaatgctagtttctggagtattttcaaagtgccaaattataccatcaaagcttaatttgttataaaataatatatgatgatatagtttgtaccattgaatgttatgtagttaagagatggtgaacatacgcgtgtgttgatggcttggtgagtgaaggctactttgataagtgccaccattttctgatgcatacctgaagtaaatgtgtcatatttcataccaagcactacccttccaccctaataagcaccccttgttcgaagtgttgccgtgtcagacctagacacttgttcaacacttcttattacgtttctgatttaaaaattatatattcattggcttgaacacttaaggcgtcacttttaaacaactaatatacttgaaaaaacatagaaggttagtttaaaaagatgaatataccatcaatttagatattttgttatatgttacttatatttaatttcattagaatctctttgtttttgtttgtatgcggtgttccccttccctatatttagatattagcagtgtcaaagtgtccgtatccgatgaccctgttagagaccgtacttcatagcttccacccttttgattatccattatagtttgatggtgtaaagatttgtctaagtagaatgaatacataatctggtggatctgacagtaagttcaggctttggcaatgttagtcttgtgagattgtgaaccctctttcttctcaatttgttgccatttaatgtaaatgttgatagattgttgaatgcatatactgacaggagtgggaaaggcctaagcctggacgaagaccgga

SEQ ID NO: 22942 - DNA, 610 bp, Glycine max
  Intron number 2 from transcript Glyma05g32670.2 (locus Gly ma05g32670) derived from phytozome v7.0 (chr-ID Gm05; pos 37536417 to 37537026)
gttttgtttctgactttctggcagtgtagatctatgtgagtgtcgttgttttcccgttgaacgcgtcttttcttctgttttcaatccgctgaatctttagaatttgttgttgttccgcaattcttggtaatggagtctttctgatccgttttttctggttattttaattttctagctcattcgtatttgttgaatttgttagatctggtcgttttccttaataaacgatgttctcgggttatgagagagaaagatacatttgaatgtgtgtgtttcaccttgaagtttgcaagccttcgactgtttttaacggaatcaatttttttgacccctctcatatgttataacttggcaatgtcatgtattttcaaacgtcttatatttatgccaaatcctcctaatttcatctgattggacaatgttataaattattggtatttgattttcgtgtcttgttagttcatgtcatgtattttgccatctaactgcatagatattgttaattgagtgttgccactgctgatccatgtccaacaatagggatgatgtttaattgttgtttggttcatgtccaggtttaaactatccgtgaaccgctgcaccctctgac

SEQ ID NO: 22943 - DNA, 464 bp, Glycine max
  Intron number 1 from transcript Glyma05g08430.1 (locus Gly ma05g08430) derived from phytozome v7.0 (chr-ID Gm05; pos 8329936 to 8330399 reverse strand)
gagactggctttgcccaaggtcagttcatattaccatcactttttcactactccaaatagtatcattcattcttaccctacattatttatcatcacattatcagctgcctcacacttcaatatagagagcctgcatttaatttgagactagaaatactgactacatgtcaccaacatacattccaaactatcataaaatgtgagcaatgtaatttaataacatgagagaatttggacaaaaggtgcatatttgagatggagaattaggaccatgccagtaaatacacagtaccgatgttggccaacatgaaagagttcagttatttttgttgcacacaagaaaaaaaaatgaaatatgatacaaatgcttgtatcctaattaattagtttcttcctaattcaaagtatttcaccttattttccctttttcttatgtaacagaatcggctgtggagtacataatt

SEQ ID NO: 22944 - DNA, 741 bp, Glycine max
  Intron number 3 from transcript Glyma08g36790.1 (locus Gly ma08g36790) derived from phytozome v7.0 (chr-ID Gm08; pos 35115431 to 35116171 reverse strand)
ataagtgagtcttgcaaccatcttttccacaacaactttttgttgcatgagtgctttgaggaagtctcgagccaacatatcctattttgattggggctttggtttgagaatccaaatttgttttcttttagtaagttcaattgtaccttctctctctttaacattgccctttggggcatgacggcatcaatctgataaagtatcttgtttatcatggacatctatatggaatcaaaataggctataatctcattaacatgatcttatttgatgaatttttattccacacctggaaggttgctttttgtctgtttggaggctagttgctgcttaacaattttttgctcttccctacagctggatagatgttttcattaccttataaaaagtaagatgctcagttgattacacgcaatccattagtttgttcttttaactgagcattttactttttatattgattgtgtataatcatttctttgtgaaatagctttgagtttagttttgcgtattatttaatttctgtttggtttttaagatatcttttatttcgtttgtgcaatttgtgattttggggctcaagattttgttactatttatttttggcttgtttgggtgatatttattatacatgctttgtgctcttcatttatgtattttgatgcttgacatgctgtcttggtaagttgaaatttgccaacaggaatactgaaaatattgtatcaatcttcaattgcagtt

SEQ ID NO: 22945 - DNA, 891 bp, Glycine max
  Intron number 2 from transcript Glyma05g35970.1 (locus Gly ma05g35970) derived from phytozome v7.0 (chr-ID Gm05; pos 39906319 to 39907209 reverse strand)
agggtgaacccggtgctgtcattcgagggaagaaggtaaccgccgtttctgatctttgctgaaatttgttcatagattcgtatgtgtttgaacgagcatttgctaaattgattctgaactaatattatttgtgtatggatgattttattctagaaccatgttagtagtaaaactcattataatttttttgatttaatgcaaaaccagttctgaattcaagtcaattcctcaacatggaagttggaacaacatttgtctaaaattacaatagttggtatttgaatgttatattggatcatctaatgtgaatccaaatatgctatactaacttatatgtgatggtactgtttctgtgaagatatgcttttccattttttttaactatatagattttagttttagaatcatgcaataaaatcacagtctgtgctacaatctagtaaaaaaattacctcttttgaggttgacgttgagggcaacatgaacatggctggggcttgcaggtgtactgcagtaatttagttgtgcaactgtatattgcatgtgattttataagcaaaatataaacgttttctaaacctttgcacatttttggaatccatcgatgtgtttgtggattgcatgtgaaacaaattataatttataagcaaatgcaaatgtaaatagacgacacctttgtgcagagtaattattgtttgcatcctctcaagtctaaacaattaaataccgggattgtcttataaattgttaccttcaattttaatctttaatagaacatttgtgtttcttgcactgtatcttagtgcatactttgaccattatagttgtaatatcaacctttatctttattatccagggtcctggtggtgttactgtgaagaagaccggtgc

SEQ ID NO: 22946 - DNA, 452 bp, Glycine max
  Intron number 1 from transcript Glyma05g35970.1 (locus Gly ma05g35970) derived from phytozome v7.0 (chr-ID Gm05; pos 39907286 to 39907737 reverse strand)
gcagcgtttgggctcagagtaccgacttccctcaggtaagctttccattttcctttactctttttcccagtcggatctcgatttattgttaattgcttagggaaagttctagattcgccgatctatgctcacttgttatggagattgaagaaaaagaatcaacatgcaaaaatatttctgaaatcagcaacggcagttcagtgcatcttcatcttctctgataattaacaattaactaattaacaagaaaaccagaggatcacttgtgttgattcagattctgtacttgccagcaactattgtattttaatgctaacataacattgttttttatttttatttttggttttgatgtgtgactgattcatgcggtaacagatctgttttttttgttgatctgttctaatgtattgatttttatttagttcaaacctgaggagataactgccatc

SEQ ID NO: 22947 - DNA, 499 bp, Glycine max
  Intron number 2 from transcript Glyma08g41890.1 (locus Gly ma08g41890) derived from phytozome v7.0 (chr-ID Gm08; pos 41783700 to 41784198 reverse strand)
ccaagacattttatctaggtactctctctctctctctgtatgtgtgtcttgttttggccttttcttgtttttcttaatcatcgtctcttgttccaatgagtttgtgcatttttaaagtatattattatatcagtttcatattaagaaaattcagtcattgactaacagttctgaagaagtaacccccttcatggttcaaattttagatttttctcttctttcttggttgattatagaggaatattcacttaagagagagatgtgttttattcacttttgcccactgtactatgcctaaaaaatgccttcactttgttgcaaaatgtatactataattgaaatggtgttttattgctaagacagtgaggatcaaaagtccattcaatgatttcaaattttggtgattatcctttgttggtctatttgatgtttcttagttatgttgttgatgtcaatttgattggttcattatgaactgcaaatctcaggcacacaattg

SEQ ID NO: 22948 - DNA, 777 bp, Glycine max
  Intron number 1 from transcript Glyma08g00320.1 (locus Gly ma08g00320) derived from phytozome v7.0 (chr-ID Gm08; pos 83326 to 84102)
tctcatattcttcgcttttttccgaatagccataggttcgtccatttaacctttctttcttttcaagctattcggatctacccacatattcaccggaaccgctctcttttccttttaatctttacattttttcagttttgctgcttttatttgaacgttttcttttttccgctttctttttctcttagcatgcaaacttggtttcttcttgtgtttgcgtaacgtttttgtgactggtgcagttttgtttctgagtttctggcagtgtagatctgtgtgagtattgttgatttcccgttgaactcgtcttttcttctgttttcaatcctttgaatctttagatattgttgtggttcctcaatccttgctaatggagtctttgttgttgaatttctgatccgttttttctggttgttttaattttctagctaattcgtatttgttaaatttgttagatctggtcgttttccttaataagacgatgttctcgggttatgagagataaatatacatttgaattgtgcaagccttcgacagtcgtgaacggaatcaattttttttttcctactcctctcataagtcataacttggcaatgtcatggattaagtaattcaaatgacttatatttatgtccatgtatttcgccatttaactgcatagatattggcaattgagtattgccactgctgatccatgtccaacataggggatgatatttaattgttgctgtttcattaccaggtcaaaataatctgtgaacgactgcacctgacaaa

SEQ ID NO: 22949 - DNA, 755 bp, Glycine max
  Intron number 2 from transcript Glyma07g12570.1 (locus Gly ma07g12570) derived from phytozome v7.0 (chr-ID Gm07; pos 10889565 to 10890319 reverse strand)
cagccaatcttcagttgcaagtttagtaaggacaggtgatatgaaattcatgatctattttactttcaattgtgttgactcttctaagaaatctttagaagtcattatttagttgttctcaaataacttgcatttgagttttaaaattgaaatcaatatcatgttttacaaggtttttcttctgtcaacataattaagtatggatctggctcctctaaagtgaactcactttagagagtgaagtaacaaatttttcaatcatcaatgagaaaatcaatgattaatattatgtgcacgtgcattataaatcatgcacgtgttagaatatcaaccattgatttcttcgtcaacaacttagatttgttactttactgaccaaagtgaataactcgctttggaggagccaaatccattacgtataattttctttgcatcctgaagcatggacaaaacacttataccagaatgtctgtgtggactgatgtagttaaccagtctcctccaatggaagcttaaattatatttcataaaaacatgacgcctgattttgggaccaaggaattaaatcattctctcaaatcaatatttcaagtaggaaattggtagtgtgttttcttcgttgtttctttgccagttggttggacctaatatctgtaagacctgcaacacttgtctaaacatttgttgtcaataaaacttttgatagctatggaatgacagggtttcccagattgacccgttgagcgcatactggt

SEQ ID NO: 22950 - DNA, 576 bp, Glycine max
  Intron number 3 from transcript Glyma06g15350.1 (locus Gly ma06g15350) derived from phytozome v7.0 (chr-ID Gm06; pos 12113495 to 12114070 reverse strand)
aaggtactttttatgcattttagggataaattgttatatgttccactactactatgtgtccacggttccaattagtttttatatgacaaaaaattgactttaatttacaataaatggttaataaaatttgattgtatgtgatgtgtagattgtttgagatcacggtagtttgaaaccatgaaataaattctcgtattgtaggtatttgttaggatgtctaacacgtttcataattataaagaacgtgtgggtattgagtgtagatcagtctattagaggatggttttaattgctggtttaattatttatttggttcccatagttccaaaatctttccttttcagtctctatactttcaaaatatttcatttcagtttctacgcatgccatttttaatccattttagcatgtagggactaaaatagagtttcttgtaactatagggacaaacaagtagttaaatcttaatttttgtgatttatttatggtttgaaattctttaagttgttgtttggctgttgttcttttgtgtgtgaagaaataatcttttattattattttgtgtttggctgtaga

SEQ ID NO: 22951 - DNA, 336 bp, Glycine max
  Intron number 1 from transcript Glyma06g48170.1 (locus Gly ma06g48170) derived from phytozome v7.0 (chr-ID Gm06; pos 50451893 to 50452228 reverse strand)
tcaacggctggcaccgagccaggaccacaccggtggtttgttacttagctcaaaatcaccatcatttcacttttttccttctatatcattaaattgagtttcttttcttccatatttcgatgttaaacatgtgcagttttttttaaagggtttgggttttattttgaatttgtttgggtttcgactttcaggacatgacttgtatcaagtaattttttattttttttgctccttatattgtttaatccatgatttgtgcaattgggtaactatcatagttgtatctgcaattctgatttagggttccagtagagagaagctctcaaaagcacttct

SEQ ID NO: 22952 - DNA, 987 bp, Glycine max
  Intron number 1 from transcript Glyma08g12370.1 (locus Gly ma08g12370) derived from phytozome v7.0 (chr-ID Gm08; pos 9045802 to 9046788)
tcagatcacaaccacgaggtgcgtgcgtttcccctttatttctggaatcttattgaattggtttattgtttcggtgctcagaatgacagaaacttgagtcacacctgaagaaaaagagcttctaattttggttatttgagatatgataaagctaccaagagttatattagttttgaactttttgtttatccataattcttcttcttttatccttttcccctcctcgtggctaagctaaggcactattagggttcttttatgtagaaaatttggtccttgagcttaaaagagaagaccactttagctcagtttcatcttgatccgtttttcttttaataaaagattgaaatttagttatttatttgtggcctggagagaagttctgaactgggtgtgtaatgataaagacttgtcatgatttggtcttgatttttgttatgatcttttgtttgttatttactagattctgattgatttccatattgcccttttactttagtttctggttaatttatcaacattcaatgttgttttactttgctgctggctgttacgttgtttaagtaacataataggttgtgttttccctctttctttcaacaattgttggaagtttgtcctaggagcttagtgatgttatgtttcttgtcttcaacctgtttcatctgcttgtttccataatttctgtaatcttataccgtccttatgctgtcgacctacctttttctttctttatgcaacatcttctgtggagattagattttgaataactgaattgcaatatgatctggttagcactctgtatcctgctggtcagtctctttactgacgagtgtgttactgtgttttttatggctatatttttccaactttacctttcctgagacatcaaatgattttgaaatgatatgcaaaacatttgaaattgtagtattccttatatcttgttaataattgtggcaacttgacagatatccacttccgctg

SEQ ID NO: 22953 - DNA, 713 bp, Glycine max
  Intron number 1 from transcript Glyma06g13550.2 (locus Gly ma06g13550) derived from phytozome v7.0 (chr-ID Gm06; pos 10676131 to 10676843)
atagcaccaaccaacttgttcaaaaggactacaaggttggttttttgcattcccatttcccggtttgttatcttaactgcttaaagtaagcaacttggtttcttgcaattggtttttgggagctgttaggagaagggttaattgattgtgctttgaaaagtaaccaccttcacttacccttgtttgctggaaattttgcaacttttgatgtttttaaggattgggtcgggtttgcttttgagggtttattttatttagatttaatacaatgtgagtgatggtgaagattcagcaaaaactgaaattttgctttttaagtttaattttttgtcttctgtggatccaaaattgtctcagagaattgtattttatatggatgctgatgtactatttcagacaactatatgctgtgtaggataatcaccttttggtatcttattagttgttagagaagatgttgcctccttctttatctgtcttcttaacttgggttgttgtcattgtgtattttatcaagggcttttagctttcactgtcttggtctaaaaggtggttctgattttgattttgatctgtttctctttttctttggcaatgcctttcctttttaccctcttcactctcgctacttgactttgaatttgcaatcattttttgttttttgaatattttcttttatgcattaggtggtccttcttcctttactttcattc

SEQ ID NO: 22954 - DNA, 727 bp, Glycine max
  Intron number 1 from transcript Glyma08g16340.1 (locus Gly ma08g16340) derived from phytozome v7.0 (chr-ID Gm08; pos 11951510 to 11952236 reverse strand)
tctaagaggtgaggttgatcatcttgtgttttgtattggattattaacattttcttgatgtaggttttctgtcttgtgttctgcagtttctccaatttctgttgattattgacttttttatttatatgtttctgttatttattgttcttataatccggctttctttgaaccgagaaaagattgtttttgttttccatctggggtgtgacattcattgagcagaattcaaaagaaaaagggttgaaagttactaccttttttttgccccttttgttatcgaatttggaaaatctttatttgatttagatagcttttgttagtggaaactcaatcaggttatgatttttaacgtatcattcttcccagagacttctatggtcatgacaggcaataaaccattcctggaggttataacaatgttgaattctgtagtaggtagaagagcgaaatttggcattgatatcttgtttgtggattgtacttgacacttgacgtgatataactatgaaatcatttgaattgatccatttgttttggtttgtggaaatatggataaaaggttttaattggggaccttggtttttgatacttaggacaagtgttgtgtggaccttttctttctctgttaatttgttctctaatttcttatgcaacttgaagattattttaatttttgtaatttcttatcttccgaaatcatgtaggtttctttgcaagttctttgctc

SEQ ID NO: 22955 - DNA, 805 bp, Glycine max
  Intron number 1 from transcript Glyma07g10860.1 (locus Gly ma07g10860) derived from phytozome v7.0 (chr-ID Gm07; pos 9078140 to 9078944 reverse strand)
gattcataatcgttgctcctcaactggtatattatactttgaatactttctaacttttttttacttcaaaatacattattcacgcaccattaaaatttgtatactattttgttttttttttttcttgtgaatatataattttggttaataacatataataccgaaataaaatacagattctttttacgcactacctttattgtttacctcaattacaaacaacgcgtgacaaattgtatgaaaaataaatgctacatatgtgaaacctttctcaattaattcttgttgcagatgtgaggagatgaatatcctacaagtatttctataaatactcagtctcctctaatgagttttcaaaatcacttaaactttattgaaattagtacttagtattaattacctgcttatatatatatatatatatatatatatatatacacatattatcaactaatatctgtgatatcattaaataatttctttttagagtacattattaaataatggatcttactaattattttgcttagtacattagttaaataactaaaataaaaaatatttattattaaatcataaaaaatgtaaaaaatattatgtataatataatttttattttacaagaaaaatatttctactttaaatttcttaatcaatatccttaaagcagttattaatatttatcttaaataatttaattgatatgaaattgtgagaaataaattgagctaaaaaaatgtttttaatatattcctttctgggttctctaacctgacttttgtcttcccaatattgtagttttcca

SEQ ID NO: 22956 - DNA, 505 bp, Glycine max
  Intron number 4 from transcript Glyma08g20940.1 (locus Gly ma08g20940) derived from phytozome v7.0 (chr-ID Gm08; pos 15912712 to 15913216 reverse strand)
cttccaaataaaggttgttgcgcaggtaaatgtttctccctctattagtgtggtttctcatgttatgcattttttgtttttaaacttcttattagagtttgtttgtaacagaacatggtgataactacgatggttgctattatgcagcttatttatgatggaaagaatttgtgtttatgttattgcgatcaataattcgatatattttgattgatagtttacttttctttttctatgtaatgaatttattctgttattgagaagaagagacgcacattttcttgttgtgtgtagtgtgtagtgtgctgacactcattgaaattatttggaattatattgatgtcttcttttggtaaaaaagtagcttgtttgggtttatttaattgcttttcctcctcctttgacttgttcaattatacttagggaactgagatgtcttacctatcaaataacttggggaaaaaactacccttatatttatctaaatattattcatttgaacagg

SEQ ID NO: 22957 - DNA, 357 bp, Glycine max
  Intron number 2 from transcript Glyma08g22800.1 (locus Gly ma08g22800) derived from phytozome v7.0 (chr-ID Gm08; pos 17291537 to 17291893)
aggtaacaaatatatataagattacgttacgccttcacaagacacaagtatagtgtagtttgtttcgtgtttgtcgcataaattgaacggattacatgcatgtttgggtatccattgcgaatggacgaagtttgcaaaagtatccccgcccttccttttgcggtcagtttgcagtggcccactagatttgatcttggaattcgtgcacgacaagttggaccggaaaccaaacatgctcaattagtgaactcgctaagaattcaattattttgttcaattttttttctttcttaattatagttatgatatgatatcggcttttggattctaaagtgcaacactgtcaggtgctatcag

SEQ ID NO: 22958 - DNA, 756 bp, Glycine max
  Intron number 4 from transcript Glyma06g09350.1 (locus Gly ma06g09350) derived from phytozome v7.0 (chr-ID Gm06; pos 6882512 to 6883267)
gtcatctattgcaactcaggttttgatcagcactataccacatttttgctatcaagatgtccactgttctgtcattgttgtttgcttgtaatctcccctttcaattaaacaattattgcatgcacatagtatctataggtacgaccaattaaaagcccagaatgcattaaaaataacaagaaagtctgtgttaaagtttgtgctagtatgctagagttattctaatattctacttgagcctttaatcagtactgtgctcatgcaagaatttctccttttcaatttctagtctattaaagtaacattttacatgagtatactgcaataaattgctttcatctcaagttttagggtgcttgattctcatatcctgataaatctgtcactattttgaattttcatgaagcacataactagtgaagtaagttttaaaactacccttctgggtgtgtatgagtaaaacaaaatggaccttagtttatttggtatcacgtaggtaaaatctatatacacttatttcatacttgttacagtttttcattcttctatctgcacaagctttcactttgcttttggataggataaattaggttttcgagactgttttatcagttgaccggttggatatgaaagttactttaatgtattgtgaatttgatatacacttgaatatttatatatctatatcagtgtttcttagtacttacagacgtttctacagatttttggcattgaaaaaccttgccactgtttttc

SEQ ID NO: 22959 - DNA, 723 bp, Glycine max
  Intron number 1 from transcript Glyma05g37760.1 (locus Gly ma05g37760) derived from phytozome v7.0 (chr-ID Gm05; pos 41291839 to 41292561 reverse strand)
ccgccaagctctacggcctccagtatcaccctgaggtagttttatcataacttcaaatttaatcattaacaaggttttttttttttttgtcagcatcattaacattgtcagcatcattaacaaagtcttgtctcattaaaagtggattacatgaatagggcttttaatcaatgtcccaaaaagtttgacattaccttaatttgcatcaccctgataaaatatgtttttggccctgtcaacatgtcttgaaatccggttctcttgatagatacaataggctagaagcaattgtgtttgagttagaataagactactgagtgacaaaacgctccttcagtatttaatgcaattgcgtgcgtattataaaaaaaaaaaaaaagcagctgcatgcgcatgacttgagctctctcagagtatttagtgcaacttcatactcaggacttgaacttgttaccattatttaagctggaataatactgaactagttgatccagcggttcgaaatctggctttaatttattaaaattaatttaatacgattttaaaatcacgtcacttttggggaatatagaaactagaaatctattaaacttttataaaactaaaaccggatttcgagatgttttgaagaaccaaatgcatattttatcctatttaattttatgtgctgtatgttcgggattaatgttggttgtggttttgtgtaggtgacccatacggagg

SEQ ID NO: 22960 - DNA, 705 bp, Glycine max
  Intron number 1 from transcript Glyma08g14970.1 (locus Gly ma08g14970) derived from phytozome v7.0 (chr-ID Gm08; pos 10891695 to 10892399 reverse strand)
tcgacctcaacactctcgaatctgccatttccaaggtgttagtttagcaccaaatgtctattatgatttttacaataaggggtaataaacacttgctttgtttgttaattgttaaatagcaactgaacaatataatggagcactgatgattagcttaagttaagaacaattgaaataaaaattgagttcaaatagattcttgggctttatatttgtgcccccataaaaatagtgttcctagttcagctataaggtagttatgagtgtgtgtttagattaggactgacaaaattaatttttaacaaaatttattttataaaatttattttaaaataatgtaatttatgtttggaagtttatattctaaaagcaggttagtttttttttttttttatcggatgttaatttgttagaatgttagtttttgtttgaagagattagtagtaaaatccaatatatatatattttttatctaaaagttacctaaagttgattcaatcaaaataaattctagacccataataaattcctaaaggtagaaatagaatcaagcatatgcatatttacttaaaatcacattagctggtattttaacatgcctatagacaattcaacgtggacacaaacatgcccttactgtctagctttagagctgcttcttgttaggtgaatgatagataggcttgtttgtgcagaaagacagtg

SEQ ID NO: 22961 - DNA, 228 bp, Glycine max
  Intron number 2 from transcript Glyma08g20900.1 (locus Gly ma08g20900) derived from phytozome v7.0 (chr-ID Gm08; pos 15878856 to 15879083 reverse strand)
gtcaagggtggtcttttgaaggtaagtagattgttgaagtgatattgtaagaaataaccaaacttagcctaaccatgctttatccaatttgattttgatatttcattattaataatcagtgactcgaccttagtagatcttataaaaagtttctgtataataataagctggaatgaagttgtttcagaactctttttttcttcctttaatttcctcttacaatgcagg

SEQ ID NO: 22962 - DNA, 745 bp, Glycine max
  Intron number 1 from transcript Glyma08g20900.1 (locus Gly ma08g20900) derived from phytozome v7.0 (chr-ID Gm08; pos 15879199 to 15879943 reverse strand)
atcacaggtcacacatcttttctctctcctcgcttcgattctcaacatgttactgtttctttcttctctacgcattcatcgcccttatttcgatgcattattattatttgaattttatttgctgctctttccttttgatttctgctgcgtgttcgaaatctatccaagagacgcggcgttggtaatttagggtttgtactaaggaaatcagcaatttgtgttcgtttgcaattctgacaattctgacatgttagctgttgagcttgatttgtgacttcctttatgaaattaatctattttatgtaagctagggtgattcagtgttatcttggcttggatatgctgattttaagtttcgtactttcgtgtttcgttacactttgttattatcattatccgtgatccttggaacttttgaaagtggagacgtaggtgcatttaacttcttttgaagtctaactatgctatatgaatagtgacaaaattacgtggggtctctaattttaaatatttttcattgtgcatgaagtattgccttgttttacatctcttaaaggatgttagcgataaactgaatttgatttttttaaagataaatacggaggttctggttttgttatacaatgtggagttccttttactgctattgtatgtattgttgccttgtcgattgcttttttttaatctgattttattattctggtactcacaagtacaactgatcattcattgcagtaagcgtaag

SEQ ID NO: 22963 - DNA, 485 bp, Glycine max
  Intron number 3 from transcript Glyma06g00800.1 (locus Gly ma06g00800) derived from phytozome v7.0 (chr-ID Gm06; pos 459750 to 460234 reverse strand)
atccaactttgggtaagatgtatatttgttcttttcattttgatgcttacttcaccacttctaattctaactactcaaaaagttataggtagcttttaaagctactatcacttgttaaattcgttttttattcttcacaagcgtatggcaaaattgcaatggattgcgttcttaattatatttatgatgtattgattgtttggaagaaattagatgagcgggggaaaatgaatattgctatctcaatcaaaattgttacggccaaatataaaaaaacagggtttttgctgagctttatcaagcttagactttctttgttttgttgtatatgtgtgttagttcgaatatgtgttagaataactatatcatgcccctactacacgtcttcaaggaacatgaaggaaagtgttgttagttttcatttgattagtcctggtcgatttctttcaggggttgatagtataggcacgataccatctgctctt

SEQ ID NO: 22964 - DNA, 923 bp, Glycine max
  Intron number 2 from transcript Glyma08g41260.1 (locus Gly ma08g41260) derived from phytozome v7.0 (chr-ID Gm08; pos 41272023 to 41272945)
gacaagactattcctgctaacgtgagtaaaacttctcaaaattacaatgttttcctaacccaagttcccattttaaaaacaacctttcacttcataacttttatactcaatttaaacttgtctctgatctctcttttcctttgtattaaatcatctatggtatttattattttttttttgttgttgttatctctaacaatgtaatgtgaaaatatctttctttttaaaagaaaaagaatagtaatatgtgaaattttaatgtcttccaacacttcattaatatttaagaattattatttttcttaatctctccttatgacagcatattatctattatacttatatctttttgtttttaattttctctttagttgttatctagaatttagtgttcacaaatcattatccttaattagaaaaaatatttatctcatataacctttctcttcacaattttgataaaatgtcaaatcaattgatatgcggagggaagaaattagagagtaaaaaaagaaatcttcacaaatgatttgttagaccttaactgtatttaatacctaataaaataaaataataaagatataagtgtatatataatatgtgtcatgatattataagaataaataattaaataaatgataggtgtgaatagaatgtatagaaaagaaaagtgttcactcatattctgaaacctagaactcttttctattaagtttataaaagtgtgatatgatacgaaattaggattattttttgaaagtatttatagctacaagaatgtgattacttcatatcaatgtttttatacatatcattatttcagattgcaagtatctttctttgacttattaattaatattatcttgttttttgacctttaatttgcaggaatcctgggcaatctgcaggatcttcaagaaaac

SEQ ID NO: 22965 - DNA, 558 bp, Glycine max
  Intron number 1 from transcript Glyma08g14520.1 (locus Gly ma08g14520) derived from phytozome v7.0 (chr-ID Gm08; pos 10546446 to 10547003 reverse strand)
cattcctcgttgccatctcctccaccttcttacaggttcttaccctgcatttgcctattggattcaacaaatctatacacgttttcagttttcttgaccacgtcaaattcttagtagctatcccaagccacagaaatttcttttttttagccatgaaggattcaagctcacatttttagtattctagaattttatatgcatcgttttaaaaaaataattaaaaaaagggtgaaggtctgttgtccctaacctggtgatatttaacataaaagaaattaatctccttcgtttagaaaaaggcttttcctctctgtcgttccatttgcgccataaaattctgagattaactttcaggattgaccataatttgcatgatcatatatatatatatatgactaattcaaaatatcaaacaagataagtataacaaacatcatgatcgtttgctcaacaaaattatagttttgtatatggattattactcatacgtgttttcttagcccatgttttccctgaatcatggttcaatgtttcaggtggcaatttcaagaggtttaa

SEQ ID NO: 22966 - DNA, 575 bp, Glycine max; identical to SEQ ID NO: 22712
  Intron number 1 from transcript Glyma07g40060.2 (locus Gly ma07g40060) derived from phytozome v7.0 (chr-ID Gm07; pos 44354894 to 44355468)

SEQ ID NO: 22967 - DNA, 441 bp, Glycine max
  Intron number 1 from transcript Glyma05g16140.1 (locus Gly ma05g16140) derived from phytozome v7.0 (chr-ID Gm05; pos 18117032 to 18117472)
acaaccaggtaattaaaccttctccaatctcaactttccctttccaaatatacctctctttttaatataattttttttacactattaactaattacaaataatataacttttgaggcaatcaaattttattatatatgacaaatatatgatcagatggcggtataattctttttttctcagtctgttctaattaaattctttttctttttttttagattttgaatgtttgcacctaattcaaaagtagtatgcaaagatcacctggtgtaggttaactactgggcttacttttcaaagaggcacgttgtacaagtatattaaactttccagagaaatggtttattggttattagtatttgttatatcttcatgcatagtgcctaaggggataatgaataaaataaaaaaaacaagtgatggattaaaataatactgaaaag

SEQ ID NO: 22968 - DNA, 440 bp, Glycine max
  Intron number 1 from transcript Glyma06g45880.1 (locus Gly ma06g45880) derived from phytozome v7.0 (chr-ID Gm06; pos 48619881 to 48620320 reverse strand)
aacccggttttcaccaggtacaaaatagttttaactttagaaatgatgaaattttttggttatttgattttgttccttttgatcagccttattagtgcatggttgatgctaggtgataatatataatttttctacactatcatccaattgcacattctcatataagtttattgatttttattatgtccattttaaaagtaataaagatgatgattttttattggttgaaaatgtaagaatttttacaatgacattgaatcacaactaaactcttgttttttaggggggggggggggggggaagaatattttttcataaaaagttcttttaggaatttgacaaaaagattatttgtttatgataagctgaattattcttttaactttgattgtgaaattggatcaggtagatttaaagggaaacacctttggcatattggc

SEQ ID NO: 22969 - DNA, 915 bp, Glycine max
  Intron number 2 from transcript Glyma07g08010.1 (locus Gly ma07g08010) derived from phytozome v7.0 (chr-ID Gm07; pos 6654985 to 6655899)
tattatcaatttttcattcatttgtaagtgggcatgtgattgtgaacttattgagctacattaattaaccaatgtgaaagactcttgtgcatgttgtgatattcatcattttatctcagtttgtctcattaaaaatggaaataatatgctaagttgctaaatgctttatgtcatctcagtgtatgtatggttagtttagtccaactgtgcaagttttcatttcgaccagtggttcgtgtttgattttgattcttcatgttatctttgtagtgggatatgcgtgcagtagtactcttgtgaaggttggaaaaaagaaatctcaatttgatgtatggtatgccaagatggtagcctactgttgattatagattttatttgaatttgatattgttgttcaatgattttcaaaaaagaaaaaaagcaaacagaggatggtgaaactggtttgaatttaaggtgtttgataaatagagcccatcttttttgtttaacagtgctaaattttcacactcaagattgaatggaatacatcgatgcaaaatgttatccggtactctagtctcagaatgaaaatgtccctttgatgaatgatttgttgtacctttgttttgcattaaattcagattctttctctagagatattgaaagggctcttggattctttttttttttttatgtggttattcttttgctagcagaaccaggggtgtaagaagaagttgaagtgatggaaccccacgatgaagaagagatccataactgtttgatcaagctggttgctttattgttccttaccttgggttatctttctagttactgtctttaatgcagcatcaatgctagtgaaggaattgactctattgttgataatgcattacagagaagtaatccggaaaggcgaagggataaggttta

SEQ ID NO: 22970 - DNA, 1043 bp, Glycine max
  Intron number 2 from transcript Glyma05g27300.1 (locus Gly ma05g27300) derived from phytozome v7.0 (chr-ID Gm05; pos 33212157 to 33213199 reverse strand)
caaaagttggctcaccctgaaggtatgtgatcagattctttggtctgtgccacattaagatattgccattatattctgtgcatgtttggattaaagtttataaacttagtgaatgaaatttaattttgtaaattgagtatgcaaaaacaactttttctttacttcattttcaaactgagtttcagtttccaatcaaatccaactgcaaatcaaacaaaaagttttttcagttttactttttgagcggaatttaaaagcctcccaaccgaaaactaaacataacttctgtcttttgttgttgttcttgtggttatatacaagtataactgcttcattctcatatgacaaaaagcactaagttacgcatttccataccttgaggaggaatgattataggatgaggtatagaatgacgtaatatgtaacttcctagcatttaattgaacgagaagatatcttgtggctctttgaaagaaagcttatggagtattttatgctgaaaccggtataggttctgtatattagtgtgctataagcacaagaacatgagaagagatttaaaagaggtttgcttaattatgaagacaacagaacattcccttctaaacaaaaaccgctattatcctttcttaaataagattacaatcccatttgaagcaaatgaatttatcttaaaaatctcagtcaatttcatctaaccattttggggagaaaattccagcaagttaagattgtctaatatgttttgcaaaatgtttgcaaattgcaatgaatatagtgttttatagagcaaaatattgcagaatgctccaaccttgacatcgtttaactattgtggtggttatttcttgtataactacgaggtataaaattaatctgaattaaacataaactctgctgatttcgttaatgcataattccctgattcttaatagaagtttatttcttactgcaacaacaattgataaaagcttctgaattaaaacaaattatgcaacttttatgcaggagaattagctactgctagagcagcatcagctgct

SEQ ID NO: 22971 - DNA, 621 bp, Glycine max
  Intron number 3 from transcript Glyma05g34790.1 (locus Gly ma05g34790) derived from phytozome v7.0 (chr-ID Gm05; pos 39005266 to 39005886)
gtcgttatttttcaaaggaagctattcaggtactttttcactgtccacttttctcgctttttaatgtagtcttcttggtgtctgaagtatttggtttatcaattactttataagtgccggcaaattggtaatatttctttggaaaacttatcatttgcattacttagatgccttacaattttattttatttttatgttgtcactttgaaattgagcttcttttctttggtttaatttgatttgtactacatctaacataggcaggcattttgacaaatctgattgcaccacttgtggcattttagatataatttatgattttggcttgaaatttactagatcttttaattaaacaaataaaagtatacaggttaagatcttataataacaaggagatggatactaaaatgccattttccaacttcagagttttgtactctggaatagagacttgctttgtttcttttaacttcatacaccattggttacgtatctgttcacttatgactttcttgtatgagaggatattcatttcatgctacatcacatgcttgtcttctaatgtcaatatcatatttgacatcactaatgattttaatgaatctgcagattataactaaa

SEQ ID NO: 22972 - DNA, 896 bp, Glycine max
  Intron number 2 from transcript Glyma07g40170.1 (locus Gly ma07g40170) derived from phytozome v7.0 (chr-ID Gm07; pos 44442455 to 44443350)
agacgttgaaaagttttaccagcagtgcgatcccggtgggttttcttaataataataataataataataataataatgcctttcttcattctgctttcaatcatttatcgtgtgcctttctccacccactcactcctgtaattcctctgctcccaatttgtcaatatatcattgcttgttgctccttcattatttgctatgcctatgctcttgttttcaaaacgtacatacttgttgggctcgctcattcattaatatttcataattccatctgccccgcttgctgaggaggagggaggccaatgacaaacatctcccctctacttcaattaaactaatataacggggtcattgaagtttcataaatgttgttagcagttgaatgtgagaatgtactggtgatgataaacagttagtaaccaccattttgttttcttcctctttcgcaaatgggtcaagtttgatgtgtttaatgtgaatttggctatcactttgcacaaatttcactactacaaggtcaagtgcctgtcacaccgttccatcaaacttcatggctttttgtcttctcgtttacttcgttatgtttgtaaattgtcaaggaatgaattaacagctatataaggggaatgaaaagaaacaatcaaagaatgggggcaaattatcaatttaacatctctccttatcctttattaataaagttccatgccagaatgcaatatcaacaattaattacataggaaatatctgaatggttattaaagtaatttacaaaatttgtccttcataatctcccaaataggaagaacccaagagaatgattttttgaagtgttatttgcaatgtgttttattaacattatgttattctcgttgtagagaaggagaatttgtgtctat

SEQ ID NO: 22973 - DNA, 846 bp, Glycine max
  Intron number 1 from transcript Glyma08g26540.1 (locus Gly ma08g26540) derived from phytozome v7.0 (chr-ID Gm08; pos 20878525 to 20879370)
cgtaagtatataactcccctttactactcctctatctaaatacaatcacgaccattctcattttcatgattaatcgtattcttgcattgtgtttatccgcattttttttattttctagaattgaatttgttatacatgtaattaattggtgtactttttttatgactctaactaactttagaggttaaaatacaaaaacggaattgttttcaataagaggcggagcttagttatgacagcgttaatcttctcctcaaacccctctctcatcttttcttaaaattgtatgtatgtttgtggagtgtattaaatataatttttttttcttattgtgaataatattagttataaatatagaccattaaatcataattaaatgattaggattaaaagaaaaatgtctatcattaagtgattatatgaccgctaattttgaaatttgaccatccatgtataattatatgattcaaatttatagttctaatttcttataataaaaaaagtttttgcttaatacgttcatgtgtatgtatataatcattaaaagctatttatatttagtcaacactaataaatattttgtaatggatattctttaaaggtatttattcctcaattattataaatttaagattataaatattaagctgtattatttagtaagaaaatagtctatgcatctaatacgaaatcttcatgtataataaattcagctgacttttacaaaaatgacttaaaagtcacacctatcataatttataattgatgaacagtgtaaaataatacatgaccattgagctcttagtttaatttttgtaatatgacatgcagagggtgcttgtggct

SEQ ID NO: 22974 - DNA, 835 bp, Glycine max
  Intron number 2 from transcript Glyma05g25610.1 (locus Gly ma05g25610) derived from phytozome v7.0 (chr-ID Gm05; pos 31681636 to 31682470 reverse strand)
ctgtttccgtacattgaagcttgctacaccaacttgtaagtttcggatttcttctgttattgttgttgttataattgttgttctgctactgtaggtggtcatgctgctgtgcttgatttttctgtagattaactgttaagcaatgattagtatagtgatgtcgttgacatttcaatttgccatatcattaggaataaatagtactgtatatgtttagggtccccacatatacttgacatctcttttgtttctgattcctgcaattttcttcatcacctgttttggtccttgccttaaacttaacagttaactacatgttttacatccctcttaaaaaaaaacactcgtgttatttttcgtccctgacaaaatataggaattttatttttagttcctacaaatatagtggtttttgtttttagactctgttgttattttctttcaaatatgactatttttgtttttagttcctagttcctactgtaacccaaacaaatgacagcgaatattgctgggataaaaagtgaaaaaaaaaaaaactacaaggattaaaaacaaaagcagcaatatttgcaaggacaaaaaattatatttaaccgatatcattatatttgtgggaggattctagtgagttttagtggtcatatagctggtggtcatggttgttgaaatacttgaatttattcaatcattgtggttcttggtccccttttctaaatggaatataagttgtattaaattttattttattctcatttagttgtgagttcaatttttcatttgttttttcttgtttgttgcagttggggaccttaaccacctcatttctgctacc

SEQ ID NO: 22975 - DNA, 542 bp, Glycine max
  Intron number 2 from transcript Glyma07g17640.1 (locus Gly ma07g17640) derived from phytozome v7.0 (chr-ID Gm07; pos 17381331 to 17381872 reverse strand)
ttattgtaagtttagagattttttttttcttgtttgttgagtccccatgttatgctaaaggcatttagttttcactcttctgacctcagtttatattttattttaatgcctattaagttcaaagatgaaaagaatcgatgttttgattaacatgtaaagcttgtttggtgcttattcatgtctttatgtcctatattactcttgcaggaaaaatccaaactgtttaggttcttgactttattttatttattgattttcctgaattttaagccaatcaaattccattcatgttgctttcaactcaattgagggaacaatatgttcagtttcactttggtttgagaacaatctgatatcaacagttttatcttctaactttcttttctatcttttaacagattttatttattccatttgaaattttaaagtgatttcaacttttgctatatttgaactgcctttcgaagccctttaatgaataatgaatggataacacagcaagaaataacttttttaataaatgtttatttactatgcagggg

SEQ ID NO: 22976 - DNA, 1046 bp, Glycine max
  Intron number 1 from transcript Glyma08g22090.1 (locus Gly ma08g22090) derived from phytozome v7.0 (chr-ID Gm08; pos 16766626 to 16767671 reverse strand)
aagatctcaccggttcgtattgctaccttcccaatgttcttaatcttgttggttgattggacgctcataattttctaaagggtgtcataaaaatctgaacttttactttttttattggaaggggtttaaacaaaatgtaatttggatttatagttttccttctattcctttgagattgcttcattatgatgcttgattggaggttaagcaatacttcaaggagattccattgttaattgtgacttaaatttaattagaatgtagatataatgcgaaataaaaattacattttcattcaactatgtatactatattgtcatatatagtaaaactattgattgcatgtttggatcttcatctatgattcacatttagtgcaaaatcatgccaaagacaatgcaaaagcaattaatggttgcgttgggaatccacgtctaaaacagtgtctagcgtgtttccaaacatactatatatgattctgagtataacattttttacattgatagaaatacggaaatgaaattcttgttattttatgacctgtagaaaatatcgtgaccaatgtgtaagtaactgtgttgtactcatgtttcatgctttagttttcctaaatttaaattgatttccattcttcaaatgccaaaattgaaggtccttcactcctctgctatcaagatgtattacctcgacaattgtctatggttatggaatagtaaaacatcaaggagaatctattttgataatgataagtgaaattaacactgaccttccttgtaagtggttttaagttttaactgtatcttcaaggaatcctgttatgaactctgcaactctatagctggtatttttgtaagattgttcatatgtgctcattttagaatcaccgacttgcctgacaaaattagatatatttttccattgattttccccttactacatatctttgttgattggattcgttgggattttcaggcggtgctgaaaataaacgtagtgtctctctttcttcagcaaggctaaaacatcagggcggatttaggtactca

SEQ ID NO: 22977 - DNA, 719 bp, Glycine max
  Intron number 1 from transcript Glyma07g12400.2 (locus Gly ma07g12400) derived from phytozome v7.0 (chr-ID Gm07; pos 10698566 to 10699284 reverse strand)
ggacaagtctttgacaagttagagggtatttccttatttcccttctcaattcttcattcatttcttgttatttagttaccttcttctcttttcttttccattttctgattttcagttcctgcacccttttcattcctccacttgtttcatttgttctctatatttttttctctgttttggaattgcccgtttgtgccgacaataagggtcatttgtataaaggaccaaataataataataataataataaatcaaagacatgaaactttaaaaatatatttgttttttattcagatataaacccactcttatctcctgaatgagtataggctgcacagtgattgaatttattaccatgttgtgcatggaaattatgaaatctggggaagatgggttctatgctgtaacaaatatcaaaatatattttttggaaagaaaaaaaaaattttgttttaagtggggtgttgaactatgtattaaatttgaaagtgataattctgggaaagtagtaataagagagctgttcaacttgtttgtttgatttctgctggaaattaagctttgagtttgcttgtaaattaggaagctgtgtaaaactgtaaatccctttacacggtttgtttgtttatttattgaatcctcttttggatgtgtttgatgctgtgcttttgtagtctaacgttgtggcctgtgacatcatttgtgatttgaaggccaga

SEQ ID NO: 22978 - DNA, 751 bp, Glycine max; identical to SEQ ID NO: 18382
  Intron number 1 from transcript Glyma07g09270.3 (locus Gly ma07g09270) derived from phytozome v7.0 (chr-ID Gm07; pos 7740912 to 7741662 reverse strand)

SEQ ID NO: 22979 - DNA, 623 bp, Glycine max
  Intron number 1 from transcript Glyma06g05970.1 (locus Gly ma06g05970) derived from phytozome v7.0 (chr-ID Gm06; pos 4284794 to 4285416 reverse strand)
ctcaaagccttcatagacgtaacttctctttttcttctttctcacttagtcactttattttaatttccaatctagttatgaaagaaggaatttgaagacatggatagcatatttagaaactcttgaaaaagaaaatcaccattgggatatagaaattacaactatcagtggtgtcggatctaagtggtgagacaaattattattattttagacttgaataaaatggaaatgaaaaataaaagcttgccattaaaaaaccaaaatttgatcacaaaatgagaaattgaaaacgaccagtttaaatatacaaaattaagaaagcaaaatgcaaaaactctagatatatatatacttacaattttctcaaagagggagaggtatatttacacttccttactcttaagtccagcgctgactattagcacaaaaaatttacaagcgagatgtaaaaaattacacgcgaaaaaaaaatctcctgtacttcgttccatggggttagcaaaaccgaaatttgactattttgaaaagaaaatactaaaaattaagaattctatattttcattaatgcatagtttttattatttgtaggaattatacggagaaaataagaaggaaaaattgga

SEQ ID NO: 22980 - DNA, 490 bp, Glycine max
  Intron number 1 from transcript Glyma07g29670.1 (locus Gly ma07g29670) derived from phytozome v7.0 (chr-ID Gm07; pos 34684747 to 34685236 reverse strand)
tttcctctcaaacccatcaatctacggatctctcagtaagtgggtgtttcattgttttacttttaagtttctgtgttttcaaatttgtgcttttctgcctctgccatgattgatttctagtcttcaagagcttgtgttgtcaagtttatgtgagtgcataaatttgatcccttgctaactagtttcattaaataacacatcgaacctacaatttttttgttttttttgttataaatttcctcaaaagagagtgtatgcaaagtattgtaaattttgtgatttgtaataaatttgaacagataaaagagagagtgtattcaaaagagtatgttcgagtttgagagtgtgttactagcatttctcaatttgatgattatgtttattcatattattctgaatctgttgaaccatccttcactttctgaaagcatatgtggaaatgttttaccccttttttaaggccttttcccacttcttgttaggcttcatt

SEQ ID NO: 22981 - DNA, 938 bp, Glycine max
  Intron number 1 from transcript Glyma08g05090.1 (locus Gly ma08g05090) derived from phytozome v7.0 (chr-ID Gm08; pos 3632945 to 3633882)
ggggttccaccaaaaccctcggaaatttcgtcaaggttcaattctttttttcttctcataatgtctatttttctttaattgattatcagatattgctttattaacttgatttatggtaaggttttaaatctcggtcaatttcttggttaaatgtcaaaacgaatttgcttatattatccttcctttgctgtttcaagaattaagcttttctactgtttcaagtttgtttgtacgtttgaaagttccttccatcttacaaaccagctaaatttggattcactattgaacttttggaatatggaccacacttgtttagtttttttactaatgctgctctttatctttatctccttgtaagttgatagcatttttttacgtgaacttaatgctattttttggatgttatatttttatttgattgtatttgcattttgaattgtgcacaattttacattttacctttggttatacggaaatgcaagatggttttctctaatactataagatgtttatttgtctaatgcttaattggccctgttgtgcatactaatgggttacgaatagatacaagttctatatgaaatttattccttgtttgaatataactcccttctatataagtacttgtaggtcaagaaaataagaagttaaagtgaaatagggttcttccatatgtttataattagcctatgcacaacttaagttgtaaaaccaatctcatctagctttttcaaaagacaattttaacttgtgtataatattaatttattagggaagcttgtttaacatcgatatcttttcatagctgctaacactatttctcattttttattgtcctttgaagtaatttgttaggcattttctgatttatccgtgtccataatgtcacttgtgtttttacaggctacttttgactgtttgctgaaaagctacggttt

SEQ ID NO: 22982 - DNA, 883 bp, Glycine max
  Intron number 2 from transcript Glyma07g02220.1 (locus Gly ma07g02220) derived from phytozome v7.0 (chr-ID Gm07; pos 1544237 to 1545119)
gaagcgtacgtaaactctctcaccttgcgtatatctacgattctacgtattaattaatttagtattgaatcatggttgagaattatagttttcttccacttttcctttgtgaggtgtcttcagttccaccttcattgttagagagagagtactgacggagttattaactaagtattaagaagcagcttttcttattaatttattaattataatttatggtttgtgagatcattttatatatgcacactttcgtatattgggtgttaactagcactcaattaactaatataaaattgtttcagtttaatcattaatcattaatcattacaagtctttaaatatttaaaataagattttgtttcttataataattctacttaattcaaacaatactaaggagaatatcaatgtgatctataccaaaatgttaggtgttaagtaattagtactaatgaaatggtttattccgaagttaaataatttgcatgccgacattacaagtggggtttaaagcatatagcttatgtataacttgtatgtatgccgtactaatggcaaagattatgagaaaagtttgcgatcgacatcatatagtcaaactaaaaagaagattattaaagctaaagcttgcttaaaatttttaactgctttttgctttgtcggttagtttgttatcttatgccattaaaaagcacttttccacttgattagtttgtgttattttaggttgttgcgttattatattaaactccatttgttaattgttggatcagtctctctgagatgaagcttgtagtgaaagatagaacagcaaaaaagactgacaaactgacatgaataatgtactattgttgtaggcttttcaaggaatcaccgcatcctg

SEQ ID NO: 22983 - DNA, 755 bp, Glycine max
  Intron number 1 from transcript Glyma05g27430.2 (locus Gly ma05g27430) derived from phytozome v7.0 (chr-ID Gm05; pos 33367667 to 33368421 reverse strand)
tttcctgccacatcttcccctgggctctggtatgtgctatgggtggagctagttcagaaatagtggccaatttactttttatgctttcatacacttacttatgtatggaataatttatttgctagtattggtgaactttaggcggttgtaccactttggaacagtttgttttaacttttcttttaaggataaggaaactaaaattacagattgcaagttttacggttctacggtgaatttggtttgagtggattccctcactttcaagggagcttctttgctttgcttctatttggtgccttgctcatagatttttgtggaggtgttttcacctacaatatgcggagagctatacgtatttaacagccttgctgcactcttgagtcttgaactttatcgttatttcattttttaaattagtttttcctgttctggaggatttcttatccttcccactaattatttatcttctcttaatagttcttcttttacgaaagaatcaaaacttgtcatggattgcatatttgttaccatgccttcttcaaatgtttcaccttccataaatgctgcaaacctaatcatcagcctgtattctgtacctgttactcgaagatatgtgcatgaagttgactataaattcccaactgttttatgcaaataatccatttgcagctttcacatattggctgtcaaggatacacagatagactttcttggtaactatgctgacttttatgcaggaagttcacaagggc

SEQ ID NO: 22984 - DNA, 777 bp, Glycine max
  Intron number 1 from transcript Glyma05g21470.2 (locus Gly ma05g21470) derived from phytozome v7.0 (chr-ID Gm05; pos 26123129 to 26123905 reverse strand)
gaagctcaaggggagttcagtatgtgtgttttcacgacagtggtatatgtgctattgagatttttaagaattccaggtttttcttcatgttttccttattttttttttgttgttgacaaagtctaaggttgcaactttcaaagataactgcttatacaacaataaataatttggcaacggatctattcagttcatggttttaagtgaggagcattatatcaaccacttcaatgcagagacatttgatcttttacatactttgcaattcgattggccagtatttgtaagtacttcaacatagttttaagactaattaatttagaattagcatgactttgctaatgctagtttgcactcctttaagaaacgatagaatgaaacaagtgaactaatacaattgttttaaaattgagtgcttgactacgatacgatttgatttatgttctgtttatactttttatttaatttttgtttttttgttgttttgaaaattctggtctagcattctaactgcaatactgtgatcatcaatttatcttgaattgtctagtaactagatttttgcctgcattctacagttagctaaaaagtataattaagattgattagttctagctcatagttttaagataagattgatttggtatttgacctgataggactgggattcacaatttgtctgcagtactgtgaaagtatggagatgtaagccgtaagttacatgttagctgacttcatggattagtgtttaagttgttgtgcccggagggagggagg

SEQ ID NO: 22985 - DNA, 989 bp, Glycine max
  Intron number 1 from transcript Glyma08g28550.1 (locus Gly ma08g28550) derived from phytozome v7.0 (chr-ID Gm08; pos 22865085 to 22866073)
tctgccagcgtctctgcgccgagttccccaccgaggtagtattcaatttccttcaattttcctctccttcatttgattcctcagaaacttcgagaaaatggaattagagatggaagtttctctccctccgttaaaagctccgaaaacttcactgttgtaagctccgagatcggtggatttatacatgatgatttaaattgggttcatgatggtaatttgaaggttcaagtttaattttggctctttgttagttttgtgagactagtggatttatacatgatggttttccctcttccaaggtttgaacttttaagttgcgtgtgtgcactttgtgataatagtgaaagggtttcttttcatgtgaggactatttactacgaggtatagctttttttttttttttttgcaaagggttagaagatatttttgtgctactttatgaagagacttgtaccttaaattacttgtaccatacaacaagtctgaagcagaaatcaattaaataaaaaaatgtcaacatgatgtttggactcggttcttgtaatgtagtattatgtttatttatatttatatttatgtgtgtaaatgtgatgtctatctagactttgtttgttcttctgatttattatagatgttggctcaatatttttaggctaaataatatttctgatacttgggtatttagctgtcccgaatgatgttgtatgatccatgtagccgacctcacctgatgggataagactttgttgttattgttgtctcaatattttttgagttgatgagtattcttcttatttgttgtgcctaagacatgctcaagtgatgatttttttatccttgttagttgtttcttcatgttcattagtggtcctttctttagctatatattgaacatcacttgctgaaggatatctttactctcttcgtagtattgttggatgactatttttcctggatattatacagacaaatctccaattgttggctaa

SEQ ID NO: 22986 - DNA, 802 bp, Glycine max
  Intron number 3 from transcript Glyma07g33010.1 (locus Gly ma07g33010) derived from phytozome v7.0 (chr-ID Gm07; pos 37897519 to 37898320 reverse strand)
tggcgaagagtaagtatgatattttatatttgatatagatagatatacatatataattgaggttattagtcaagacaaagtgtatatatcttttttatgcaaatgtatcattcctatccaagtgctgtagtcaaagagactgctgtaccatgatattgaatcacaatgcatgctcttctgtgtactttgctccatttcctgaatggatagatatactggtatttttgaaatctgaatgttaaacggtccttttttgttacaacttctattgatgtttattcagccatatgcagttgaccttaaataacttcaaggttatcattaatctttatacttgtttttgaaatagcaactagaacgacacaaatttacaagtcttccatttgttagtatatatttttgtacatagcacagtctataatgaatctgtttttatcaaaccttatggctggtttgaaaatggttagttagtcttaaatcaagcaaaaattagtgaaaacttggacttaaatagttgtagataatttatagaaataaatggaatcatatgttcccatgttggtgacaaaaatttagctaaatcgtattgtacattatgcattcctgctgtgtttgttgaaattctcagtttttaagcatgtatttatagtttaggcttatgaaaaaaaatcttcctaaaatatgcctttgttacttgtgcaaatttttgaagtgtaatttattcaagagatgtagtttcactaaacctatgtatatgctgtgcttagtgattaggcaaaggaaatatttacgggcaaagttt

SEQ ID NO: 22987 - DNA, 1031 bp, Glycine max
  Intron number 1 from transcript Glyma06g20150.1 (locus Gly ma06g20150) derived from phytozome v7.0 (chr-ID Gm06; pos 16531102 to 16532132 reverse strand)
aaggtaactgaaaacaaaacaaaaaaggttaaatgaataatcatttggttttgtaccgtttttttattacatgtatccaccggttttctgcatgactaatctccgagaacttggctagttacctttgatggggtctttgtttaaggggactgagtactaccactccgaccaatcacttattgattggttggctactttttagtttcaatgaaaatggaaacgctaaatgtttattttgatttaaccaaaagattgatgatgtcttagtttaattttagagaaatgtcacgaatacacttttatggacactcatattatttttattggttgaaatctattgaaaatcacaaaattttatccatttaatgattttatgtcttgattttgtagtttttaatgaattttaaccaatagaaagaaatgcctttataggagtgtgttaaagagagtcgcactagcactccactttcaaggagcgtgttaattttatgatactgttgtttcaatgagtttatttgtgtcactgtcaaccaatcaggggtatgctttagtttaatctggggcctcaagttccagtgtggggtatgcaattgtgtgagagaaagagttttgttatttagctatttatagcagaattgtgtcctgtaaagaatatttgtgtttttgtacaaaaatgagaccaaccaatcagaaatcattctatagacttttaaagtagttgttatagaagtgtaagagactataagagaggaagacccaaaaagactataagagaggttatcaaaaagaatctcgaacttaatgatttggatagaagtatggtacttgatagaacattatggcagaagttgatccatgtagccgaccccacctagtgggataaggtgttgttgttgttgttgttgttgttatagaagtgtaacatagtgacttgtgattagatgaaagtgtaaaatgtaaattaagttattattgaattagaattttgttgttcagggatttcttggactgagtggagctatcttgatcca

SEQ ID NO: 22988 - DNA, 812 bp, Glycine max
  Intron number 1 from transcript Glyma08g07550.1 (locus Gly ma08g07550) derived from phytozome v7.0 (chr-ID Gm08; pos 5405535 to 5406346)
ctttagcaggtaatcatatttggatgatggttttgaacttgtaactttcatggttttaagatcaaactatataaagactttgacattatgacataaattgtacttcacgggtcagataataatataagaattgtattataattgatgtacgtacttatcagttatcagaatttatatttgtcaactattaatgtcactaaagtatattttgcacgagtagttgagtacacattctgtaacacttgtataagtacttttgaattataaatttgtaattagtttctggggtctcccctcagttccatatattgctttgatagtttaattacatttacaatgtcgcattatagggaagatgatcactagcaatacaccttttgacacttttctttcaacactttctgtatataattgattaaaatttattaaaaattacaaaataagaagtaaaattcgtaaaaaataattgtaatttctaatatatttcaaccaataataaattacatgtttaaaagaatgtgtcggatactatgtttaagagaatccatgcttaccatgattgcactagtacatatctttcgaataacttcatgtaaaataagaaaaattcaaaggaaaaaaaaagaaaacttgcgataattttccaagaaaatttgtcaagcaagacagttataaacttcataaacataatagtatctcagcgctcccttttgagtaaaaaaaaagttataaacttcataaacatcatagtatcctataatttatatgaaattgcaggaaggttaggttcaaagacaaagcaaacagggaag

SEQ ID NO: 22989 - DNA, 683 bp, Glycine max
  Intron number 1 from transcript Glyma06g12820.1 (locus Gly ma06g12820) derived from phytozome v7.0 (chr-ID Gm06; pos 10001374 to 10002056)
aagattctcatcctcgattctcaaacggtgcgctgcactttccctcaacgatatcccacaatgttgggaaatccgatcaaaatatccatcaatcgtttttttcttcttcttttggattaaaagttacttgtattgttcaccgctggatcgatttttcgtacttatttattatttttccaattttcactctgaattttggatgattaagtgccactcatggtagttcgaattatccatttgcgatttttcgtggaccgtgagaacagattgtatgtttgaaagcactgcgaagtgacggtgaaactccgcattatatgaatatgtatttttcattaagggaaacaaaattatgaagctccctaccgttgacaattataaccgtttgattgattattatgatattggtctcatttgacattatgcttgtaagttataatgttgatatgtttgtgtaaagtcattgcctgtgattttatggccaagacactaaataattatgagttggcttttacgatttcgttttacttcatcaaaaccataagtcaacctgccaaacggactggttcgttgaatttatttgcttgtgcttgttaaggaggaaagtggagttctgattttgagtctactttttttggtaaattgacgcaggtaggtattgtgagtgtcgtgtattcacagtcgga

SEQ ID NO: 22990 - DNA, 793 bp, Glycine max
  Intron number 1 from transcript Glyma06g07010.1 (locus Gly ma06g07010) derived from phytozome v7.0 (chr-ID Gm06; pos 5067916 to 5068708 reverse strand)
ttattatttgggtcacctccgccgaagttacccaggtaccttacgcattcctagtcctagtcctatcacacaatcaaaaacaggatgcaagttaatgtttgacttgatttgactttatgttcaaacctccaaaatcctaaggatctatttttttttttattattattattacaaatggagatacaatatctagtgtggggaaaggaagggtagttgaagtacaggctgcacttgagctacatacaaatgtatttcaatttttattttcgattctaggtcaacgattttattaactcagcatttcaacgtttatgattcaactatgtaatcctacagtcgagaactatgtccattggtgaagtggaactaacaattaattcgtatagcgaacctgaaaacatttggtcatcttggttttgactgaatgagaactgcatccctgtatcatttccagttatatgttatatctgatgttgctatattttacatgcgtccactagtggacactatgcttgttgatttatatttgcaagttattagtttctcttgtaacaaaatctatgatccatatttcattatctgcacacggggagatcatattttcttcaaacttcaaactcccttgttgtttaaatcctgctcgaggggtgtcttagtaatagtatctatttaatatttatacattatcgtgcaacaatgtcagcatccaagttttatacctcccaataatttttctgaacaatttattttctcaacaggatatttttacagattataagcagccatttgcagt

SEQ ID NO: 22991 - DNA, 540 bp, Glycine max
  Intron number 1 from transcript Glyma06g09100.1 (locus Gly ma06g09100) derived from phytozome v7.0 (chr-ID Gm06; pos 6697523 to 6698062)
cccaaacagatcaaggtttggttccaaaaccgaaggtaatcaattaactacttctcctaccctcttctccgttcttctattctttcccttcctctaaccaccttcactttacttaactttcaactttcatttgtatacaaccatacatatatgtcatgttgaaacttgaaagtaattgaatttgattcatttgatcaaaagggttgcttgattggtgtaaatctggcttctttttttttttttaaatcttctctttatgtttcttttctccttttcctttaaccaatgcttttattttctatttttcattgacaaagatttaaaaagattggtgctaaatttttatttttcatgaccaacctaccaaagttcctgtttttctagctagcttctcttgtcttcctcatggtcttgtttatgattcaaggccttaattaattcttttgcagttaattattggagggggctaataattatggtgtttttgttttattggttgctgcaggtgcagagagaagcagcggaaagaagcgtcacggc

SEQ ID NO: 22992 - DNA, 909 bp, Glycine max
  Intron number 1 from transcript Glyma06g21050.1 (locus Gly ma06g21050) derived from phytozome v7.0 (chr-ID Gm06; pos 17498940 to 17499848)
gcctgacctcaaggtgaaactcttcaattgtgtaattggtttagagccagatatacaagattgccaccatgtcaacaagagattaggaagcacataccccgtatattagagatttcgagaatgaaacgtgtttatattatattataaatatattatatatgggaatttggttgttctatgcgtaaaattgtttaatattacgattaggatatttattcatgtcagttaattcattaagcttgattatttaaccaaatttgagaattgagaggcttaccttatgagcataaaattacgtgacctttgaaaagtttattgtaattaaattcatagaacgtctgattaaacaaccttatgaaacatatttttagctgcgatgggatacaacatactatgctttttctttgtaacaccaatttctttcggtgcaactagcatattgactctgttaattttatctattgttttatgacttaaatataattttagtttcttaatttagaataattatttttttagtccctaacaaaatctgtagattttagtccatcaaattttctcgaaaaaatggttttagactttctgtgttaactcgctacaaaagcgtgacagacggtgaaaattttgtttttgtttaaatcaaataatacaatttctggcggctaaaaactactagaatatgtaaaaaaagagataaatcgtgcggcgtcacacaccatcttcgtcgaatgaaacatatctcatattcaacgaaagcatacacctcccatattcaatcccacaaccccaaatcctctccctcctaacaaaatcaattttcttagtcacacaatcaaacaagaagaaaatgaacataaacaccatggaaacaaaaaagtaaacagagtattcaaagttccacgcggggga

SEQ ID NO: 22993 - DNA, 830 bp, Glycine max
  Intron number 2 from transcript Glyma06g35660.1 (locus Gly ma06g35660) derived from phytozome v7.0 (chr-ID Gm06; pos 37655739 to 37656568)
aattcgcttaccactatctctctagaagctccaaggtaaccaaaataacagaatcattccaggcctaatttattgttttcatgtttttttttctctcttttgttttggaatttcatgattagactttatagtatgtagttactgagtttcctaatttttctcaaaagctatgatcctaccacttagccaaaggttattacccttcagtgcaaaggcacgttccttagcatgtacaagctgcactgcatggggaatataaattaactattatcaaaatgatgacaacaaggtataatcatcaaaagggcacagcaacttagctactatatcatcatcatttgtgaaccatttttttccctcagttgctgctaccaagcataagatcctgaatcctgctccttgatctccttttaaagcattctgctacactctaaacagttagattcacaccttttaacaatttcatttacactcttctgaacatatattttttaattatttactactaatatttattataaatcttgttagtattaccgctacttatttgtagatacactgtttatcataatatcaaaatttattaggaataaaaaaattatttaacaagttttattcgcgatcagtgtgttgacacttgacactcattttttttagtttatacatttgaaaactactattgtactcctaattcattcattttttaatctgttttaatttttagatataagaactagaatgtgttaacagtgtgcagaaaccaaacgagtaactaaactttcattttagtggctaattaatttgtttatttattttttaaatgttgaagg

SEQ ID NO: 22994 - DNA, 298 bp, Glycine max
  Intron number 1 from transcript Glyma08g38190.1 (locus Gly ma08g38190) derived from phytozome v7.0 (chr-ID Gm08; pos 37084677 to 37084974 reverse strand)
tcactctcactgcttcaacgacagcaatttttgtaacgccacttcttcaaaaaaaaaaaaaaacttttgcttaatccctgggacacccttttggaaccactctcctatttatatttcacatcctccaatttcattcctcactcccaaattcaaagtcttaaatttctagcaaatagtgagcttgtgtaactgtgtttgtgtttgtaattatctaccatatgcttaatgctttctttctttctttttctttaattggttttgttatttatttgtagggtggacgaattctaagagcgtc

SEQ ID NO: 22995 - DNA, 1033 bp, Glycine max
  Intron number 4 from transcript Glyma05g21570.1 (locus Gly ma05g21570) derived from phytozome v7.0 (chr-ID Gm05; pos 26242839 to 26243871)
aaattggagtggaaggaaaaagatttcgccctacagtaagcatattctcaatgctatgcagatgttcttgtaggcttttgcaacaatttgctgcagatcttttatccttctgcagcaatgcttttctttggattgatatttgcatatcatcattgtaggaggaactaaactactgttaacttatacttggaaagttgtgaatttgttgaccatcacttgcctttcaagttgctctttaaaattaatacaagcaagctaacacgtccttacatactgactcatctcctctgttctatcacgagctcaggtttatcccattctgtgaaatatgatcattgacagttgacacatgctttaagtgtgtggttgggtaaatatcttaattaagtgcttattgaataaacttttatcaaccaagatcttatttataagttgttttaataatcaaagaagtaatgaggttatactgttttaagttctaagttcttagctgtttttactagttgtcttattgagtttattgaaataagctaaaaacagcttgtaataatagacatcataagctattctcataatttctcctaaacacttacacaaatgcttatatcataaaataagtcttaataagctgtaaataaactcttccaaatgcacccttagtggacacattgaaaaatgcaaggtgcccttagtagtttgggctatgtcgggtactaggatatttttaacaatagctacaactgctattcaaacttgttttacttgttaattgttatgacatctggatcaggaggccttcctagcattcttaattcttcacttcatggtgctaattaactctgatagctttactgtttctccatcttttttttgtgtaaagtgtgcatatagttataacttataaggtgataaaatgtctcttttgttattttatgtctttgttctcctgtattatccgttgttagttttgtttcattctttcacgtacagtattcaggttaacaagtggatgtttctgtaggttttattgtta

SEQ ID NO: 22996 - DNA, 1030 bp, Glycine max
  Intron number 1 from transcript Glyma06g47520.1 (locus Gly ma06g47520) derived from phytozome v7.0 (chr-ID Gm06; pos 49939865 to 49940894 reverse strand)
gctctcggtccttcccgctgatctttgtggccgtaatctaatctgtttgtttcaattcatgtgatttatgtttgaatctttttattctaaacgcatgttgctagtaaaactcaactaatcgcattatgtcattgcacttttcgacactttttaagttgagtgatgattgcaattttctcttgaaccttgatagtggtcactgatagttttttaaaaccttgatgttgtgcacaaaatcattgtggtctcttttagtattgagtgtaaggttttataaattggtgtggccacaacttcaaggtttttgtggtctataatttttgctccataaaaccttgaagaaggtggtttttggacatgtccaaatgcccaaacaacacagtacacttctgcctagctacactgtgcaagaagggccttatttggctggggcacctacaacaaatcattaagtgttcactctgttaaatatcatagtccaaattatttttttaagtagctctagacctttcaaaataaatctacagctaaattgtctacagacgttgtcacacttttgcatacactaccacaccctgacaccccttaattttgaactcaattttgtgtctgtttttacttttctaatttgcaagtttaattaagtcatttaagtgtttgttctgtgaagttaatattcaaccttttttcttctgatataatgcctagatggttaagaaattgatctggtatgcattggctaacactgttctctcatctcttttaaattgttttggttatatgttaagatataaacttctggccatttccattttaaattattgggattaattagctgttaccgttttaggctaatttttcctccttatgcctctccaaatgataaaaaaagagaaaaggccattaaaatttataagcagttgtttctagattttgatgtccaacagaacatgattcagtagtcttgaatcataagtctttcaccattgctaagtcccctgacacatttccctcttcatttcagggctca

SEQ ID NO: 22997 - DNA, 246 bp, Glycine max
  Intron number 3 from transcript Glyma08g01920.1 (locus Gly ma08g01920) derived from phytozome v7.0 (chr-ID Gm08; pos 1256394 to 1256639 reverse strand)
ggagcatcagattcaagcatttccttgcttcagaggtttctttcctttttttgcacttctgtatactacgaataggatctttgaaaaaatataattttatcattaaatgttgtcttgtgaatgtaataaactgttgacgtggcttttacaggtcaatttccgaaagaagtattgcccattatattcttcactatcagtaagtttaatttgtgtttgagtttcattctttgttgtttatctagtcgc

SEQ ID NO: 22998 - DNA, 607 bp, Glycine max
  Intron number 2 from transcript Glyma08g01920.1 (locus Gly ma08g01920) derived from phytozome v7.0 (chr-ID Gm08; pos 1256618 to 1257224 reverse strand)
gattttttgccatagaaactcatgttctgttcctgcttttgacattgttctactgggactgtctttcttactaacttttgtgagtgtgtgtgtgtgcgcgctttgttatttcctacacttttgcattatactatttgtgaatgagaaatggtgtataggcatacgcatgcacatatcaaatgagagtgagagaaacaaataccgatcattatattttactataagtgatcaagattaaaacatacaaggcatgtaagttttttagaaagttggggagttttttaaatgatcttgttactttaaaaaaacttttaattttgactatccatgtatggatgtatgacccaattttgctcttctcactcttataaaatggctttcttactagatacaccgcggatatatagaatcctttgttttatttattttgtttaaaattttgtattgggactaacatgttgaatgttgccatatcacttagtcttttcaaattgcttgctcattgtggactgtgatgattaatacctttttctttgcaacttcaggttaattgcagtgtttgttattttcagaatacagcaagaaggagcatcagattcaagcattt

SEQ ID NO: 22999 - DNA, 757 bp, Glycine max
  Intron number 1 from transcript Glyma08g39960.1 (locus Gly ma08g39960) derived from phytozome v7.0 (chr-ID Gm08; pos 39639595 to 39640351 reverse strand)
tggaggatcgtgccaagaaactatccaccacccaagtaaggagacaaaaatatatgcatgtacaataataaaattaacatactctatctcaagagaattattatatacatgatccagaattatgtgatttccatcaatttccacttgttatgtaaccacacattttaatttacaaaaaaacaattaataggatggacacatatatatttgaaggatgtaaatgcacctcctgattttaactttgagaaaaatacaagtatatattcattgtaataattccttttgcaccccctaattttataatttgaactagttagtttcaaattatgatttttattgactaatttgcactccctaatctttacattttgttctatttttagtttactagatacttggttttattcatttgaacatttcatttctttttcagctcacaagactagattaatttcaagatttaggtctttgttttcatatgcatgataatgattattattaatttttatttttttaaataatttgtcttcactgacggtcttgaatctgtcacttatgagtattggtggggatcacatagtgtcgaactttgtaaacaataatttctgaagaagtaaaaaaaaaaaaacccataaatttgacaatttaggcacatatatatacttgcctaagtatatacatgcaaacagatttccaagttattttgcgtgaatatgttgaattttgatgcttgtatatatcttcgtgatatatgtag

SEQ ID NO: 23000 - DNA, 403 bp, Glycine max
  Intron number 1 from transcript Glyma07g37220.1 (locus Gly ma07g37220) derived from phytozome v7.0 (chr-ID Gm07; pos 42356270 to 42356672 reverse strand)
ctccgcacgtgcctctacgaaggtaccacactactactactactcactccatcagtttcttctatcttctgtttctctccgatttcaattcgctcactttctctctctattcaagtttgtttctttttgcgatttggacgctcggttaattgtccctctcaacaaaataacaagacacagaagcagaatgaaaaatcaaaatccaactttatcttctatttaagggctacttgcttgtagttgtagatagatagctgcttggtgatctgtttttgtttgttgattcttcctttgaatcaaacctttggatgtcagatttgtttttgtttctttctcggaattggtgttttggctgattatgaatcctgaggaatgattttgttttgttcatttcagttaccaa

SEQ ID NO: 23001 - DNA, 235 bp, Glycine max
  Intron number 2 from transcript Glyma08g05460.1 (locus Gly ma08g05460) derived from phytozome v7.0 (chr-ID Gm08; pos 3918430 to 3918664 reverse strand)
cttctgtaatgcgtacttttgttcttccttggaattaatgaactttcaattttagaaactttggccaagaagcaaatgattgtgcgttggatgacgaatttgggtagttctaggtatgagttggctttatgtttttaccacaatgctgtacgtttaattgaatcaaagttttcataataagactgaataccactatgagggaaacgagaatttcttgtaggttgctcattttctt

SEQ ID NO: 23002 - DNA, 1031 bp, Glycine max
  Intron number 1 from transcript Glyma08g40490.1 (locus Gly ma08g40490) derived from phytozome v7.0 (chr-ID Gm08; pos 40223841 to 40224871 reverse strand)
taggtcagtcactcttcgattcaatttccctttttgttttttcatctttttaatatttgtgtgtgtgtggttagggttttctgggggctcaatttgtaattggtttcatataggtttaatgaaattatgaccaggtcgatagcacggtgttgactttatttatttatttataactgttaatgatttctgggtgaattaaatgaacttgattgtttccgtgtttgtgttccgtgttgtgtctgtgatggttatgatgaagtctaatagtaagaacttcaactttttgagctgcccaagggttgttagatggggaactgtttagtgaaacttgcttcctcccgcctggttcggtgattggcgtgcatccgtgataaggatttttcttagggctgctttgaaattgaaattgtgggtatattagatcttgttatgggagtgtagttgcattggaattggctcatacatatcataacacatgaaatttcagttttctcttgcatgactattttgatcttcttatctctgcatagtgcctgtactatcaacacaatggatgagcaaagcatgagtacctaaatctcatctttcacacccttacagatgatggtcggtggggcaatgagattgaaactattcttcaatgtaggaaataggcaatggtttttgctgatatggtttacagtctctattttgttttagtaatgcactaatgtttaagaagtatgttcttagtttgaacttttggaattgcaatcatatgtttactatctttatgattttcttttccatgcatatctatctgcgtatcctagacatattgcatactacattttgcatgaatagacatgttgccttatatacctgtattgtatctgtgcatcataggttttaccattggtcattatatttctttcttttgtcacgctgctcttaaggattttcagtgtctgtggatactgcttccaattcctcatgataatggcttaattcatgcagatcgtggatactattcagtggagactgttacactt

SEQ ID NO: 23003 - DNA, 629 bp, Glycine max
  Intron number 3 from transcript Glyma08g21080.1 (locus Gly ma08g21080) derived from phytozome v7.0 (chr-ID Gm08; pos 15996653 to 15997281)
aaaaacagttgcaggttttacttactttttatattgcattctattttttttccggtttcctttctatataacgttatgttttgctttattcaagggaatttgaatagtatgcttaaggtcacaagttttaattttgggtctgaaattaaagagtgtatctggtttgacttgtgccccataaattgtcagctctaattatattattattagctatattataacttatagataagacatgcgatatcttttatttatttattttactatattatatatgctattgtttatttaatattttctccgaagaaagatagaaataagactaaaacgaaaaattgatcaaatgcatattactttaaattggattggatcaaatttaaattttaaaccaagccaatcaaatgataaatcaagaaaattgaaagaatctgatcaaatgattttactcttcaaaatagattcaattggataacgggtgtgacatctgcaaagtcactccaatgcttaagtcactaacagtgactcagtgacatatgttgtcttcatcctctctcatggatccctaacaaattcattatcttgctgtctaaatagggaactattgttcttgttttccaaccagcagagga

SEQ ID NO: 23004 - DNA, 1038 bp, Glycine max
  Intron number 1 from transcript Glyma06g46710.1 (locus Gly ma06g46710) derived from phytozome v7.0 (chr-ID Gm06; pos 49279703 to 49280740)
aaagaagaactaatcaataacacgaataattcaaggtaaccaattttatctcattatctcagattccattttcccttgttcgatttgagttttcgacagttgaagaagcctagaaggaacgctactcatggctaagtgggtaaaattaaaaataaaagtgttaattaatgtcacttattactgctttgcttgattattgctatgctttgcttttctaccaagtaaatttgaaatcttgctatgaaatggacgcggattagggtaattgaaggaataatatagtaaagtaatgccctttgggagatataaggttggcccagtgattgaggattgataaagagagaagggagggggagaagtgtgggttccaatcccgccaactgacatttctaacaaaactaataaactgacatttgccgataaaaaaagtaatgctcttttagaagcacccaattttaattcctttggttttgggagttggaagcttcatcaaatcttagcacaaataaagaaataaaaaaaggaatttgttgatgaagtggacaaaggaaactaatttatttgtagcagagagagaaagagaaagtttttgctacccattttagtcatatttggttcattttcttcatttaagcttctggtgtttttcttctgataaacttcatttggtaaagcccagataaactatttaaataataaaatcaatgataacatttctagagacattgaaaggataaactgctatacattagaattattatgcagtgtttctgtaacaaattgctagaaacatatctaacaatggaggttttaaaaaacggtctgtgaccgtgatttgagccgcaacatgaaggttttctaactgtctacgaccgcaatgctatcacgactgatatttaaaaccttaagcatatatactaaaatattgattaaacttgtattttttctctccctaacttcaggcctggtgtagtatgtgaaaatatgttcatttttgtttttggctaactaatgctttgtacttagtgagagggagaa

SEQ ID NO: 23005 - DNA, 736 bp, Glycine max
  Intron number 2 from transcript Glyma06g02760.1 (locus Gly ma06g02760) derived from phytozome v7.0 (chr-ID Gm06; pos 1861839 to 1862574)
ttctttatattcaggttactgtgtttttcagcttttgtttcatgcctcatttctgtgcaagttggccagtgtgcatctgtgcatgcataagtttattatcttttgtcttcttacaaggacatggacactcttggtacttaatgattattggaatgttctttatggttaaactgtaggatttgactttgatccatctatagtgcaagagattttacacaatcagtgaattatatgatgccacctgtttgaaaaacaattaaatgctttagcaagcagtgtaaagtatttattagttaggacaattatgcagcgtattgttgtttccttacagtgaaaatctgttacattgacagttaatcaaatttaaaatcagatctatattgttgttcttcctatttgtaaggttattggtatgtttgtggtgttaatcccatgccaggccatgaagttagataagggattttgttcagggcaggctattgatttgagattttctagactgcattttttttaaactctttgttgtatgtgcatatgatgattgaataactctgattactctttttcctttttatgttcagccacttcagcttttttcttttggtgtattaggactatcgagcctttaagtttaacaacctatttttagttcaaccttttccttttctaagttcttccatgtattcaaatcattgtggcaggtgggtgatcctgttgcagatcacaagtgttggga

SEQ ID NO: 23006 - DNA, 546 bp, Glycine max
  Intron number 2 from transcript Glyma08g17120.1 (locus Gly ma08g17120) derived from phytozome v7.0 (chr-ID Gm08; pos 12550639 to 12551184 reverse strand)
ggcctgtggtcttagagttacctctatcaagattggtatttttcttgttcttattattctcctttggttttaagactcactagtcactacccctcttcttaattctcgaagagaatgcagttttgtgttttttgttgtaatagagtgagtatcagtgaatttgactggttttctgaatggccaagttttcggtttcctttgactacctgaggttccatttgaatggaaatggttttgttgaagaaaaaaggggatttttgttttgtggtttacaactggtttgctgtttttcttctttggtttttggaggattcttgatcctcctgcatcgcgttcctttctcctcagcgttttcttcttttgtattgataaaaaaaaagagtagattcaattttttggtccgtgtttctcttccctcctataaaaaattaaaatctttgtccccttttcttatcatgttatgtaaaataatgaatgctatttatcctttttttttttaattttgtttaatttttctttcatttgcagacccctatttgaacactg

SEQ ID NO: 23007 - DNA, 894 bp, Glycine max
  Intron number 1 from transcript Glyma05g27830.1 (locus Gly ma05g27830) derived from phytozome v7.0 (chr-ID Gm05; pos 33695719 to 33696612 reverse strand)
attgctttcaccgcgactacgtcgctcagatttcggtctgtttccttttctctttcgctagctccaatgttcaatcctctgtttatgatctgcatgcatgctagcttaattactttacttgacacgaattattggtgaaaaacgtttttttgtttttttactgtatttggtgtagttagggttgttgctcgaaaccagaatttgtcgctgcttcttctactagtattattattagacactcgccttatttgaaaactttttcaatatgtcaggagtcaaatcatggacgattattgtgtaacctttcagttcttccttattcttttatgaacatgttattattctcttagctttgaaatgaaaagttaactattccccataaaggggatcttaaatacttttttttaataaataatgtacaaaatctagatatagttccttggatgtttttgctgatgccttccaatcaaaattagagtttccctctgcgcaataaaggtttccattaaatgtcaacatagctgaagtgaaactccaattttgattggagaacagtagcaaaattggatgtttttgctgatgctttccaatcaaaattagagtttccctctgcgcaataaagttttccattaaatgtcagcatagctgaagtgaaactccaattttgaatggagaacagtagcaaaagtgcctcagtgtatttaagtttcttcattaacaatacatgcatgatagtgtaatccgatcataaactgccttgtaaggttagtttgttaccttttataagagctacctttccaagtcataccaatatgatttctgattaattcaaagtacatttttttattgcctattaaactcctcttttttcttttttattgtcactagggatct

SEQ ID NO: 23008 - DNA, 757 bp, Glycine max
  Intron number 1 from transcript Glyma07g33120.1 (locus Gly ma07g33120) derived from phytozome v7.0 (chr-ID Gm07; pos 38035820 to 38036576 reverse strand)
ttgttgctgttaagtatattgagagaggtgaaaaggttagtcttttgaattatcgagcctttgtttggaaaccataaagtgtatatcaatcaaccaaccaatgattgggcttagccgaagagactaatctctcgaaacatggcaaaccaatatttgaatacttgaccgaagagatgttcatatttagtgtctgaccatatctctaacatgattgtctttaaaagaagatacttgtagaaaatcaaaaaataaaagcgcatgtcaatcagtttatgattgtttgtgaggatggtagttgggaactgagtgggtgagtagtttgattctcaaggatagtatgttttaggtatttatgatcagctgactttcctaccaattgtttttgatagaatttatattttaagtgtattgattaaattagattccatttcaaggatcatttgttttggttaactaagcttctttgtagttgctttgtagaattcatgtttctggtggtggttatgtgaccttctcttgctagcatttcttttcctgcagtatgtctttcttgtctttggatggaatttgtgtccttgagaaaattgcctgatgtttttgttacttttctggttactaacacatgatgattgaagggtaacttttgtttgttatgttctctacttctcctcaatgtaaaattgtagacaatggttgtgttggtaaaattgctatggtaaacctgacgggagaatcatgcttatttgttagcagatag

SEQ ID NO: 23009 - DNA, 946 bp, Glycine max; identical to SEQ ID NO: 22784
  Intron number 1 from transcript Glyma06g15190.2 (locus Gly ma06g15190) derived from phytozome v7.0 (chr-ID Gm06; pos 11942422 to 11943367 reverse strand)

SEQ ID NO: 23010 - DNA, 947 bp, Glycine max
  Intron number 1 from transcript Glyma07g16020.3 (locus Gly ma07g16020) derived from phytozome v7.0 (chr-ID Gm07; pos 15725368 to 15726314 reverse strand)
tacccttcccacactcattcattgttgtgcgtctggtaagctaatgcctccaattgttctcatacatatttttttagatcattaaacttttctgtttcattcttcactcattgcccacacaatcctcctaaaccatggcttcttaatgattctacaaaacacccattattaccatgagtgcatgtataaggttttgccttttgaattctcaaaattcattaagcaatgaacaaatgttcggaactgaaaaccgtacctctgtttttgagaacactccccaatttatttggtgataataatacatagacacgtgtccacttctttttttcctttttttccgaggcctaaaaaatatacgttgttattaagtcttgtgatttggcttgtatattccgttgaatccagaaagtttgataaatgagtgattgtgtgactccaaaagtttatgcactttggaaaggaattttctgtctcataaactctgttcaaaggattttaataatttgtttctggcttagaccattccatgattgctctcctttcttgggggtccatttttttttctcagtttataattataataattgaagcttttgaaccctctcatgtttcattaaattctgtgccctcaaaggggtactgttgaaccattttttttaatctatttacttggctgtggattgtccactcagaatctttacaaagctttatctccaatggatttgattaccactttgattgtcttcctttatgatgctttagcttctttcagtgctaatccgagttaacaagaccaaattttaaaattaaaaaaatggaaaaccagtgacatttgttggttgagaatcacaatgaattcccatataaatattgattggttcatgtggttatgcatcatagtgctcacttccttttgttgttgtgtcttttaaggttttctgcctgaa

SEQ ID NO: 23011 - DNA, 1048 bp, Glycine max
  Intron number 1 from transcript Glyma06g04100.1 (locus Gly ma06g04100) derived from phytozome v7.0 (chr-ID Gm06; pos 2858113 to 2859160 reverse strand)
attatctccaccgctgtttcgcttccaacggcgaggttctctctcttctcacagaacacgttagcgcacactgaatatagtactagtgtttttcttttttcactgattactctctttagttgttttattctaacgtaaaaactgttctgttcggttacttcatgtgtatgacatggatttgcgtttctgtgttataatatgatatatgaggttttagtgttttaaatggttcgttttgattgtgtcaacttcggcaatgtaaaaagaaagagatgacgtttattttatttctttttcctttggtaattctgtaattaaaaggtgataacgttaaatacacactaacacaatggtacagtacaagaagatcaggattgtgtgttccttaaaattgtgtctgaaaccttacataaggataaggaataaatgttgtgttataaaagaagtattattggttactagtgaacagtttaactagtttgcatgagattataaactcagacgtgagtgttgcatttaattataaaaaatatgtaagagaattaagtttcattaatttatctgacgttatgctggaataaagcaaagataaatcctttttcagtcttgttttctgcttcttgcttattcaattagctctactataatttttattttctcacattacaagctatgcatcaatttaggtggtgccatttgattcaatttaattaaattagaatagattggaactctctgtggaattaagtgtccgtgtgcacaaatctgaactctttggtatgatcaaattttgattttgtaacatttgaagtatgaatagtttaggcttaagcgatgaaggttttaggtacagttgttgctgttagctagttttaattaaagaaaggcgattttagcgttcttcctctgctagtgttgtttgatgaaaagataatctgattattcagagatttgcttgctacaatggaaaatggttccctgagcttttcaattattattgttcaattttgcagatttcctcaattaaggttattcgcaataagcagac

SEQ ID NO: 23012 - DNA, 749 bp, Glycine max
  Intron number 2 from transcript Glyma06g09600.1 (locus Gly ma06g09600) derived from phytozome v7.0 (chr-ID Gm06; pos 7167893 to 7168641)
actgtgcacttcaagcctctctgggccaaaaattggtatgctattcttctgaacaaactataataaattgagcttgtttgtgaattgaggaatgggttttacactaaactagaagcatcgttatgctagattattagggtttgttatgccattcttttttataatttgtggaaatagtaccttgctctgaatatgaaattggtgtacaatggaccaagaagaactaggaactaacgggggtttcaataattagaacgctcaaggtcccaacaataatcaactgggaaccttagttaaatgatcttattgatcaatcaagctggataatatacatatatagggtatctaaacgtatccgttctgcatcactacttgaacatctcaggttgttgttgcagcttgcaagggcacattaagatagcttaatatgacacattaacacttgattttactgtagcggaatattgaagtggagcttactatttcaatttcaagagtgatgttataatgatgatttgagattgcttcatttactgttgcaatctcttttgttttgactgcgcgacctaactatgttttaaaactgcaaaattctttatgaagataaaggaactacttttggggatcaaatgacattaattttgtgatagaagattttagtgagcatcctcttaacgttttactgaatttaaataatgatatgttttcgtgcctgacattcttttacagccccagatttggtattgcac

SEQ ID NO: 23013 - DNA, 762 bp, Glycine max
  Intron number 3 from transcript Glyma07g12340.1 (locus Gly ma07g12340) derived from phytozome v7.0 (chr-ID Gm07; pos 10620755 to 10621516)
aggtacttttggaacttgcttcaagtgaatgtgttgctctggactggaccttgtctacatgtgtttgggaaggttttagtgccttttgtttgtgtctttatgaaagaggtttttttttcattaaaaactgtttcaaaatatttatgctaatcatgtaagtttttccaaaaaaaaaaaagaagtataacaactctctaaaatgctttgttagtaccttttgtcatacaattgcatttttttaagcttgaagaaatgatcccaaattatgagaaataattctctaaaaaaggaaacttagtcgagaagctgtaggaaacaaaacatattttactgaaataagttaatacaaagcacacacttaatttagatatgaagtgggaatttttccgttgtgtttcaaaatgtctgtcatgtaataattttcccttcattgcacatcatcaataactttgaaatttgaaacaggaaaccactttggctgtattgtgttactcagtccatttttgaaagatttaatcttttttcaaagcttccttagcttcaatttttggttcagtttcttgaaaattgctcttctctaaggtttcttatttttggaatgtgtaccacttaaaaagatgtatgcgattatgtggctgggccattggaaattggtcatttttttactgaacttgttttggagcttttatatctttgatcataattgtttcaaggttacctgttaatcttcatttttattcatcttaacaggaactagagaaa

SEQ ID NO: 23014 - DNA, 976 bp, Glycine max
  Intron number 2 from transcript Glyma05g32380.1 (locus Gly ma05g32380) derived from phytozome v7.0 (chr-ID Gm05; pos 37314155 to 37315130 reverse strand)
tgtttatatttacagtacctggaagaaaaattaatgtacggtaattctattaactcaaatacatacaaatcaatgtacttgatagtattttttttttcaagagaatgtgcttaatagttaatagtaatactatgttaaccgttcattgttatttcttattcgtttgaagtaaagtaaaaacaaaaaatctcttgaaaacaaaaagtaaaagcaaaatttgtctaattgtatttataaataaaatatggtctggaaagtaaaaacccgagccgaaacaaaagtgctaacagtggtagcaaggaaaaatagagggtccctgcacctgacaacaaccatccacgtccatgacgcacttaaccttccttcactttagtcttccctcttttctactcttctcaccttcactcataaatcataatccacgtcgcattcactcatttccaacaccatctcgtgatgtctccctgaaccattctgctgccgtgacaatttaccataatttactattaataataacgtttctgtaataataacccactattcattattaagaataacaccaaacaaacacaccctaacagcgatgataataataataataataacaatagtgcccactccttcattccccacaacccaaaccaacaaaagagacccaccccgtccgtgacaccatttctcaatccacggtcacgagacaaaaaccacagccaccagatactactgccataacaataccaaaaatttaaaaatctatatttttatgaattatggattacccaaaaacacttataaataaattccaccattctcactaaacacattctttctcaccacattccatgatggttgcttctctcttctacctttctctttctctttccctcatcctaaccctctcctccgccgcgcaccacaaacccccccactcaccgtccaagccaccggctaaccccgccgtgaccgccgcctcccc

SEQ ID NO: 23015 - DNA, 590 bp, Glycine max
  Intron number 1 from transcript Glyma06g09680.1 (locus Gly ma06g09680) derived from phytozome v7.0 (chr-ID Gm06; pos 7263245 to 7263834)
ttctcctcgctctgtttgcttctcttctcgcgcgggtactcctctctttccgctattctattttttcatgcctttcacttctgaattttcgagtattcaatttactgaacagcttttcgtttctgattacttagaattaacgtatcagtttctacgttcttgagtaacgatcgacgaacattcaaatattcttcaaattttatttgtgtttctcttttttttttttttatgaccaataataataaattaaattttgtacttgtctttgggagagattatggtatgttccatgaagcttggagcataatctttgagaatgtagaacctttctgtgactttatgcaatctttttaggtacaaatacttataagcaaacttgtctgtttatgaagctattcttgtcttgttcaggattggaagctttgcaattctttccttttaagctgataaactgatattatttgtttctgtaattagtctttcttgattttccgcagcaccaaaagacaggaccggttcagtgataactgataactgataacttaattagttacattttctcattggtttttctttaatgtcacgcagac

SEQ ID NO: 23016 - DNA, 732 bp, Glycine max
  Intron number 2 from transcript Glyma06g09680.1 (locus Gly ma06g09680) derived from phytozome v7.0 (chr-ID Gm06; pos 7263860 to 7264591)
ctcacccattgcaccgttgcaagactcttcacctggtttgtggcaactttatacttcaagcagatttttgttagtctccttaccgcgtgaaagttatatttttctcatgtaataaatttattttcattgcgtgtgaaatgaaatcccaaagtttaagtggagatatgttacggtgactaatattacctactgttttctttctgattgtaattataagataaaattttaaaatatattgtgacgttcaagaacaagaaaagtaggaagtgtttgaaatttagttcatgtaaaccaaatttcattaactatatactccctgtaactaattataggactttttttagaaatttatttgtctcttattataagacccttttttaatttctagatgcataaattatatttttttcctaggtatccttacttaattattctctcctcttacattaatcagaaacaattaagtagatagagagataagaaaatggtaattttgaaatgatagtataaataattggcatatttaatgtaattaactaaattaacaatttttcttaagaggcgtgaattagttgatagggtcttataaggaaggaaggactatgttaagcgtgaaatagatcattagataaacacgggtttcttgctggtgtgttgtgttctggctctgagaatataatttatttacgttcatctgtattaaggttatcctgtcttatatacaggtaagac

SEQ ID NO: 23017 - DNA, 324 bp, Glycine max
  Intron number 3 from transcript Glyma06g09680.1 (locus Gly ma06g09680) derived from phytozome v7.0 (chr-ID Gm06; pos 7264664 to 7264987)
caaacctgacccctctcggctggaatcaggtatttgctaatcaaaatgatctatgtcatttaattaggacagatattgggttatgcggaatcttgaggtgtttacaaagaagaagaaagtttcagattttctgtagagattgatattggtgttgacttatatgctttagcattgttataatttgtttctcatcagagaaacatgtgttagttatcatcacattctagttagttttttccctctttcttcctcagcaatatatttttttttaacttcatggtggaatatttgtggctctatgacaggttgataatctgagagagc

SEQ ID NO: 23018 - DNA, 635 bp, Glycine max
  Intron number 1 from transcript Glyma05g27550.1 (locus Gly ma05g27550) derived from phytozome v7.0 (chr-ID Gm05; pos 33473838 to 33474472)
gagtacgagaggatagagaaagttcaggtttggcatttagcctcactgctgccatcgcttttctcctttcctcttccattcaacctcattgttttttttttcatcaaaattaaatctttattttgtttcttaaactgggttggtggcaaaatggttcatattgttcaaggtttgtgttcatggagttcagaatagtcatcatcccttcagtttctttgtgggctttgtttcattgattccctccgagtgaattttgacatggtttcaaaaatcatgcttttgctttttctacttttgtaatgaatggatgatggggtttgtcattattatttggtgggtgggtgggtgaggaagagagggaaaaaaaggctgaaaagggaaacgaaaaaaaaagggtaggattcattttcccttgtttttcttctgagtgaataaagggtgtggattgaaacggtggggtgggccttttggtggaaaagaagaaagtggtcatgtattgggtataattgtttatgcagtgtgctgctagatggattctgttagaaattttctaattgagttcttctaggattttgttgagggtaagtatgccattttttctgcaggctggaataatttctcccagtaaactaagg

SEQ ID NO: 23019 - DNA, 764 bp, Glycine max
  Intron number 1 from transcript Glyma06g16800.1 (locus Gly ma06g16800) derived from phytozome v7.0 (chr-ID Gm06; pos 13205063 to 13205826)
cttcttcttgctcctcctccttgtctttgcttcccgtaagctcattccctaatttgcatcttaaactcttaatgtctataatatcctgtgttgtatatatgtttcttttttgtattattttagtggttactttgttagttttttaggaggaggaattggaatccaaagtttttaagttttattttcttccttcaaccatcaaatctacctgataactatttattgagttgtaaatgtgtttgactattaagtacaaaacacctcttttgttcaaattaaagcatcatggtgaacacatttttaataccaacacttatttgatactttttattaagcgtttcactcaaaaattactttttttaccttcaacacttaagtttattatctttgcataactaatatacttaaagaaaatatatatagaaggttgattttaaaaaaatagatatttttaatatattactcatactttatttaattaaaatctttctatttatttgcatgtgatgttcgatatcctatattttagacattcaccatatcagaacaaaatgtaattaattagaatctctctttatttgaatgtgatgttccgatatcctatattttagtctaattagacattaatagtatcgaaaaattcgtgttggtgtaataggtgtttgatgaattaatatattatatatgttggatgatgcattaattaatgattgtgttttgtgatagcagaggtggtggtgcagacggagggaagagtgtgtgag

SEQ ID NO: 23020 - DNA, 800 bp, Glycine max
  Intron number 1 from transcript Glyma06g20000.1 (locus Gly ma06g20000) derived from phytozome v7.0 (chr-ID Gm06; pos 16365316 to 16366115 reverse strand)
cctccaccaccaccgccactgccaacctctccaatgtaatcaaattcatttcatttaatcaaaatcaaattagtgctcaacttactattattttaatattactattccaagagttctaagtcaattggttgaacaaagtgcgctgtaatccctgctagtgtcttccattcctacggatgtatatttttttttttaatattgctattgttttagacttttattaggtgagggtattggttggtactgtcttgtgctcatgctttggattctttgattgcatacgtcaattacagtctttttttttattagagtctaattcgtcaagtgaagtccaatactttgagtttttttttcttcttttttttgcaattcccgaatgtttggaatttcttcaattatacctgacttatgttgtcttcccaccaaacagtcacaattccaacttgtattatcaactgtttgagtctgtggtgttcggcaattatatacactgtagggtttactttcaatgtgtttggtttttttagtgaatttcatttgttttaatttgtctccgtttgatttaaaggaaagaaaactagagagattgaaaaaatttgaaatttgaattgaagacaaaattggaaggaaaggaaagtttgaatttttatttttaaaagttaatttttcctttttttttcgcttgtcttcactttgaccgaataaaaggaaattgtattattatccttttttttttgtttgtatttttgtttcttagtgtgaagctgagtactgatggcatgtgtggaaatttgaacaga

SEQ ID NO: 23021 - DNA, 858 bp, Glycine max
  Intron number 2 from transcript Glyma07g18340.1 (locus Gly ma07g18340) derived from phytozome v7.0 (chr-ID Gm07; pos 18244344 to 18245201 reverse strand)
ctcttgttctttaacttgtttattaatgactaaaattagaccttagttgcaatttttgtttgcataatccatttttggagtagttatggtatggtaactgatattcatggtgattagtgtgagttgttaagcatttgataatgctgatttcataataaataatcaaaattatagtaaatgtaggtaaactatcacacttagaattagtagcaagaaaaaaagtgtctagtattagaattacaaagtgacaaattgcagtttaaattcttgttagaagtgtctatatttaaatctctgccattcctcaaacaagaattatagaagaaaaaaaaaacaatatttttgtcctttaaatccctatctttaattgtttgaaatagattgttatataaaaaaatgtttgaaatagattatattgacatttcttctctaagaaaaatattacactatgtattcctataagaagattagtgtaaacgttagatagaagtattgtgtgcaattttaaaaaatcacaaggaatgtcagggcaatttgttctaaactttatatataggaaaatatcaaattgcttatttatttaaaataacaccgaagataattcagaattattaatttgggaatattataagattcaagttatgactatgttgtcatttataagttcatcatgaactggaatccgttctaagaacaaactcagtaattaaactcttctgctaatttatgaatgacaaaaaaaagttgtgcttataaaatggcagcatgagttcttcaaagcttcttgcagtttcaatttacttttcttcatcttaatgtaatatacattttttttttatagattacacaagcccctta

SEQ ID NO: 23022 - DNA, 843 bp, Glycine max
  Intron number 1 from transcript Glyma08g08620.1 (locus Gly ma08g08620) derived from phytozome v7.0 (chr-ID Gm08; pos 6143296 to 6144138)
aaggtacgtacgctgctttcatgcaagaagaagtgtgacacaccccatcaatgtttgttatcattttattggaaaagtagaacgtatgcatgtgtatatgcctacatggttgcttatcttatgtattaagtgaactgcacattatatgctgtctaaaaactagaagattacatgaaagtgaaaatttggagatttccaagcaacgtacaacactttattgtgtttttctttttttttttatatcaacgttagtttggaaacacgtttataagacaggaaagtgctccatgtgtgtttggaaacatgttcataagccaggaaaccacatcataattgtccaaaacaagttgtagcctctgtgttgacttgagaaaccacatctaatgttgcttgaaagcaaaactaaactcgctattagatgcaacgaagggggaacgaagaagggaacagattttaatggaaggaaagaaagaagagaagaaacacttccattaacttgaaagagtataatctataaataattattaaactattaaatttaattatttgttaattaaggataatttactacaaaaaatggaagagaaggaagggattttagttttatccattcaaaatatttgaaaagttatttttcaacaagaatgtcgtctttcctctcttccatctgtttccaaccaaaaaattatgtaaagaaattcaagtaatgactttgtacagaatcataattgaatatgatgtttacatcttgtctttcattctataagtatttcgcgcttgatatgtaattttgttttctcctgagcaggccaattctaacttgcataaaagaaagtctagctt

SEQ ID NO: 23023 - DNA, 743 bp, Glycine max
  Intron number 1 from transcript Glyma08g20300.2 (locus Gly ma08g20300) derived from phytozome v7.0 (chr-ID Gm08; pos 15340983 to 15341725)
ttctctttcctcattctacttaaaactcccaccaggtatctctctcttttattcctttttaatttcgtaaaacacctgttctgtttctcttctatgaatctggtcttgatctaaatttttttccatcgacccaaaagtttttgattcgttatttcggtgttatgtttagtttccctatttaaagatcgtgtttttagatttaatggattgttgggtattgcttatttgatagattgatttgcttctggatagtgcttaagtttgaatgatcactttatttttgtgctttagtttcacgttgattttggcactgtttaactgaatcttggaggagtaggcaaagtgggtatttgacactgaaagatttgttttttggtatggcatgtatccttttttgcccttttgaatgtcttctccatacatcaaagagaaagaggaagtttaatgtttgcaattctcttcctgtgtcgattgcaagtttggctcttctgtcacatgtctagtggaggatgtgtttttttatttatttttatacatggttcagatcatgcgagtactatctcttccagattactgatgtgctgagaaagtagaaacttctagtggatgtattattgatttggttatttgtatgatttttattcttgtgttgtttctgaacgatttctctgttatctgtttcaattttgctggagtatttgaatatatagtcacttttaatggaagttttgctttttgcagtg

SEQ ID NO: 23024 - DNA, 422 bp, Glycine max
  Intron number 1 from transcript Glyma06g36840.1 (locus Gly ma06g36840) derived from phytozome v7.0 (chr-ID Gm06; pos 39221563 to 39221984)
ttttgcacgttgcagcactctacgatcacatagaggtatcatttaatctatttacatacattgatttgaaattaatcttgatatgagtaaaatgttagtatcagggcataatgcattggtacaattcaaaaaattaaaaaatttaacaaatccaaaaactaaaatgatggatggttatgatttagagagtagaataagaatttttattttatatatatatatatatatatatatatatatatatatatatttaagtgttactaaatgactagaaatgatatcttcttgttggaaaaaagttaactatctattgtcctttaaaagggttttatcaaatatttaattgagtattatttcttatactatttcgtggtgcttttgacgatctgatcattatacaggcagtgtcattattgttaact

SEQ ID NO: 23025 - DNA, 584 bp, Glycine max; identical to SEQ ID NO: 17026
  Intron number 1 from transcript Glyma05g09290.1 (locus Gly ma05g09290) derived from phytozome v7.0 (chr-ID Gm05; pos 9033865 to 9034448 reverse strand)

SEQ ID NO: 23026 - DNA, 1005 bp, Glycine max
  Intron number 3 from transcript Glyma08g18570.1 (locus Gly ma08g18570) derived from phytozome v7.0 (chr-ID Gm08; pos 13969524 to 13970528 reverse strand)
agattttactctgccttcagctccctcttttgaaggtgaggctattattgtagttttgtaatgactatttgctgttgttttttatgctggggaatgaagattgttcattccgctagattttcaatccaatttgagtttctgtttagtgtatatattattgtagattgatgtatgtgtttctcggtttctccaagaagactggttttattagtggtgtcgaagtgtttgtgtaatttttatatgcatgctttgtgtctggggaggggtgatttcagtaactatttgcagtgtattgtttatttggttttgagctcaagtgtttattttttggctgttagctcaattggttgtaatgggctcttctggaagataatttgccattatagctgaaaacgcttgattttcataactgcattgagatcattgtcaatttgagattttttcttgggagttgccaggagaaattggaatggaataatatcaatttgtataggcacagaagaaagggtcctctattgaataaaaccttatacccgagataaggatagagaaagaggaaaggccaaaaattttacttggtacttttcagcaaaaaaatctacgttatttattttgtaccttttgattaatgagtgaacggttgtgttctatccagttgatttcattgaagagactttctgtaaggtttatggggaagtttgttagaaattggaatttcaactagataattttattaggggttgttattttaccatttgtgttagattatgatatggtatctgtgatgtgtattttgaaatttgaaccttttgtagtgtcaattctagttaatattcaataaaaaaaccacacactttcattttggtaaactttgttctttttttcttttttttttaatcttctggtacttcatcataagccctctttgtcttgacttttataccactagatttgatgcttctttctgggccttgattattgtttctcatatgtttgatgaagctg

SEQ ID NO: 23027 - DNA, 499 bp, Glycine max
  Intron number 1 from transcript Glyma07g03420.1 (locus Gly ma07g03420) derived from phytozome v7.0 (chr-ID Gm07; pos 2407278 to 2407776 reverse strand)
ttgccttctattcttctccgtaacattttctcgtgtgtgttgctcttactaaactcatcttttaccattagtttttttccttctaaaaattgaaagttggtgtttgctagtggatcattacttaaattgtttgcaataatgacatttgtataatagtttaatttctatgcgttgttaatgtaactatgaaccaatcataaatcatagaaaaagacgatttttaaagtaattattatgaaaatcaaataaatttatgatgtaccacaaatttgttgttagattttataccgccaatatgcatagattatgaactctttctttggtaccatgcacaatttttgttttgtttggcatttagttttgtagaggtccttccttttgcttggtgtaagtagaagagttgatgtcatttttatgtatgagatggaattttaaccaaagcttggacatatattcttgtgtggtgcagtttttggggataaagtatttacgggaacat

SEQ ID NO: 23028 - DNA, 797 bp, Glycine max
  Intron number 1 from transcript Glyma07g37760.1 (locus Gly ma07g37760) derived from phytozome v7.0 (chr-ID Gm07; pos 42722915 to 42723711)
ccacaccttcaattttctcgtcgaagacggttacggtattgccgatctcttttgctgcatcttccccagtttaagtgctggatctactctgtcacatctaattggcacacatatttctcttttcttttcttttttttgggcttttgaattggttttccttagtgggttttctttactatttggggttccttccaaagttttgttatttttttttttcatttcaatgttgacacttgacatgaacaaatgaatggtgagaaacggaatttgggttctcctggttcaattagagaacaagtatgggacaaacattttgtgaatgtttcttgggttggacttaggctgccatagaaacgcattggtctttgcatgaccatgacggatgaagcaactgctatcagttccaaatgtttgtgcctaactccttattagtttaaccaaccatgcaaccttttatatgttggacttctcatggtttctgaatcaaactctctacttccaattgtaacctgacccgatatttggaactcaagtttttaaggaaaaaatttatgaggtcactatacttatttttatgtatttccttgtgatttgaactggtttattgagttgcgggtttggataaaaagaaaataaaaatataaagtgttctgttgctgcgcctttgttgtaacactcaggcttactgaaacattgagttgcactctgatgtggatttttgtcttcttaatgttttacatctgggattaatgtgaattgcagcttactgtgttgttgccaaggaatctgttagcaaa

SEQ ID NO: 23029 - DNA, 486 bp, Glycine max
  Intron number 2 from transcript Glyma07g07260.1 (locus Gly ma07g07260) derived from phytozome v7.0 (chr-ID Gm07; pos 5974172 to 5974657)
ctttccctctcgttttgattcttcaatcatttcaggtaacaacatccttcgttctatgcttctttgcttcccaaagaaattagggttattatttgcttctttttctctgtcattttggtaattaatctgataatcgattattttctttgatttcatgtgctgaaagtgtttgataaggttttcatgttctgacatttttttgcaggtaaattttttagacttgtggttgataattcgctgtagttttatggtttttaaggttcctataattaattccatactaaaggttttggttcatcatatttctcattcttgttaatgttaatgtcattgttatttttaatcttaatgtttatcattcccgttaatttggttttgtttattctcaatatgagttgaatcaaaattgatgaatttgtttggctttccgaaaataatgatgtgtttgtgttagttcagattggcaagtatagttagttatttgca

SEQ ID NO: 23030 - DNA, 752 bp, Glycine max
  Intron number 1 from transcript Glyma05g24230.1 (locus Gly ma05g24230) derived from phytozome v7.0 (chr-ID Gm05; pos 30327020 to 30327771 reverse strand)
tttcatcgccgtccagatccaggtatttccatcaccacttcactctcaaactccactctttttcttcatcaatgtcgtttcgtttcattatatcaacgcttttcacaaatttcaatttacaagttacaacatatggttattattttcggatattcccgatttagtgtaaggttttcgcaatctatcgttgtggccactgagcatgttaattgatatgcacgacgactgcgagagttcatgtagaaattgaattgatatttcaggcaatttttttttttaatttcctctttccatttatcgttcaacgagattttgtcgcgttattattattattattattattattattattattattattattattattattattattattattagtgcattcggtgtggagccaaaccgagatgtcgtgtgttgaatgtgtttgaagacacatggcggcggctacagggttacttaataagcccctgttggtggatttttttatgaattggtccatatctcttaaattgagcatttgctgcgaaatttgaagattcaattattcaacgttccagaagagttctttgtttccatttatatatagcacctggaattggctttggagttcttatacttggttttgaattctggattttggattgtgttctgctcagttttgttaaggagaaagtgtgcttaggaatttctggtattatttattattagcgtgcttggttccacattccagacgccccagacgt

SEQ ID NO: 23031 - DNA, 522 bp, Glycine max
  Intron number 1 from transcript Glyma07g30700.1 (locus Gly ma07g30700) derived from phytozome v7.0 (chr-ID Gm07; pos 35639355 to 35639876)
gctattgagacaacaaggtttctttgtgcccgaaggtttgtttctaatccctctgaaaatgatattttcacgtgcctaattttttatactatcattcatacaccgaccccctactatgctaaaaaccataaaacaatatattgtgcatagcttgtatgcagtttggttagatattggagggaaagttttgctcaatacaatgaacttgcttaacttaaacataattgtctgtgaaagatatctatctaaaaaaattacataagactattatggtctccatccatctttaagatacataattgaattttattaattagaaaactcaactaatttttaatgtaaaaaattgaatagactcttaaactcaactacattaaatatgtgaaaaaatattattctttttccgtcccctttgccaaagcttaagaatgattgctttcccttttgatattggaagactaaaatgtttgttcattggaaataccagaggtgtttcacaagttcacaaacaaggagggaaag

SEQ ID NO: 23032 - DNA, 720 bp, Glycine max
  Intron number 2 from transcript Glyma08g04040.1 (locus Gly ma08g04040) derived from phytozome v7.0 (chr-ID Gm08; pos 2842246 to 2842965 reverse strand)
gattccaacccaacatcgtagctagctaggttaatttaatcttcctttttcaaatactagctagttttattcttttacttaattttaccaattaactttcattcttttctcatggatgacatgttccgcacatattttcacctatcttaccaataaataaccattactgaaaagtcaatcgtctatgcaagtgtgcagtatatatatataactgcaccgcacgcgaagcagcaatcaagatgattatttttctacaccttgtagttttttatgtgattatataattcatgtgatatacgaacttggcaatataatatttaaattctgaactgaccctcctctatatttggttgagtttgaatttaattaagtacactgtactactactttatcaagggtagtacaacttatacaagtactaataaccctaggcgatgagggatgaatcttttgagttccggtagctgaataatgatgtcgacccaaatcattatataataatgtgacgaggagagtcaaggctgtctatgaaaacatattcgatattattcgtccttaaagttccctaattttcacatctatttgcagacagtacaagtagtttttttctcctttcaaatcttttttcataagatgttaaagtatgacaatatatactaatacatgaaaagagagtgagttgggagaatcctgaaatttgacatttgtttgcttgtgcag

SEQ ID NO: 23033 - DNA, 510 bp, Glycine max
  Intron number 1 from transcript Glyma06g06490.1 (locus Gly ma06g06490) derived from phytozome v7.0 (chr-ID Gm06; pos 4639261 to 4639770 reverse strand)
ttctcgttcgtgacacggaggtcattcaagctaaggtactttttacttcgccttctcaattttcttcatgtattgtgtttttcttggcactccaatttatcaactgactgtgaaatcatgtcaatgggtgtagtagtactttactcagcttttaagtttcattatcattattattactataggcttgaaactggactagctagaatcatccaaattttaaatttgtggttgcggttttatgtagtatattgtagacaagtgaggctgatatggccacaagtgtggtcatggaaatctcaaaaaccctagcagaagctgatgtgactatggagatctctaaaaccttaaccttaaagttactgctgcaattgtagttgcatatgattttttaaagtttggcaaaataattatcaatatctagctatggagatctacctttttttgttttgaattgacgatatatggtatgttgcaggctggaagatacactaaccttgaagaaaatccttt

SEQ ID NO: 23034 - DNA, 398 bp, Glycine max
  Intron number 1 from transcript Glyma08g21340.1 (locus Gly ma08g21340) derived from phytozome v7.0 (chr-ID Gm08; pos 16196098 to 16196495)
gcaaattagctactgatttcactggtaagacaaacttaaaccatcaaatatccaacctgtgactatttagattagatgacaatggagtatatgtatattatttgtcaaagtagtctgttgattgagcaggatgggtgagttcatataaactctttaacactatcttcgattcctacaaataaaaaaaatatgtatatttttgggtgtataatgacaataacgagattttaacctaacacccttagaataattactcaaactcccactagaccgatcctggtgggtttatagagtagtagtagatgttgtactgctcatatatatacttatgcatttaagtttcatttttgttggaatgttttcttaatttgcagctgacacattgggtttcaagacct

SEQ ID NO: 23035 - DNA, 425 bp, Glycine max
  Intron number 1 from transcript Glyma05g26920.1 (locus Gly ma05g26920) derived from phytozome v7.0 (chr-ID Gm05; pos 32807173 to 32807597 reverse strand)
aaggagcttacaaccaatcctaagttgcattccaggtaagttacattttatttacacaccaaccaattgcatgtgctataaacaaaaatttatattgacaaatattagttgttagtttttgttaatgagacatatctcttccctcttttctttccattcaaacaccaaaccaaccttaaaaccactcaaacaataatgacagtattcatttccctccacaaagtatttttaatatttttatttcacttcatttctttcttcacaactttcttctcctcctgtttctggcacggtgtgtttacacccatggagtgtataagtacgaatcatttaatttccatgcaaatgcaatcttgataatttagagtgaatttaaaaacatctaggtagtggacaaactagtggccaccgatacagcagagaaa

SEQ ID NO: 23036 - DNA, 634 bp, Glycine max
  Intron number 1 from transcript Glyma06g11060.1 (locus Gly ma06g11060) derived from phytozome v7.0 (chr-ID Gm06; pos 8437755 to 8438388)
gtaagatcagttacatgaatcacatactttcttccttgtatgattaaaaccaaactattttttttgaagctattaaaaccaaacttttataatcaacacatgttcttattcttaaaaaaataaataaactgttggaaaacatgttagagaagaaaaggttgggagaaaatataagaaaaatccattatctgaaagtgagaacgtgcatggaaatagtatatgaaggaagtgaagtttatatgcaacatgttttgagttaaccactcctaacaaatgaaataaacttgctaacaaaattgtgccaactaactttgagttaaccactaactctggtaatataaactatttaacataagtaaatggctataaaaggaattccacgttacgtcggtggaccacataggttttgtttaaggaaacaatacttttaaagtttgtagttatataggaaattgcagacgagtccgcataatgaggtgttgtataaaaatgtaacactatgtcattgttgttcaactgttcattgttaattttttgtgtttctatactgaacagtattagtcaggagctgaaaaaaaactgcctccaacggtcatgagaaattggtaatatctcaagaacagcaggcaaaggt

SEQ ID NO: 23037 - DNA, 432 bp, Glycine max
  Intron number 1 from transcript Glyma05g27580.1 (locus Gly ma05g27580) derived from phytozome v7.0 (chr-ID Gm05; pos 33494437 to 33494868 reverse strand)
ttcttcatcgggttttagttctccacctcaggaaggtatgtgtactcttgtttgcatattcttcttccattacctctccatttattttctctatttctattttcggggaactagttatttcatcctcagtcctatgggatatgtactcccgtggtttcttttttttttttgaggtggggatgtggaatttgatctcttgtggctacagtttctgttctctctcctgtagctaagagatcagaaaaggaatttggttaaatttgctgagcaccctcctctttcctttgttgttttgagatcttggttctgccataatcattttgtcctctgaggcatttaagggggcagttatgagctttctattgcatattcatgacattgggatggggttttgcaggagaaaagcgagttctagattcagaactttggcat

SEQ ID NO: 23038 - DNA, 745 bp, Glycine max
  Intron number 1 from transcript Glyma08g40770.1 (locus Gly ma08g40770) derived from phytozome v7.0 (chr-ID Gm08; pos 40601255 to 40601999)
tgatagctcagttagtggcaccagcactaattgtaaccctccatttttcctggaacaattgttgttcttattatgtgcttctaggttccatctttgaacacattttagtttgactttctcatagtgtctgcttgttcaaaactctatatgaaaatatattccaaagaccttgtggtgttggaatacatacaatgcctttagtgaggattttgtgagagctttgagagggtaactatgattcattcttttgtgccttccccctccccgaagcatatcattctgtgggagtttcttcacctccttgggtagggggatgagttcataaatcagacaattgcattcaatagttggaagttggaattatcaaggtctatcaccttaccatgtgtgtgtttgttgtcatgcatgctgaaagagacttcttagagtcttcttgtattttttccgacagaagtcattcaggaaccacattcaattttcccttgaggaaaattgtcttgggctgtgatttttgcccaatttgcctacaatttattagttggatcagtttttgctggctttctgcattttctgtcgtttttgttatttttcaaattactgttgaagtgttatctatatctccatcttgtctaagcttgctactacatgatgctatcctattgcttctgctgattactttttgcctctcctggattttggcttttcattagctgaaagtaaatcaactattgatacaagtagagat

SEQ ID NO: 23039 - DNA, 942 bp, Glycine max
  Intron number 2 from transcript Glyma05g31670.1 (locus Gly ma05g31670) derived from phytozome v7.0 (chr-ID Gm05; pos 36778228 to 36779169 reverse strand)
gtcttggctgaataatcgcaagttctcatataaaggtttgttgttttgcttggcatggtgcaaatgaggtgttcatgaatctgctgaagtgacccttagaatacttattatgggacttgggaggcacttgggctccattatatgtttattttatggatttgataaacaaatgcagaatgtattcaatgtgttttctatcagtagtgaatgctggaatcagtaatgctaatactcacacaattaagcatttttccctgcatgttaaaattctaatattatattttaatgggcgagcatttgagtaattgcaatcatatagcatcaacaagtaattttaacatatggtagagaagtttacttttagctgtaagctgtgtgggaaatggaaactaagagcaatcatttaaatagggagtatctcagccctgtatactttactattttcttattcaccatttggttctgcaatcatggaagactagctttttttggtatttttgtgtatttattcttcctgtttgccacttgttacttatatgttatagtcacaatttaataatttagttgtttttctttagctttagaatcctgctgggtcactatatgcctttagagtttggatctaatttgttgcttatcatgcatatgaacttgaagtataaaagtttataaagtatggcaggttggttatgctagccagagttgattcttgctatgctatctatgctcaagtgcatgcttgacctcaagagttaatctcattgttatgaatttatcatatttatcaagtttgcctgtttggaaatcatttcctgacaacaacaaataaacctgttaacacaaaaattgtgaagtgctttttaatttttattgaatttttaggaatttcaacaatgtgaccatttgttttttattgacccaaagatattatttacaggagga

SEQ ID NO: 23040 - DNA, 842 bp, Glycine max
  Intron number 1 from transcript Glyma07g13330.1 (locus Gly ma07g13330) derived from phytozome v7.0 (chr-ID Gm07; pos 11916458 to 11917299)
cttccctcatattcaaaagtggatcagccaatgtcagttactttggccagtctcataaacatgttgtttccttcattttatttggagaaatgaatcaactatcagtactctttgcaagttaatatttggttttgaatgaactaaaaaaaagaaatattgttttaaaagttttctagtgagattttgattataaaaattggaatgttctaaatgcaaaatgaaagcacatacttgatgtttttgtttgactttttgtttttggggtctttcatattttgagtttattggtttatctatgaccaagcatattgaaggctaaaacactgagttgagtttgagtttactaacagtctattataaacacttcatgttcttgatctgataaagttgatagaaatgttctatagggagaaaccttttcagattccatagcaatgtattttactgcttcggtgccaaattttggaatagtttcactagttcaaaaggccctattggctacaggcctgaaagaatcaagttcgcaattctcatgtaaaaggtgaagatgtttaccctacttgtagaagaatgggtagaatggtgtgttttaatgacaagtttagacttgtaataataaaagccataataaaaaataatcacataccaaaaaagaaacccagaaaataataatactttgcaggaagttctaaaaagggttggcataatactaaatgaatatttagtctcctaggactaataggtgatatgattttattgccgtccatttaaagtccaacttttgatttcagtttgacatgaatgcaggtcccatatacttgttttcttctgggactatacag

SEQ ID NO: 23041 - DNA, 697 bp, Glycine max
  Intron number 1 from transcript Glyma08g00680.1 (locus Gly ma08g00680) derived from phytozome v7.0 (chr-ID Gm08; pos 335754 to 336450 reverse strand)
tcctctcttttcagcaggtactacaatatcccacaagctgtgaaaaaatgttacttacaagtttctaagttaatttaaaaagcaaatgttgtgtttttatataataaatatttttttagcaacaaaaattgttttttttttcatttttatcatgggttttaagtgtagaaaatattttttttttaagtcaaaggtttcgtgttgttggccaaatttgttcatgtgggtggaggagaggaaggacctattcagcaaaataaagaaaaaggaaggacctgtttattttaaaactcagtataattaattttgatagaattgaatttaaacagttaaacgatgtgttatagctggagaattgtttgtgaatatttgccaaacaggcacaaagttgcttgtgtccagtgtccatgttgaaatgtatatatttaataaataaaaaaatttctctgtttttgttttggaaaatggtgaattacaccccatttctggggagggtggaaggaaaatgaagaggcagataagaacaaaaattgaggtgaaagtgagatgttagaaaaaaatggatgtatgataataataacatttttgttttagaaaatcaaaatactttggcatgtctgttattgttattatgttgttgttgaagagtgtggatgattgcttgtttgtctgacaaggcatatgtaccttgttttag

SEQ ID NO: 23042 - DNA, 746 bp, Glycine max
  Intron number 1 from transcript Glyma06g07440.1 (locus Gly ma06g07440) derived from phytozome v7.0 (chr-ID Gm06; pos 5413919 to 5414664 reverse strand)
tcaccttctcctttacggacggtaagcttcaaattacacacacacacagacttctttttaacaacttttttaccacacttttaatttgttcaaccatattctatgcttgctttaatattaagcaaacatggcacattaataaacaaataaaatgttaaaatgagcatttagaaaagtatgtgtcgtcatccaaatttgtgactttgaatacatataggaagttataatcataaagcattctccaatgaataatagcaactctaagatttgggtgtccatgatgataatagcaaaatttattcttttaaagccacatattcccccttgccaaaagtaatagatttgaactccaaataacactaaataaattaaacatcaacatagttaccggttagcaaatggtatacaaagtaatacgtccaatgtaatctaaagttcaaacttcttatgggactagtaatctgctaaacattgtcatataatcgtacatgaagattaaaatttaatgttaaaaagtcacatgactttttaagtagtcacataacattaaattttgaccgtttatgtttgtttatacgatttaaatttaatcatcttccttttaagataatttcatctcatataatatttattctctctttatatatgttaattgtgtagtaaatgaaattgagtaattaactaaacatttattggttattcacttagactcttaacacattatatcaatgcaggatcaatagcaa

SEQ ID NO: 23043 - DNA, 521 bp, Glycine max
  Intron number 1 from transcript Glyma06g13140.1 (locus Gly ma06g13140) derived from phytozome v7.0 (chr-ID Gm06; pos 10282802 to 10283322)
caaaccacactacttattgaacttaataaacacaggtttgaattgaattgaatcgaatcgcattgcaccgtgaaatcgagataacttatacacagttccttaggtgcttttggtgctcatcttcaatcaaatattagactctttttttccccactaatttatgcaataaaagtttgcgttaaaggttaacaaatattattaaagtaaaaaaacttcaattctgattgacaaataataacactaaaaatacgtaaggaattgtctcttaagttttgttcaatcagaaatcacaaagaagaaaaattaaaacaaccactgattccgtaaaaaaatttaaaagaaataaaggctataaatagcacagtacagctcaaactaacagaaagacaatgaagaatgtagttagcacttggaataattttttcagttttatgaatgatttcagtttgcgtcaaagtttctcttatgtttttcattttttgccagtcctgagtctgtcatcaagcactttgaaggaaggg

SEQ ID NO: 23044 - DNA, 481 bp, Glycine max
  Intron number 1 from transcript Glyma08g14810.1 (locus Gly ma08g14810) derived from phytozome v7.0 (chr-ID Gm08; pos 10791350 to 10791830 reverse strand)
tcattcattcatcaactcctctggactctggtgtggttggtgtcattcattgttgcaacgaattgttatctagtttccatcttctatttttcatgaaatattgtacatagctatgttttggattcaaatcaaaggcaaagcaatttgtgtttagagagtttttaccttttccgacaacaatatttatgcccccttcccctccggtttctctgttttgataatgagagatatttattggaaaaccttataaaagagtcttttctctcatttttagcaaaacctcttatcccaattacattattttaatgcacaatctttgaattcaaagtcttatttaagaaatcgaattcagttccattctaacgaacctaataagaaaacgaattatgtttgtattttatttttataaataaatataattaaaagtacgccttatttttatttatttatacttgattttgcatactttaagatttgcagg

SEQ ID NO: 23045 - DNA, 360 bp, Glycine max
  Intron number 1 from transcript Glyma06g06640.1 (locus Gly ma06g06640) derived from phytozome v7.0 (chr-ID Gm06; pos 4743195 to 4743554 reverse strand)
taactgggtaaaaggaatataatttttttatcatcaatatcttcttttttttaaaattattatcaatatctttaattaatgaatgtactgtcttctttttactatgtactttttaatttttaattacacatatatacactttttcagatatatttgtttttcttttttgcttcaagacatatttgttttattaattctacatatacattgagtatatccctctgatacaaggatctattttcctccttgaacatatcttactttctcttttttgcgtcatttttaaaaagtaatttgggtatgaaaatgttagtctagtagtattcattcatttctactctttttcacaggaacgaacac

SEQ ID NO: 23046 - DNA, 913 bp, Glycine max
  Intron number 1 from transcript Glyma07g12190.1 (locus Gly ma07g12190) derived from phytozome v7.0 (chr-ID Gm07; pos 10510861 to 10511773)
ttgataatctcccttctgggttcgttaatccatcacctttttcttaaaatctgtttttttttaaccttgttattggtcttggtagagagtatctaccactcttgcaatgtcgagtctagtaccactcgtaccaaccacttgttttaatttcactcttccataactgcttttcatgctttttatgtttggctttttcattttatggccttgtgaagtaagaaagtaagagccttgtttggataagcacttgtaggaggttaagaaggtggtaaaatgaattaaatttctttcatgttttcaaattatcttattggaaaaagctaaattagagagcttttatcgtcctgttaggataaatttccccgtaaacatattatgggagtagtttatttcacttttccttcttattttcttctcctgtaattgcttatagagaagtgtatctttaaattagcttgtatataagctaattttaactcatggaagaagctcaatgcactttatctttttgtcttcttctcctataagtgcttattcagaagtttatccaaacatagcataaatgaatgatgatttagatgctggtgattattcctgactggatggctatgtgtgacttttttttcctgtgccttccaacatttctttgttgatcagttgtggtgataaaagcatacagttgttgatgttccagtagatgataacagtttagtcgtacataaggctttggattttttatggtgcattctgggtaatctgaaagcaagatgttgaaagagggagtttgaatttttctgtgttttttcattgatgaaaagcaagtggataaatatttttgtcatatgaatttgtaattctggaatgtttcttcctttcttggctcattctttactttgtttcattgtttataggg

SEQ ID NO: 23047 - DNA, 811 bp, Glycine max
  Intron number 2 from transcript Glyma05g37150.1 (locus Gly ma05g37150) derived from phytozome v7.0 (chr-ID Gm05; pos 40806787 to 40807597)
cgcaaagagcgccaagttgaaattcgcaagaagatgtaacttcctttataactctctacacttttttttttgtctcttgcgagttcgaaataagttaggtcttctcgtccgttaatatcagttgaaattaaattctggagagtgagtcctactcgtataggtattgatccttgcgtgtgattgtgataataccgcaatgtctattgattgtgttactggtactgctaaagcttgatttttcatgtaatcatgcattcagcgcctctatgatcattcgatgaagatcgaaatgctgagattttgaatgtgtgttttaagtattaatatatgatccgtccgatcgaacggttctgaattgctgaatgcgtgaatgcaggcaatccagatcactaatgaaatagtccagcggatccttgtggtcttgtcttactattcagtaaaatcaataattaatgttagctccactttgaactttttgcattttgaaaatatggctataggtttagttttgtctcttttatttatttattttgtttagttttgaattagttcagtttgatgttcaagttcaatttctttcaagctgttgatctctgacaaattacttgaactcaaggatattgccaaagtttgatgaatggaaaattctctgttctttgaagaaaatgatgagtgagattgagattttagtttctgaggcataaatcatgtgaaatgcagagcattgtgttatgcttcaaagtggaaaaagcagtgctagttgagatagtttaattgggcacaattaattgtttgttgcagtgagtactcg

SEQ ID NO: 23048 - DNA, 982 bp, Glycine max
  Intron number 2 from transcript Glyma07g15330.1 (locus Gly ma07g15330) derived from phytozome v7.0 (chr-ID Gm07; pos 15182355 to 15183336)
gagatactgtgaggtttcttcttcagcatcgcgtaagttagtttcccttcccttgttagatatatctatctgtcttaacttccttttggtaggagaacttcaaaaagggacacaattcatacaagtatttatgcacgcactaattgtaatttcagtctctttttttttagtgttagttactttcgctcctgtccctgtatatatatgctgggtgcctgttgttctttttttttttctctctctgagattgatttaatcagttttatgaataagagttgaacgtgtattgctctttctatcaaagggaagaaaaaaaaacaaattgactaattattacaattagcatacttggcatatgttttcttatcctgtaaacaagtgcttcactggaataagtgaccatcctttgaactgcattaccatcaggagatgaaatatgagatatgtacacaaggccaatatctgctgcatttttttatgctttgagatgtaacatatttagcacagtcgataagaagacggacctggagtcccatctcagcccctggtatggtgaacctaatcgatacatagtagctgaattagcataaataagactaataggggtgaaaagataaactaaaagatgttatttccactcaaagcatataaatgttagaaacaagcatcagagaccagatacaatatgccaattagacaatgactcttgataccgatacttcttgagcctctctttttcacccttttcataagttattacttttatctagcaagaaaagtagcaaaataactttcttgtgagcaaatgtatattttcatatagaaaggtaaacaataataaggctgagatatctcatcttgacagattgcatcatatatatatatatatatatgaattgtgtccctttttgaagtctcattggtatatatgcttaatgatgttattgaattttgttgcatttattccacaatctgcaggttg

SEQ ID NO: 23049 - DNA, 650 bp, Glycine max
  Intron number 1 from transcript Glyma06g20070.1 (locus Gly ma06g20070) derived from phytozome v7.0 (chr-ID Gm06; pos 16424913 to 16425562 reverse strand)
gctgtgccttggttttgaaatcaatactttgtgcggtaaggtttctgtttttattcttcccaaaagcatggatttagatcaggaccacgaaaaatgtcttttttctctgcccctttaattggggtatactaacaagttcttcatgtttatggcgtggcattaagtagcaatcaagaattaatgaatacattattgagtcttaatgggtggaaaatttgggttcaaataaatgattttggcagaatttttggttgggtagaaacaaaaataaaccatcacaattcatcccaaaacacccctatttaatgttatgaatatctggtttatatactgatatttgagggtcaagactcaagagcctacttatcaatttctcatggatgggtagtggcacttaacaggcttcaaaatctaaacttctttgtaataaaattttcatgtatggaaaggggatagtcatggctatagttttcatgaaacttttctttttttaataggttgacataggaactactgttatactttctctatccataataatttctaaaagcaagaatgaatcaaagacaaaaatatccatgataacttctgccttggattaatttctttttgtagaggtgcgacccattttcaggggagctatttactat

SEQ ID NO: 23050 - DNA, 979 bp, Glycine max
  Intron number 3 from transcript Glyma08g11160.1 (locus Gly ma08g11160) derived from phytozome v7.0 (chr-ID Gm08; pos 8179942 to 8180920 reverse strand)
aagctgtagagtttttaagaggtaactaaataacatagagatcttgttattctgtttatcgtttgaatggtatatgtgctgcagtagctgtatctgttgctttgtctgttgctttgttaatatgtttgtgacttcataatggtgcttttctagccttttcagcgaattttgggtatttagcaaattattaaaaaaaactacataaagggacttgtactgactgagagtgaaagattgaatgagtaacgactaaggagctaaataatgccatttttttcaataagggagcgttctgaagggcttgtttaagcttatgaaagtagcttattatctatctatatgccttttgtatttgtagtttattcaataagcataactatgaaccttatcaaaataagctttttttagcttatttcattaagctctgtaaccaagcctatgagaattctcatttgataagagtttagtgaataaatgcttaatcaagctgtttaccctaatacgccccaagtgcagatttagcactgaacttttagtaccaaataacataagcattggagtggaagatcctatgatatttaaattttttctcactttgattaatcccttgatttactcattttcttaatttgctgattgaattcagcatcattttacttatttttgtttcagcttcgaatttaaaatggaatttccattcagaatttgttcagtatagtgcagaatcaaattattaaacactcttagatgaacttggcatgtcaatgcaactatgcttattattgtaccttctatgtgtcaaagagctgattttgtttcatagttcaaatgtttgtgtgactctacttactatcagtatgcttgtttataaactccaccacaaaacattaacatattagcttattcttaaaaattatctaccatttcctttctgctgtttgaaagaagattttatttgtcccttgtgctgcagatcctg

SEQ ID NO: 23051 - DNA, 271 bp, Glycine max
  Intron number 2 from transcript Glyma08g11160.1 (locus Gly ma08g11160) derived from phytozome v7.0 (chr-ID Gm08; pos 8180951 to 8181221 reverse strand)
aggcgttcaagttaagcttactggtggaagacaaggttaggttacccaatccccttcttttgtgatttcttaatttttttttaaatgtggttaatgatttattgattgtttaaaatgatggaggaagtatgaaattcgtttcgttttgaattgcaagtactcgattgggagttagctttcataattaaaatgcaaataaactcttctacatgtatatttttttattttattttgttttcttggattgcagtgacagggactctgaaagggt

SEQ ID NO: 23052 - DNA, 779 bp, Glycine max
  Intron number 2 from transcript Glyma08g00440.1 (locus Gly ma08g00440) derived from phytozome v7.0 (chr-ID Gm08; pos 150499 to 151277)
tatatagttgggggtactatgctctccatcttaactatcttttggctagtatgtttttccataaataaaatctcattactctggcttttggtttagaatgcgaccacacaggtatatgtatgttctgatttagtgttggattcagcttcaagaaagtaatatctagtttaatcggcaaattagttagtatgctctaatcaataatatgtatacaaatgttttttcattacatcatgaaggtggagtagttgaccttgtttctttcaaatgcaagtttgatttgggaatcaataatttgttagtatgaaaattgaacaactagtttgatttggttgctaggaaaaaacttatatcttaacattgttgggcacatcatttagtgttattttcagttacccggaaatttctgagacatttttattcacatcaaaagcaatattttgaaatgtggtttacctaacttattagtgattctgttacgtagtgataaggaaccaaaggcagcagcagggaacatattcatgaagctagaagcaagggtgcaagcagatgtgcaagaagtaaacaagcccaaaagaagaattacgaaaccttcgtaccttaaggatttcgtatgagcagcgtggccatgcggtagtataatcttgctagaataagctttgtctgccaataggggacaaagataacaaactctgttatttgtaatattcctgcaagctaaaggacaaattcagttattagaaagcagtataaataaccttgtaaataaagcaagagca

SEQ ID NO: 23053 - DNA, 697 bp, Glycine max
  Intron number 1 from transcript Glyma08g18080.1 (locus Gly ma08g18080) derived from phytozome v7.0 (chr-ID Gm08; pos 13587759 to 13588455 reverse strand)
gcagttgggtcaaggttagtttgttatcatctttattattatgtttctaaagatttgtagaattattctcactttctttttctcttttattaactctattgctcaaagtcatttttggttaattaatatgaaatcatatatgaagaatccctatttgttgtaccctttttattcttcccctgcaactgttcttttctttggtgttttcaattgcaatattttttctcaaaagcacatgcgtttaaagttatttagataatattgattttcttaatacccacccatcgtgcataaaattccggatgaaattgttctcaagagatggagaagttgttgaaaatgaaaaattggtggtttaggactcctttgtgctttttcctccgttgaaaggtcattgaggctcacaatagagcaaagttttgatgtcaaaatcaagttttcagtgaaaagcacttaaatcacacatgggctttccaactaaaattctctctaataagtctcactcatttgttttttctttgttccttggtttttgtcatccactcatttcttgttcaagtaatgtgccaaatcccccaataaaatgaaataaaaaatatttgtaccaagcttcttatgaaccaattttaagatgtaattccctttgatatcttgtgtatcagcttgatcaaagaggagaagggcaaggagcgagaag

SEQ ID NO: 23054 - DNA, 633 bp, Glycine max
  Intron number 1 from transcript Glyma08g22590.1 (locus Gly ma08g22590) derived from phytozome v7.0 (chr-ID Gm08; pos 17152985 to 17153617 reverse strand)
ggctcttgggtttctgagattcgtcacccattattgtactctcatcaaactcatctcaccatacattttcaattatttatttgttccacttctcaaaaaaaaattagattagtaccatttccttttcttttcttttaaatactaatactatgcttttgtacacttttccccatgaaacttaccctcttatattagttaagcaaggttttaaattgtgaccacggtcaccatcggagtgcaaacaaatgtagacttaattgcagttgcaatacagttgtgagactctcaaaaccttgatgtcacagtcgaaattgtagttgtgaatcttttcttaaagtcaaatgttaatccgttttcttagaatattaattaaggaattaaaataaaaaaatatttttattatgtaaaattgagttattcataatattttttatgtttttctatgatttctataacaaatatatttgttaatttcttaaccatgtaggacattagttaaccagacactattaaaaccttgcaaggatctttgtagcatctgaattaatgtgcactgaatgtgagagtcttagtttgcaatttgtgatgtgttgaataggaaaaggagggtgtggcttgggacattcgagacag

SEQ ID NO: 23055 - DNA, 637 bp, Glycine max
  Intron number 2 from transcript Glyma05g36190.1 (locus Gly ma05g36190) derived from phytozome v7.0 (chr-ID Gm05; pos 40061661 to 40062297 reverse strand)
ccgatccgaagctctctccctcatctcttccacgtgttagcttctcaattctcaattctcaatttcccttttttcttcttttacaatatgcagtttcttacgtctatttagaatagtattgaaagaacctaatcgtatgttttggtatggtaaaagaaaattgagggaagtaataaaggatccatttgttaaggtggaaagaaaataagagaaaagataaaaatttgaaagttgaattaaagagaaaatgaaagaaaggaaaattttgaacttttgtttcaagaagacaatttttctctctctttctcttttattttctctccaatcaagcacaaggaaatacagtgctattctgttttcttttctccatattaaacataccaaaactgtggaaatttgaatgaaggaaagagtaatgaatttttgttttttagtagtctaacacttttcttttcaccttctcttcaatcatgcaaaataatgtgttgtattcctcttattttcattccttccatccaaacataccataattgtgtctaacttttgtcgttttactttttgtcttcctggtctctcaaggaaatgtgtgatgttttctgcaggtcataatcttgtgaaattggttgtgaggaacgca

SEQ ID NO: 23056 - DNA, 586 bp, Glycine max
  Intron number 1 from transcript Glyma07g32990.1 (locus Gly ma07g32990) derived from phytozome v7.0 (chr-ID Gm07; pos 37882081 to 37882666 reverse strand)
gcactctcaaggtggtccttttcataaagtttctctctttttcactctcaatcccagtacccaaaataactaactacctctacatgttggaaataatgtaacttgttaagaattaggaacaccaagtggctgtcggggttgtcatgtttcttaaaagtgagaaagttttaatattagtgagcaacttataggactatgagttgatacccttctctgtattggtattctgtttttacttgtcatgcccctccttttaagtagcacgagtctgcaggcatgtagtgtccttagtctttacttgcctcaatgcaatggcttcttgaattagttcaattgctgttattgaaagcatttcaattattcacgatcatgttatattgtttcatctcatgttgactcgtgttgcatcacttgcatctgtacaagaggaagaggaagagggttgggagttcagtgaagtttttgtgattccttgtggatactggtctggtgtagtggttttgagttttgacttcaagttggcttatgaacttgtttgctcactatttcttggcatgcagtttgctcatagaaagtgtatccaaag

SEQ ID NO: 23057 - DNA, 637 bp, Glycine max
  Intron number 2 from transcript Glyma07g16390.1 (locus Gly ma07g16390) derived from phytozome v7.0 (chr-ID Gm07; pos 16060610 to 16061246)
gagctgttaataccgaacttttggattctctcgtatgtattgttaataacttaattgtaaaaagcttatacattgccactttgccaggcatatctaagattgattcacatcactcatctttgtatatgttttcttaatgtgcgtttgtgaattgtgagtgaagttttataggaaaagcaatgggaagaagaaaaaaaaatatatttccctaatttgatagttaattcaaataaaaaataaaatgatagatggtaaaaagttaatgtcctatttttttttacatctcataaagctatataattcttttaatttaaaaataaaaaacttgtccttcctttttttttttctttaaaacttcactcacagacattacggacgcccccgtgagattgaaataatactttactttttttattatgaaaatgctttaccttaaatattaaatgcataaagtatgagttgttccaacttaagctagtcatcttgatgtaaccaaagaattgagtttttattgcctggttacatatctacttctagttttcaatcccattttttttctcctgcataatatgttattaattcagcagcaatgcatgctctaaatctatttgattgttcttgttatagaaatctacgt

SEQ ID NO: 23058 - DNA, 492 bp, Glycine max
  Intron number 1 from transcript Glyma06g13660.1 (locus Gly ma06g13660) derived from phytozome v7.0 (chr-ID Gm06; pos 10774464 to 10774955 reverse strand)
taactgattctgatcatcaacacaacccaacccatgtaagcctatttttccttattccttcctcccctttattttttttcctttaaaacttgtcgtctccttccaatacttcctctgccaaatcctcttctctgtttgatttcatttttttttttaccggtttttaatttttaagtgttttccaatttccatgtacccttttatttttattttgtggggttcattttgatttttatgtttcttttgaaaagaaaaaaaaaatctcatttttgtgatttctccgaagcggtttacactttacattcccaattgtggaatgtaataagaccaggttaaatggtgtggattgggatctatgttggatctctcggtatctgtttttatttttcttattaaattattgtttatcgttgttgtgtggttaataagtgaaatgtatattttggctaatattggtttccgtgctgctttttcattttaaatgtgtagttc

SEQ ID NO: 23059 - DNA, 648 bp, Glycine max
  Intron number 1 from transcript Glyma07g06410.1 (locus Gly ma07g06410) derived from phytozome v7.0 (chr-ID Gm07; pos 5147582 to 5148229)
aagtcgctcgtcgccggtggcgtcgccggaggagtgtcagttctgtttctcatttcctatttatatattttctaataaaacaattatttatgaatatgtaattggttgattggaagtgtttgcggtttggatcgccagggaacagtggagattgaagcttttggctttttaatttcagagtggttaatgaatttgatcaatttattaatctggcttttgtgtttggtgaagtggtttgagtattggatctgttgaatataaacgatgctgttgattttggaagtcaatgggtgtggttttgttttaattggattggatcacttgtgatttgtgaagaaccactcagtgttggggttttggaataaggttgtgcttgtatgtgtggtttataatgaaattcactggaaaatcttcattcacttattgccttgctaaggttgtgttaacatgtgctaactttgaatttcatttcagtgagctgagatttagttacaattataacgacccataatccaattttcttggaaactatttcttgacaataattctgggatctgttttggtgtatgttatgtttagttttaaccacaccaaactttttgtgtctgtgcaggtcacgtactgcagttgctcctctggaacgattga

SEQ ID NO: 23060 - DNA, 849 bp, Glycine max
  Intron number 4 from transcript Glyma06g08270.1 (locus Gly ma06g08270) derived from phytozome v7.0 (chr-ID Gm06; pos 6073742 to 6074590)
cagagtggaattttgaggtcagcatacatgccatctttcttattttcatttgctccaattaaaataaaatgatttgggggacaaaagagaagcatcaaatgatcttcaatgtttaaatgtatgtattcttctggtttcttcttcgtatgtgaccgaggcctttgttggctatgattacttgtgattgcattccaagttttaaattgcggtcgcggtcatggttgcaattttttcacaatctttaatattctgagaaattgtgaacatatgtagttgatgcggctgcaatttcagttgccatgtggtcttggagaacctaaatgtcttgacaatgtggccacaatcacagttgcggacttcttttataaaccttggttacattgtaaaacactttgaataattggatgagaatgttttgtctaaaaccatgtgtagcatactaacatgagtaattgggtgattcaatttccttgatgaacaacttatgactacttgttttgtgcatacaaatagaaggcagatagcattgtagtagttatactttgttgactggtacatagttagctacctccctttaggttttccctttacttccctcatgttttgattttggtgaagattttcaaacttcttaattaaagagttatgcctatataagtgattgaaacttcattgaggttcttagctcattagtatatgcatagtttgtgtcaatgtcgttaaactttacatgctttttttaattttcgtttcaaatttaagtcccttttcatgcatccctccctgttctagaagtcgttttttttctctctgactattctgatatatttttttttttatttgaaagga

SEQ ID NO: 23061 - DNA, 703 bp, Glycine max
  Intron number 1 from transcript Glyma07g30040.1 (locus Gly ma07g30040) derived from phytozome v7.0 (chr-ID Gm07; pos 35111353 to 35112055)
attcctaacacccatttcaggaagcccaagcattggtgggttcttacccttattattattattattataagttccgttttcagctttttcgtcttagaacaactgctttatcttcaagttttccattttctggtacccaagaaggactcgttggtctcaaattcttgtccaagagacctatttcttttgctatttcgggaatataaactctggtttgtttgttttttatttttatttttatttttatttttattttttattctctctctctctatgtacctcccactttccatatatgtgaatttttttttcttctaactaaatcaaattagattcctgggtaagtgcagtttgaggtaccaacgaaaataattggttatgttttttttttttattatctcattttgtttaagaagctatggagtggtcttaatttgctcactagttaattccttcttcctggagcatcctagtcgtacatgatttcatcttgatccatgttgttaagaattattgatgttaattttctctattttatgataaatctgttggatttacttcatatcatatatatatatatatatatatagagagagagagagagagagagagagagagagatgtctatgtttatccggagaaattgcccttctttctttaatttcttagatgtaatggtttggatgatttttgacatagggag

SEQ ID NO: 23062 - DNA, 449 bp, Glycine max
  Intron number 2 from transcript Glyma06g01870.1 (locus Gly ma06g01870) derived from phytozome v7.0 (chr-ID Gm06; pos 1186180 to 1186628)
gggttcgtatatattttgtttttgtttttgtttttgttttacctgactttttatagttttacatacatttgctatgacgatatagtttgatttccattaatacacatggcttacaagttacttggaaacatttgttcttccactcctctggaattaggaccatatgcttgatcagaaagtttgtgttctataaccactgttatgaatccaacctttcttggctcctataatattatggctgatgtttgatatccattaaaatttgacacagctgaaaattagttcaaaggagttatatagattagagtataaatatatttttttttgtctgggagatactgttatattccgtttattttgttgctcgtctagggtgtttcagactctattttttgtttgcatgttaagttcaacaattgattaacttctactcactgttcaggtgtttg

SEQ ID NO: 23063 - DNA, 496 bp, Glycine max
  Intron number 2 from transcript Glyma05g35930.1 (locus Gly ma05g35930) derived from phytozome v7.0 (chr-ID Gm05; pos 39880973 to 39881468 reverse strand)
caggggtttacacgtaagtacaagcattatatttcttgttatgtatcacttgaattctgtcacattctagtctttttgctatgcgttgtttgtttatggtctttgttcatgtgagacatggggtttggtgtttgtcctgtccacgttcattattttattttattttttgtttttgtgtgatatggtacataggggagtgacaataacttgggtgtctttttccttgtgactcaaatgccctgagaattgctctttgactacagaagactttgcacctaatgagttctttctttcagacttgtcctctttttattatttttatttcattttattaatctcttcctttcacaacaagcaagttttcttctatgtgttattgtttaacaaattgtgaattacattcatttgaaaatctcttatttactactttcttttgtgtttttttttctttaattatacagtgagaaagtgaacatttctcctttcaaatccttca

SEQ ID NO: 23064 - DNA, 454 bp, Glycine max
  Intron number 1 from transcript Glyma07g14930.1 (locus Gly ma07g14930) derived from phytozome v7.0 (chr-ID Gm07; pos 14814506 to 14814959 reverse strand)
caggggtctacacgtgagtagtagtactacattttcttgtacttcaattgaattctgccacattctgctcattttactttgtgcccttctcaaaatcgcggtttgttattgtaagacgtggatttttctgtctgtctgcattcagaattgtgttgttctatttagcgtttacaggttacaacttttgtttcttccaatgatgtccttttccttctgattcaatcattcaaactctcagagagttggtctttgtctgaagaagattttgcaactaatatagcctttcagctctttccttttccttttacccccccatcatgttacattatgcaaattttctagaatgtggtgaaattttgaattgcatttgaatggaagcctctgattttccccttgcatttttttgtgtatatgtccagggagaaagttaacattcctcctttgaaatcctaca

SEQ ID NO: 23065 - DNA, 895 bp, Glycine max
  Intron number 1 from transcript Glyma05g17460.2 (locus Gly ma05g17460) derived from phytozome v7.0 (chr-ID Gm05; pos 20186184 to 20187078)
aacaagtcaagggtaagttttaactcctttttatttctttgatgtatgatggtttgacttgttcttcttttagatgatgtcattatggctcatcaatctttcataacttcatccgttatctctttcctgtgcaatattttgtcgtgaactactagctaatgtcaaccacgtgttaatgttgaaagaaaagtagtaacagaaacagatgccaaaaacattattcaaagttgcaaacatggcatgcaagtattatgtcttgaaaatttgttggtaatggcttgtgaaatgttttaaatccacatttctgaaggtagagggagcagcttagggcaaagttcaagcttaaggctgtgtgcatgtttagttttgctcattttttagaagttatcacttctgtcaactttatgatgccttttttgaaaaaggaaaagagctattatttcccttagattgttccaaacattgtctagttatccttttagaagttaatatgtgaactaaagcttttattgtagtccaaatttcataataagggcatagccttggcatctattctccgtaaatgatgctttaacaaattaaagaagcattttcttttgacctgtattatttgtttttctgttcagtgttcatttagcagaatgttatctgtaataataattaataaattattctgttgcaatatatgctcacaatcaaatgaaaatctgatacataatgcattctaaatagtataagacatcaaatagtctgtgcttacagatccctttggtttacctaggtaaatttagtgaaaatattatatttgtcactttctcaaaaacgccccagttgaagattattgtggagagattatttgaacactgtggatgtcaagtgcctgattttcaaagtg

SEQ ID NO: 23066 - DNA, 739 bp, Glycine max
  Intron number 1 from transcript Glyma06g07340.1 (locus Gly ma06g07340) derived from phytozome v7.0 (chr-ID Gm06; pos 5345678 to 5346416)
ttccttctcatcatctttcagatccctcttttcaggtactcctaactcccaaatcctttttttagatcaaccgggctgcactcgttcttcccgaatctgctcaaataaacgcacgcctcaccaatttatgcataaatcttgtgattactttcgaaatcatcttcatccaagagttgaattgtggccacgactgacaacattttttttaaaatgggaaataagagagaaaaaaaagaaacatgtgttcgatttaaccgaaatcaatatttgattgatggtttcctttatgttaaccaccttaaaacttaaaaggttaatatcaactttcaaatcattaattaatcatttgatggttgacttggatatcttcatacacacatgctaccgattttacttagtttcttctgcgatctaataacctcgttatttatattgttatatggtagttaaataacttaattaggatgtactgatagtgtggaggttttttacattattatccattcacatactgtcatgtaaattactttaatcgtgatatacaaagtgatttctgattacttgatggtgtataaatctttacactctgcaaattaaactcggtagataaaactatactataggttgtgcaatgagtttgctttcccttttatccaaaaaaaaaaaaaagttgtggcaatgagcttgtttgaaattgattctttttggttatttttgcagggtgacttgcagatctggc

SEQ ID NO: 23067 - DNA, 1037 bp, Glycine max
  Intron number 3 from transcript Glyma07g31130.2 (locus Gly ma07g31130) derived from phytozome v7.0 (chr-ID Gm07; pos 36079091 to 36080127 reverse strand)
gctacaggtgtgttagtgtaccttagagcagcttggagtggtagatgctcatgcatgtgcattaaatttgttaagctccctgtttcataattataatgtttcaagtgcacaaaatgagaatttatgcatcaatgctctataatctatataatatgctacatctgtcatctgtggagggactaaggaaatatttgaacatcttcaaatactcaatcagggattatctagaatgcattctggtctagcccccataatgctttgtgggtggtattaaatcatgttttgctaacaacccaaaatgcatgcttgggtccagagttcatttttggaagaaaaaaaagttaaaaaaatatttttcctaaaaggccatctagaaaaaaaaatcattttcagtgtaattattaactaatatgtatctattgaagtttgtatatttacacaaaacataaagcattgtttctattttagtaattttacatccaaaggtaatttactattcaagcaatactcgttctcacaagattactttaggttgagcattctaaaattctaaaacataagactaatccttcaaaaggaaattctttctaaaataattcttccacactgcattctactgaaaacagtttaacatttcttatcgaaacatgcttgtagtcatcacaaattcacaatcactattggcaaggatctggctttgctgccaccactattaccttgcttccatcttcactattgctgaacctatcattatcatttatcaattgtcgttatcactgctcctgaacttttgtgaggctacataaacataattgagtttgacatatatacgaaattcatgttctcttgtcttggttcattacttcattgaaccatgacttgaccttgaaggatgtaagctgctattttgaccaaagcatttatattgaaaatatttattgaagttcataaattgttattcttattcagcaaaaaagtaagagttcataatttgatttgcaggttcagcagacagaacagtgaaattttgggattta

SEQ ID NO: 23068 - DNA, 591 bp, Glycine max
  Intron number 1 from transcript Glyma06g35940.1 (locus Gly ma06g35940) derived from phytozome v7.0 (chr-ID Gm06; pos 37942072 to 37942662 reverse strand)
gaaaactgcttgctgatatattccctaagtcccctgtacgtgttttgtggctctttttccttgataattgaaatagtaatctcattgaactcttttctccagtatgacctcataggaaacaaatttttcgtggaatctagtatttatagtgccattatatccccactggaagtagaaaaatattttttctcttttgctaagcgaacaatttgaaacttcttgtgtcttctgtgcattgctgtgggcttattatttggtcaaagcttatatacagttccttaggttctttggtgctcttcttcatcaattagaatcgaagtttcacctcaataatctcttaataaaggtttgcattaaagatcaacataaattaccgagttgaaattccaattttgattgaagaatagcaccaaaagcacttaaggaacggtatctaagtttcgtccttattgttttcagttattccttgttctcaatggaaagaaaatttttatgcttgattatatggcaatatcttttcactttaccctcatttgtacatgaagtagaaccctaggcccagttttcatgttttaatttattcttctcagg

SEQ ID NO: 23069 - DNA, 577 bp, Glycine max
  Intron number 3 from transcript Glyma08g10610.1 (locus Gly ma08g10610) derived from phytozome v7.0 (chr-ID Gm08; pos 7713550 to 7714126)
ttgagaggttatttttgggaacaagttacattaaggtgagtaaagagtgacacatatctgagtctattcacttttgtttagttggatttgattttttggctcttatgttagcctggcagatttcatttaaaactattgaacaatgtagtaatttgtaatttgttgacttatggacatgttctgtctaattacacagctccgtggagtgatttttccacaagtgaatgtaagctgctaagttatgttatgcatgacaaaaatgaaacccaaagattaatgaacgatgcatcatgcatggagtgctttatattctcatcacaaattgacaattgttcacatttcttctacctagcttggttgcccttttttattttctaaaattatcctattcatttatttgttggtcaggaagagaaacaaggttgtatttttgttcatgaaccaacattcttaatttgatgccttgtcttatactaagaactctgtattttgagatggatgtgttcaaatatatctcacccttgcattgtttctatgcatagattttgtctgcaggcttctatccgcaagtggagct

SEQ ID NO: 23070 - DNA, 335 bp, Glycine max
  Intron number 1 from transcript Glyma05g35920.1 (locus Gly ma05g35920) derived from phytozome v7.0 (chr-ID Gm05; pos 39872606 to 39872940)
ttgtcaagattcaaactttctttagaggatacttggtaagtttgcctttctccaacttcagagacaaaaaagaacatgaccttttttggcagaaattgaactagtcagatgcaaattctaggcttttaattagctttcagttagattagatatataaatcatataattctataacatgttcagaccaaagctattttgatcaaaatatttatttattataaattttaattatataaagatactgattctattcatatcagcgatattttgattttgctgttcttcggtttttctaaataggcaaggaaggcactgagagccttaaaaggattggt

SEQ ID NO: 23071 - DNA, 377 bp, Glycine max
  Intron number 2 from transcript Glyma06g00640.1 (locus Gly ma06g00640) derived from phytozome v7.0 (chr-ID Gm06; pos 358917 to 359293 reverse strand)
aactgccgcaagagcaagatcttcttcattgcgtgcttcttcatctgtttttcattattactattttaaccctctttttcttagtacttatcctatgttttattgctgttgatccgtggttttatgcatacaaacaaaacaaaagtagccaacccagtgtccggtggcgctattttaattatgagttatgtcgtctctgacagttgtagtaataatgttgaatataatggctcaataatttatgcggaggaaataaaattaaagttctttttaggtacaattatatgatggtagttgatttgattgaatatttgaattgaaatatttataatatatgatcaggtctccaacagcatcaaggattagagctaagattc

SEQ ID NO: 23072 - DNA, 445 bp, Glycine max
  Intron number 1 from transcript Glyma06g38370.1 (locus Gly ma06g38370) derived from phytozome v7.0 (chr-ID Gm06; pos 41207212 to 41207656)
ggttcaccaagtgcaagtatgtttcttcaaaatcatgctagtgttatttttaaacattatattatttatgtatgtattcatagaaagtttgtaactacttaactcccacactttcctgcgttggcatttgtcattgtcctctgtctaaaccaacaaaaagctaaaacatatgggccatggtttctttgaatatgtcatctgtttgtctcctctgtctgtttggcgtcttaatcttaaatgagttaaatattcttagttgggccaggaagaatctaaacattcagataaaaaaaaaaaatctttcacatccttaaattttcttaatttcttctttttctaattacaatatgacattcgttcatttatacattattattttttttgttgaattatgtttttggtctctaaagtgtttagatattttacttttagttatcaaacattt

SEQ ID NO: 23073 - DNA, 643 bp, Glycine max
  Intron number 1 from transcript Glyma08g10340.1 (locus Gly ma08g10340) derived from phytozome v7.0 (chr-ID Gm08; pos 7472124 to 7472766)
aacacagtgctcacaagtacgtttctctttctttccttctctcaacccaccccatatgttgctacgccccaaagacaagattttgatatctgggttgtcttagtttgtctagactctaaattttcatgtttaaatctgaattggaatatttgaattgtataattaaaaaagaagacataaaactaatcatgagtagtagtaagctgaaagtgccttccaaaatctgtactttaatgcaatcatgttgtttattctgttttttcatcacctaaacataaaaaataccagctgcacgctgccaatttagcaaaaaatatgttttttctttttaagtttctttatgtctggagcttcctcaaatcactctgaattgtaaataatcagttggtttcttctgagaatttttacaaataaaaggatggtggggatttgctattttgtggctgtcagcttatctggttggtgttgaacatagctttcttttggttacttgcttaggtggcttctcttttctcacttttctttttgtatagattgttaattgtttatgagtttaattacttgattttggtcaaatattgaaatgatctttcttgtctcaaatgcagttaccatcctcttccgattgtatttgctcaagcaa

SEQ ID NO: 23074 - DNA, 333 bp, Glycine max
  Intron number 1 from transcript Glyma08g27960.1 (locus Gly ma08g27960) derived from phytozome v7.0 (chr-ID Gm08; pos 22212665 to 22212997)
ccactcaaacatttacctcacaactgtcgcctcaggtaacccaaactaagttcttcctcgcttttgttatgtaactttatgttttttttttggtgaaattttattagattatgtagtctattcattgcataattagctacactatttcttttaataaaacactaaaatggggttataaagtagaactttaacgacctaggtatcctatttgttcgtcctgaagtaaaaactgtgctagagcttattggttgcctcttgttgcatcttttgttattatattagttttgaaatttgagttggttttggtttcttgcttaatgttacttacagatt

SEQ ID NO: 23075 - DNA, 893 bp, Glycine max
  Intron number 1 from transcript Glyma07g29500.1 (locus Gly ma07g29500) derived from phytozome v7.0 (chr-ID Gm07; pos 34355187 to 34356079 reverse strand)
ttgttgctgtcaagtatattgagagaggtgacaaggtttgtttctatttgttttttttcctttttcttttttactaaattaagttttcttttcttgttttgttgctggttgtaaagttttggtttttgtgtgtgcgcgcgcgtgcttgtgtgggtgggatttttggcagctgaattgtttgttggttataaacttataattgatttgtggttttggtggtggtgttttggttgtctgttggatatggtgctaaaagtggtgatggtgattaatgggggtgtacatgttgatttcagtcttttcaagttttgagatgtgtacgtgttgcctaatctaactgtgtgtactgattttgttattcttgttttttggatggaatttgaggccctttggggtaatagaggatgcttagttgaatgtgaacctagtttttgctttcctcttctacctattttattgatcttaatatggtggtgcccccccatctgcctcttatgcgaattagtggacataataagataccctagaactctgtttgttttcaaaggcataatgatatgtgttgttgttgggtctaaatgtttgttgcggtggttaaattgaagttaaaatgctacagtatgcttgatggcagaacttctgaatagtaaatgagaatttataactaatggtataactaatgtgttgtgttggttcaataagccacatgtacgcctccattcccctgtatgaggaagcttatttcttctggagttcatgtgagtcaatttcattggattttgcatgctaagctgtggggtaggttaattgaagttcgaaagaaactgtgttgtgtgcatgtggatttccctatgtgatgttgagctcaaccgtgttttcttctaaacagatag

SEQ ID NO: 23076 - DNA, 707 bp, Glycine max
  Intron number 1 from transcript Glyma06g41970.1 (locus Gly ma06g41970) derived from phytozome v7.0 (chr-ID Gm06; pos 45213163 to 45213869 reverse strand)
gttgttgggcaagaaaagccttcactatatctggatttcgattagaattacataattaagtttaacttccttttgtcatttctgtattttcatgaaatttcatacataaagtagagcatgcttcattttttttaagggtgtgtttggtttgcattttcattttctgttttcattttctgaaaattgttttcattttcaaaagatttgaattctgaaaacatgtttggtttgatttcttattttttgttttcatgaaataaaaatactgaaaatttatgatatattgacttattgtctttttgtatttttagatttgcttaaaactacattcattgtcaccgccatttcattttaaccgaaatgaggtttctgttctcaactgaaaacactgaaaacgaaaatttattgttttcattttctagttgtttcttgttttcattctcactgaaaatgttttcagaaatcaaaccaaacacattttcatcaccgttttctgttttcagtgaaaatgaaagaaaacaaccaaaccaaacaccccctaatatttcatgagagcttcattattttatgctgaaattaactgttatagtttttaattgctttaaagtttaagcccttattcttcatattataattatactaatatctatttttttcttttcttccatgcttgactaaatcaaggtccatcgaatctattccataat

SEQ ID NO: 23077 - DNA, 892 bp, Glycine max
  Intron number 1 from transcript Glyma08g20220.1 (locus Gly ma08g20220) derived from phytozome v7.0 (chr-ID Gm08; pos 15275309 to 15276200)
ctccttcaagttgatcagtgctacctccactggtttgtttcttatctcttcccattgtttctctctgccatgcttagttgcttacacttttttttttttaagatatttctaacccatcactactcttaaaatataaattaaagaattaagaagtcaaatcaaacatgtttttagaattctaatattttaaaaatgaaaatagcttttaaaaaataaaaataaaaaataaaaacagaaaatgaaaatgtcatcatccggttagaaagtaagcgcattaaatttcaatgagattatttacttttatattttgttaaaattcataaaaattaattatagtaattttttactatacattaaactttcttttccgtaaatttttcactattttaaaaagttataatttttaaatttaatttgatcattttatcctaaatataaattgtttgtttctactcatttatttgagttacatatctttttataagtttaaattgagtttaatttccattcattatcaatgtaaatattttttcttgttgaaaatttatttagatataacttttaaaatgattattattaaatttaatagaattttcatgattggataataatatgaaagaatttatattcttcaattcatttttttgtcttttatttaaatttaaaaatattcatagatatttgtcaattctatgcatatatacaagtttcccatgtaacgttttttttttcttttcatgatcaggacagctttctgtcaatagtttataaattatgtataaaattatttatgcatgtatcactttttaaatattattgtttgctcaaagacactcatcttttttcattttctttttggttttatttgtatgtttttctgtagcaaagggaa

SEQ ID NO: 23078 - DNA, 394 bp, Glycine max
  Intron number 2 from transcript Glyma08g40100.1 (locus Gly ma08g40100) derived from phytozome v7.0 (chr-ID Gm08; pos 39794059 to 39794452)
ggaggaggaaatgtaaggatctctttgtcattcaaataccaaattctcatcgaaatttactaagttttgaatattgtatattgtattcagaacaaatggtatgtgaattgttgtaaactttcttatacctgtcttcgattcatagcgaccaaaaaaaacaaatggagatactttctcatcttcttctccctctcaatttcacattctgctttgtaccttgtacaaccatccaccagttgtatgagcgatcttatttagttacatttaggaaagaaaaataatttttgaaaattagaatggtttttaatcttgttatgtggttcataaatctaatagaggttgaaattttgcttgcataggaagagaaagcaaaagtgattcagactctactgtt

SEQ ID NO: 23079 - DNA, 470 bp, Glycine max
  Intron number 1 from transcript Glyma07g31200.1 (locus Gly ma07g31200) derived from phytozome v7.0 (chr-ID Gm07; pos 36160647 to 36161116)
gaggtaaaaaagcagatactaattaatgtcttctgttttaatatgatgtgaaattttttaacatttggactttggaattgtagataattgtcaaaacaacaaaatttgagtgaatagtgtgcatggcaacagatttatgatcaagcatgtcataagatcatatagtataaaactgtatgtcacatattttattggactggctgcgacatttcacttgagtcattcgaatgtttaaggagaaatccatgtctttatcaacaattaaaataagtaattattaattaacctctagattttcattttcttttaatttttcttaggtggagaaagagagtttattaggtggcagctaatcatagagggtttacaacacttttgatttcattcgctgtttgttaagttgcttatgttctctgctaaggtgacaacatgattttgtgttacaggccctgggtgctcttctgtgggat

SEQ ID NO: 23080 - DNA, 646 bp, Glycine max
  Intron number 1 from transcript Glyma06g02910.1 (locus Gly ma06g02910) derived from phytozome v7.0 (chr-ID Gm06; pos 2023270 to 2023915 reverse strand)
tggttcttccaatccccaactgtccaaccaaccaggtagcttcggctttttttttttccttttgacaattgcaaattcatgttttgagaactgttctttgtttgcggtctcatgggtttccatgaggtgatgattgaagcttttctgttctctgtttggtgtggttattgaaggattaaaatctatatcaataaaaaaaaaatgatgtcatactgatgctttatttttcatattccaattgttttcatttcaaactcattttggattcattttagctctaggaataagaaagactaattgattttagaatttagagttattatatcagtgtgcccattgtcatcttattattgttttgctgtttttattttgctcaaagagttgaatgtaatcttctgctcaaacaccaatagatgatgcatcgactcaaagttcatctcccataaagaatagtagggaaaaattgatccagcttttgttgattatatctattttgaacttgttaatttgtgctttaaatgtcaatttattgtttatttgtaatttgtactagggaaatataatttttgaaagtgaaatgttttgaatttatgtggttcaaccaattccagtttattcaattgaaagagcaaagaacgaaggaaga

SEQ ID NO: 23081 - DNA, 257 bp, Glycine max
  Intron number 1 from transcript Glyma08g05790.1 (locus Gly ma08g05790) derived from phytozome v7.0 (chr-ID Gm08; pos 4120918 to 4121174 reverse strand)
ccaaacttaaagccgcagagaacattctccaccaggcaagtccaaatataacaatgcttcgcattttcttttccctttttttgattaattattattgcattctctaaatccctaaccttaggagttgtaatttaaatttaaatttatagcatgcttcaaattattttagttcttctcgtattaatttgtttttccatcgcaattgcgtaacggatggttcagatcgatcagcaagcggctgaatcgcttcgcaagaa

SEQ ID NO: 23082 - DNA, 718 bp, Glycine max
  Intron number 2 from transcript Glyma07g04570.1 (locus Gly ma07g04570) derived from phytozome v7.0 (chr-ID Gm07; pos 3370473 to 3371190)
aaaaccaaatacacatactactaatactactacatgtaagtcttttatactattcagtcaattagttttccttgtgtcaatgcatgatgtttctagaaccaataagatgcaagaattcactcattgtctgatacacttaaaaacacacttgcttctcactgaaggaagggtgacttaagtcgaaacatatagagaaagacagggagaagacatgtttatatgttcagcatatttacatttttgtttgggagaaagactctctctctctcaaacttcattttcttttttcatagtttccaatcaaactacataaaaaaaataaactttatatcaaaggtgtctcgtatgtggggatattaagaacttgaaaatgttatattggttggtgtgtgtgtgtgtgtatagtgtatatatatatataacaattatttatatctttaagattgaagaataattttagtagttttttaaatgttaaaacttaaaaaagagttaatttatatagtttttttttcttcaacttttgtttgataagcaaaacccactatctgctaacaagttggcaccctagtagttgtaacttgatccgagctaaacttagctaatggtatttacaaactttcagttgaataacattaatcctttccttgggaatcttataataaatattttcctttgctcagatcttgcaaaacaagagcctagagaagaattcagc

SEQ ID NO: 23083 - DNA, 843 bp, Glycine max
  Intron number 1 from transcript Glyma07g27830.1 (locus Gly ma07g27830) derived from phytozome v7.0 (chr-ID Gm07; pos 31358807 to 31359649)
cctgcaaccacatcatacagtttttcaactgtaagtctctgaactgttagttttcatattcattttatctgttcaagtgtttatcaaaacaattgtgttataaagcattaatgttgatatatggagattttcttttttagaaagtaataatgactgacattcagacaatgaggcagagcattgacttgctatttaactttttaaaatgagttatctttccatttcttatatttctataaccacaatacttgagaatgctatttataatataaatgattttcagatctagctatgtagagtattatataagattagttatcaattatcatactatggcatttgatgtctaactgattcaagatttctatgtcatttgacaattgagttatggaatgactttgtactttataaattatttgttccttctcagtagggcatttgatatcgtgttgactcagttgtttattctagattgcagaaattaaagacaaggaatgtccttttaacacaggcatctatgtgttacataataactggttctagtcttctggtgcttgattttggtgaataatgaattatgttacatgtagcactcatgcctaagatgggttttacagatttggtagatgactgagatgaatttctttgatcgttaggcattagccacttaattaattgaaaagagattattccatcaaattcaaatgtccccacaagtgtgtatcctttttcatttttaccttagatcttgctatttttttttaataaaaaaagcttggttgtaattatactgatgataagtgatatctaactttaaatttttttccggataaatagatacgg

SEQ ID NO: 23084 - DNA, 612 bp, Glycine max
  Intron number 1 from transcript Glyma07g08920.1 (locus Gly ma07g08920) derived from phytozome v7.0 (chr-ID Gm07; pos 7456416 to 7457027 reverse strand)
gtttgatttgtaagcaagagacttaagaatgaaacatgagaaataaacggaaggccaagaataatccacatacatgctatagattccaaaagctgacatccaaattcccaattaaaatccatagggaatgggcactatttattcctctttagaaaatcaaataagcttggtccaagcttctcaaagacctgataacaccattaaaatgcattgaaaggaatgtttctgcttagttatcaaatccatgaataaagcccacatggacatatataaaaacaatccactatagctgaacttaacaactcattcattagcaatgtgaaagaggatcaatctcttacccttcctagagagcaagaagtagaacagagaacaaagacatgcacatactgatgaaggaaaaactaaaccatgatttattcaaaaatccaagcatcttgttcattttcataacaagacacaaaattaacccctcccacactacccacgtcaaaaaaagtaataaagcatctccaactcaataccaattttctcaaaaacaacttcttgaatatggtaaatcaagtaaattatatagttgaaaaaaatgctataagccaagctctgtgactc

SEQ ID NO: 23085 - DNA, 854 bp, Glycine max
  Intron number 1 from transcript Glyma08g12860.1 (locus Gly ma08g12860) derived from phytozome v7.0 (chr-ID Gm08; pos 9405350 to 9406203)
gcaccgattctatcatcaggtaaacgttacttcttcttctccttttcttatttatttatttatatatatatatgtgtgttcattattataattttagttattgcacattttattttatttgatttcgtcttgtcacatatccgtgccgttccctcttttcagagatcggctctttaaacaccgttgaatctgaactcgtccttgtaatttacttcgctagtttctgagattagattattagagtgatgttaaaatttctcgagttgttaaatactgtagcattagctacattacaaatgtgcgtaaacgtagactttactgctgtttaatgattataattaagttgattgaagaataaaggtttgttggcacttggcagtgattccagaacaaattaattgactcatttagagaagctgccaatatttatgagctaaagacatattctgtggcgcattcgaatgtttcattgagccaagagttcatggttcagtgttttatgttaaataaataggttccagtcaactaaataatttaagaatcttgacccttgataaactttaagtttaggttaaattgctatcaagtcaaacaaagctgtaggtttagtgttacaaaatgaagttctctaagtggttgagtacttgcattgcatatggaaattaactgctggctttgcctagcatatttatctgtacatgaagatttttagttcattttttaaaatattgatacctcatcatagcctcttggaaaattactctaacatttatgcctgtctgtataatgtaataatgtaagtaattactctgagttggggttgttatccatttattttatttttgcagccagtg

SEQ ID NO: 23086 - DNA, 580 bp, Glycine max
  Intron number 2 from transcript Glyma08g12860.1 (locus Gly ma08g12860) derived from phytozome v7.0 (chr-ID Gm08; pos 9406264 to 9406843)
ctttactgatttcagagatcgagaaactatatcctgtaagtttgattccaataactgaaaatggtatttgattttctttcatttttttgcagttatagacaagatcatcataacaaacttacgtttggtacgcattgtatgactatgtcttaatttagttttaatctcgtttagtttaactaaataaattgactaattaaactgttgcccttgttgattatctaaagttggatgatttcatgtatcttctctggctctggtttgtgtcatgaacagagtaatatcgtcatttcttattcttctttttacttgctttctctatctcctctcttgataatttcattttacatgtgtgtgagactgtatactaatatgtttatttattgatttatttattttcctttctttcttgaaatatcattacatatgtgattatggtgaaagatggtctagctgtaatgccgtactttgtgatgaatctttcttgtttgcatctcagtattggttcattgttgttatgggatttatgggtacaacaaagcttgaatatcaataagatctttgggccaatttctgcagg

SEQ ID NO: 23087 - DNA, 464 bp, Glycine max
  Intron number 1 from transcript Glyma08g04420.1 (locus Gly ma08g04420) derived from phytozome v7.0 (chr-ID Gm08; pos 3111753 to 3112216 reverse strand)
ctcaactgattcttcttcgtctgctgcaaattcaggttactacttctcgttttattcatttcctttttctctgtctataacttttagggtttcagaatatcacctgcactgcactgcacattttcttctgcttcttagcctagtgtttgattctcagatctggtgtttttgcattcttgtttgatttgcgtgctctttacactcttccaagttgctgcttaaggaatggaatgttctagattgttgttattattttattattattatttttttgtttcggaacattctaggcgcattatttggtgccgaacgcggatgatcgtggttttgaaaagttttagtttattactctgtagcttttggagcaatctgatttttcgcttaattgaatttttgtttattttcgtgagtcattgacgtgttattatgctatatatattgtgatgcgtgcaacagaagtagag

SEQ ID NO: 23088 - DNA, 490 bp, Glycine max
  Intron number 1 from transcript Glyma08g28020.1 (locus Gly ma08g28020) derived from phytozome v7.0 (chr-ID Gm08; pos 22267850 to 22268339 reverse strand)
gacccgtctttgagaaaccaattccccccacaaatgtaaaatcttctattcacacaaagatctcacctttttatccaaatttcaagtgttttttttttctttctttgcattgctttggtaaccccctatattctgggggagtgttcgtggttcaaaattttggctttgttctccggaaaatgacaatggttttgtgttgcatttagtgtcattttctgcatagggtctagtcagatgctgtgctttgtttttgttttttctctaagttaatggaaattcactcagcattgaacaacgctgttttttgttcattggcttggatttgtcggttgctacgtttaactgaatttggagtacgatgtagctcctatgtattcggagtcataggctattgagcttttggactttgttttcatctgtgtgcaattttttttcggtttcaaaatttgttgttgttatttgtgctgcagactccctcttatagaaaatt

SEQ ID NO: 23089 - DNA, 598 bp, Glycine max
  Intron number 2 from transcript Glyma07g38180.1 (locus Gly ma07g38180) derived from phytozome v7.0 (chr-ID Gm07; pos 43014439 to 43015036)
ccatatcaagtgatatcaaggtaaaatgtctgcagcttagcattcaaacgcattcatatgctgttatttatttatttattttttgtttagccctgctctcttgaagttagctcagataaaataattgaatatctgattctgattgtcttcatcaggacacatggttacttttgaactcttcctttaatggtagttaagatattaatcatgggactggtttgtttaattgcatcatatttggtttgaactttatagaaaggttaatgttttttttcccatctagacaaacagaaaatgttggatttattttgttgctttgtgtaatttggcctgggtaatatatgctcgaaactgttggctacttccctcgtaaatacctttatttgtttgactttgcaaatggatgataaacttaattctcaaggtaattttgaggctcattggacttagttttctttttggtgccttagtgactgtaatgaagctaatacatgtcattcttagcactggacctttgtcagtgttggtaatttgactcaatatttggtttcatgcacaatgctgtttcttctgacttgatgctgtctgtcatagggca

SEQ ID NO: 23090 - DNA, 973 bp, Glycine max
  Intron number 1 from transcript Glyma08g17640.1 (locus Gly ma08g17640) derived from phytozome v7.0 (chr-ID Gm08; pos 13153721 to 13154693 reverse strand)
aaggctgtatcaagctcaaaacaatcatcagtcaggtatttttagttgattctgattcatccttttcatgattcagctgtgattttgtgtttgatgatgtctttttctgttaattgagtcaaatttgatttgtgcacttacgatcctccatgctgtgttttgatgggggaaggttgaagttaagacccaagtttgataatttgtggattgtataatcatgggagagttgagcaacagtgatctaatatatgggtctgtttgtttagttgaccttgactgtttattcactttttcctccatttgatctttgcatgtggtttgatttgctcaaagaatatcttttaaccttttttttttatggttggtgttgggttttgcttcactacatcctgctatggttctattactagacaatattttgggtgatgcatgttggataaggaattttcagagcaagaagttccagtttataaatccttttcttcttattattatgtaggtagtgtatgtaattagaagaagttaaggaatgaactagggattgaaaggaataagtacaagaacttattttatccaaggaccagagtctactatctgattactaaccatgaaaacaatttagatctatagtatcctcaaccttaagattgttagaaagctgagttttgtgagattgtgttcttcaaacaattataagaggccaattttatttttttttggtgaatcgtgtatggcaggtaaataaaattgctagtggtatatgagatattgaatattatgacaattttcataggttggtgatatattttcttattgattttattgggtataattcttgtgatcttttatcttttatccattcctattatgtagttgtttttatatcttgctacatctcttctaagctaagcagtttctaaatttcatcatgcatatagggtgacatattctgaaggtagtttgatctttgaag

SEQ ID NO: 23091 - DNA, 785 bp, Glycine max
  Intron number 2 from transcript Glyma07g15350.1 (locus Gly ma07g15350) derived from phytozome v7.0 (chr-ID Gm07; pos 15198441 to 15199225 reverse strand)
atcgaatcacaaaagtatttgaaccattactttctttttagcacattttactttgtttactttttctcatatcatttagctcaactgtcttcattgtttacaaatgtctttgctattttagggagagggaacataaacttttccttttccccttttgttagggtttttcagcggtcactttaggataaactatttcttttatacttttaaagagaatatgctaattgtatagtatagctgaggtggttcaagttaaagtgttaaacttgggcttttgatcataagatctagcaaaggaaaaagacccttggggtaaaataacatctcactatttctgtcctggtaaatatgattccttatgaaaacttaagcctttatatctagatatagcacttatcaatgagtttttatcttttatgccattgcatatggtattatggaagaatattaaatggtgcatttggtatagatacaatagcaaagccctggatcaagaatcatcctcaactgattatgtaacatgctagtgcgccaccttgttagcttcattcccaatgattttaggaatgacttaaggaatttgtggtgttttgttgttaaaaacttaaaatcatgtttgaatttgtattctatatcagtcattcatgtaaatgttgttgttgttgttgtagtttataagtttgttcattatgattgtacattctcattgcattgatgtcattatcatttctccttattaaactttttcagaaactgccccattgacttgaaggaagcagtttcaa

SEQ ID NO: 23092 - DNA, 491 bp, Glycine max
  Intron number 1 from transcript Glyma08g12800.1 (locus Gly ma08g12800) derived from phytozome v7.0 (chr-ID Gm08; pos 9368781 to 9369271)
ctggtaactcagctggcacagtcactgcatattatgtgagaaatcctctctgattctgttctaatgttaaatttaattgtttttacatttgatgccgttaatatatttcacgtgagaaattcttgtgtgcactaaaccaaccaacattaaataattatacaaatcttgtgccacaaaaatattctatatttcaaaaagtgatcatgcatcaattgttaattggcttaggcagaagaatccactgtattgtatgtaacttttcagtttaataggtatttcctgttagtttagaaggctttacattgttaatcaatcttttgtatgccttttaaagtaataaagtcaataaacttattaaaaaacagagtttataatcggataataatataaaaaatcaaactatctgtgtatatattattattcataacttctatgttgcttttgattgatcttatgtgtcatggtgcagctatcttctgaagggccaaacc

SEQ ID NO: 23093 - DNA, 676 bp, Glycine max
  Intron number 1 from transcript Glyma07g37320.1 (locus Gly ma07g37320) derived from phytozome v7.0 (chr-ID Gm07; pos 42432552 to 42433227 reverse strand)
ctagtacgtatgtttctcttattgattttgttatgaaattcttgggcttattgtcttatattgcttttggattgataacagcgaaggaagattgttttataattttaaatctttggtcggattttaaatggttgaattagtgtacatgtatcccattgggctacgtgtttgattccatttggatttggaccctttggtcttgctcctttcagatgcaacggtagttgcggtccatggtaggcttcaatggaaatatttttttatgatctgtaaaacttgcaaactttgcatttcaatcatcaaatgcaatgcacaacagttcttctgttctgagtctttctcaattgttttcaatttattaacacatagtattgcatacatcgttattaatggagatgagtcttctgctttgattattgacttattgtctttggtatgaaattcttcactttcagtctttctgtttactaaggtagttgtgcattcctattggaaatgcttatgagtaaagggaagtgaattatttgttcacggaagaagattcttttatctctatctttcttgaatcaatcttgggcataattaatttgttggatgacttgtgagaatcaatgttttgatttccctccctaaataattgttcaggtggcatttctcttgctgttggcgttgagca

SEQ ID NO: 23094 - DNA, 694 bp, Glycine max
  Intron number 4 from transcript Glyma07g36720.1 (locus Gly ma07g36720) derived from phytozome v7.0 (chr-ID Gm07; pos 42043178 to 42043871 reverse strand)
gaactagagtaattcctgtgtgcgtacactgctatctcttgcatacatgtacattgaaaccacaactctaacatcatagtgtctttgttcttttatattcatatttattaataggtttatagaacccaagttaaaattttctccttttattgtttccaactgctctcttaattaggttgattagaacactttgtaaattgggagttagatactttggactttgtaaactctgttacccaaatctggtggccttttgcaaaatgaaagggaatgcacaaataactttacttgaatgagtcagaatggttgcccaaaagaaagggaaaatgttgtttccccaaaacaaaatattatattgactatatgtagctctcaacatactaaaatatatttagttgtatgtcaacagtgattgatcaaagttgaacttttgtaagaaaaagttttgaatgtacttctttttgctgagctctattatgtcaaaagaaagattgaaacacttgtgattagaacattatattcattttggtgggttttttttttttttttttaaaaatgaaatgcattatattgcatttgctgaatgaagaagtattttgattgttgttgatgatattattttgattcaaaaccaatttaaactgaagccaaatgttatggtttttactatgtaggtttgtgctatcgctagctg

SEQ ID NO: 23095 - DNA, 943 bp, Glycine max
  Intron number 3 from transcript Glyma06g03020.1 (locus Gly ma06g03020) derived from phytozome v7.0 (chr-ID Gm06; pos 2102589 to 2103531 reverse strand)
gaggccggttttcttcttgttctttgcagcaccgagtgtggcaagcttggcttcagaattcatggttggcacctttgatactgcttccaagatgctcttctttctctccctagtcctcttcacatcactggtaatcatttatttctctatctttgcatttacttattcaaaaaggatagtcctgtattaattactcccttaatatgtaattgatattgacaaaataaattataatggtatggagagagtatatatattgtttattatttggaatatttttttttagtatgggatgatttcttttctaataactaaaagtttatatgaattgacttccatggatttattatgattagaacgaacttataagactcaaaaaatgtttatttatatattatctattaataaaattctcatattaactgcaaaaattaaatacacatattttattatctaattatgccactattattataagacaaacgaaatatgtatattgatagcatacaagtttttgtcttatcatctaattaaatatcatatataataaatttaatttttttaattcaattatattgaaagtcatattactattttattagtttacaatcaaattattttacatcatcaatacatcaatattttactaattttagtaaagtttaatttcaattacattattactaccatttttatatttttaatcaattaaaaataattttaaatataatttttaaaatagtataaaaataaattgtacttacataataattttttattaaatgattattatataaaaaatcttatagtttaccctgttattatattttagttcatttttttctaaaatactttatctaattttaatgtattggtattttttatcactaaattttagttgttaacttttattagaatgttaattgaatgattcaaactcaag

SEQ ID NO: 23096 - DNA, 974 bp, Glycine max
  Intron number 1 from transcript Glyma06g23080.1 (locus Gly ma06g23080) derived from phytozome v7.0 (chr-ID Gm06; pos 20113588 to 20114561 reverse strand)
gtcttggctcccaaactcgttggcgtcgacgttaggtaacggactttcttccttccttcatctgtttcttggttaactaattaatgccgttgaccattttccccctgcgaacacttcttgtttgttgcgcgttgctgttgttgttgaacgtaaaaggaatgaagggtaggttgggagaaataacggggaacgttatgtttgtataattagaaggtttcgtctgagtgtttggaagagaagaagagagaagggtgattttgcgattatgttgagaaaatgttataaagtgttgagaataaggaatgaaagctattgttcagtgtcttttgttgtcaccacatacgtctgattattgttcagtaaaattgatttttcttacaaactttcggtttgattaaatgtcgtaaaaatagcttttttgcattaagttgaaaaaattacagtaagtattgcatcagctgtgcaaaaaaaaaaaaatgcagtaagtattgcatcaaactttgtttcagggtaacaacattcaagcataagttgctttacttcaaaattaattttgcaaatgcatcgaatagtatcatttccaataagattcttttttatcaattctattttttttattttttttttgcaaatgcttgtcgaaacacacactcaactatacatgtagtatatcaaaagcttaggatttgtactgatgcagtagaaagtagaaacagctttgaataaaatttatgtgaaatattatgatatggagttagctgaagtttttctgagctaggtgtatgtagcttgctatacactgtgagttggacaccactttttgagtgttgtgcttggcactttgaaaggaagaaaagaaatagaaacttgttttatatttacatatactcttaacaaagatattgggttctgtttttgaagttttgggcagtacggctgatatttacggctgtgtttgtcaaggaatcaagctg

SEQ ID NO: 23097 - DNA, 610 bp, Glycine max
  Intron number 1 from transcript Glyma06g12800.1 (locus Gly ma06g12800) derived from phytozome v7.0 (chr-ID Gm06; pos 9992880 to 9993489 reverse strand)
gaggttggtagttgataaccttgctcatgtttaattgtatcaagtttctactttctaaagctgtcataattgctccatcatccctttctaagttgttgtgagagtttttagtattcatgaatcctaattatgtgtggttaaggattgaagtcaaccttcatctttgtttcttccaattttcttcattcatatccttcaatttcaatacattgtcatcatctctagcttgttttctttcctattcctgcttatttttaagttactttgtctcattttttttttcatattcatgtttttaaaagcataggtggttgtcatttatctttccttgtccctaccaattcaggttgtgttgtcttactcagaaaatcctgtttgctctggatcaaaactttaaaataactctggttttcctctagtgcttgcttttgaaagatgcttacagttacaactaataactaataagaaatattgcaacttttcttaaaaaattataatggctacatcaatcaaatatattataaaggtctacacttgttgcaattattttactaaaacttgtcgaagtcctttaactcagagcaagtaccattgtgttttcaggcccggg

SEQ ID NO: 23098 - DNA, 489 bp, Glycine max
  Intron number 3 from transcript Glyma08g22840.1 (locus Gly ma08g22840) derived from phytozome v7.0 (chr-ID Gm08; pos 17319719 to 17320207)
tctcaggttatcatgccatctatgtaatatacttctattttgtacacaacatgggtaaagataaacagaaaatttaaaaaggacatgagagaaagagtcataatctaaacatgatcctccgaggtgaataaatgattttgactgtttgatatatataagccaattctcaaaacccttaaactcatgagtagccaataatgatctatatgttgttaatgctaactagtaagtagtaactattactagaacgcctacctatctgcttaagtaactcattactcatgcaatgtgagaagtacttattgttcccttatttattcagatcatcagcaggctaaaatatgtttctctaatgggttcttgaacattctttgctctggattttatattgtcattttacctttattacatatttttcagtatgtaatgattaatactattaaatggttattatttattttaatttccctcctcttaaacagttgtcgg

SEQ ID NO: 23099 - DNA, 806 bp, Glycine max
  Intron number 2 from transcript Glyma06g07720.1 (locus Gly ma06g07720) derived from phytozome v7.0 (chr-ID Gm06; pos 5650371 to 5651176 reverse strand)
cttgaccatcttaaggtgatcttttatttatttttcaaggttttatactatctataacttttgtgcctttatgcagtagtatgttttgtttgtttaggctgtgtacatgttgaattgaatcactggatatggtatgaaccgtatgatgctgatgagtgcaaaccccctatttgttttaatacttttttttttctccctaaagattgtgatcttctggttgcattgcatggaagcaaagattttcattttatgtttgctaaaccctacaaagtgattaatttgagattgccaaaggcaaagtttaaattatggaattctgttttccctctaaatttgtgaatgaccattctttatatttcatgtcttcctgcttcctttgttttagtgtttagtcttcttttcgtggaaatgccttttgtctgctctaatgcataatactgtccattttttgtgtggtctttggtcttttcatgcatgtcactgcttggaacctgatgcaagggaagattcgttatgttctctgatatatatgcaaatgataatcaaaagttaaaatgttagaaatacttcctagctagaattccttacctattaatgtaggggaaatctgtttcctgatataatgaattgctagagttacaatatatcgtcaaacaccagcataggagcaagtacttttggagtcttggtcatttcacaacagcattaaggaattattcaatttatgtgtaatgtgcacaacactattaacattttatgttgtactttctgactggtaactgtttttaccttacagtttgattgtg

SEQ ID NO: 23100 - DNA, 999 bp, Glycine max
  Intron number 1 from transcript Glyma07g36000.1 (locus Gly ma07g36000) derived from phytozome v7.0 (chr-ID Gm07; pos 41375690 to 41376688 reverse strand)
cacagattttggtctatccgtctttttcaaagaaggtttcccttaattctatttcatatattctctattattttttctcttttccacatctttttttttttcaataatttttccaacgagtgagctcattttccacccaagagcaaacactttaattagtggtgcagttagtacccgttaatttgtttcagttttttaaaatgattttaaaactacacaaaaacataatttatttgagactttttcgtaaatttcgtacttattattgttatatatagctccatataatttttttgaattctaaattttatagaataatttgtcaaaacatgtgtaaaagtaatttttagagacaaaatagatttttctgtattctatttcctctctctctttttttacctttttttaatcactattttcaacattaattctaataaaagagttcacttttgcaaagtacctttttatgttgtgctgcaaaattatttagtacccatttgtttttttaaaattttttttaataaaaatgattttaaaattacacaaaaatataattttatttgatatttttttataaattgatcattattatagctcctaaaaataatttaatatctactttttaattttaatttgaaaaacaattattgaaacatgatagcatatttcaaaagtactttaatttattttagagaaaaatatatttttttaggaaaaaggattattaaccaaaacgcactcttaattagcatgggacttgttttcaaattttcatttaaagagatttatcttaaaacattagaatcttggtgatcaaaaagtacctacgtttaaccttttgtgatggaaaaaaatattaatatatatgcttgcaaaaggaaaatgttaggaattaatgtaaagaatcttgattcttcatatgcaacatgaagcgggttttaataacatatttatgctttaacaggggagacattcaaagacattgttggaagtgcatat

SEQ ID NO: 23101 - DNA, 419 bp, Glycine max
  Intron number 1 from transcript Glyma06g20970.1 (locus Gly ma06g20970) derived from phytozome v7.0 (chr-ID Gm06; pos 17372004 to 17372422 reverse strand)
ggtgagtaacacttcattcatgccacacattttgtaattattacaaaacaagaaacaatttttttcacattttctattttatgtcatttttaaaaataaataatgagtttaatagtgacaaaacataaagcaatattgatttgactttttaaataataattataaaaattaataaacttattatatataatacattaattgtcactggatagcttattttctcttaatataatatatgtagaaagagtgtaaattaatgttttttttgttattatctaattacaaataatttatattatcatctatgttatactcctaattaataaccctcttaagaaattaaaagcagataatttttatgaagaaatacctcaccataatttctagtataaacttatgtgctttgttgcaggtggagc

SEQ ID NO: 23102 - DNA, 729 bp, Glycine max
  Intron number 2 from transcript Glyma08g22420.1 (locus Gly ma08g22420) derived from phytozome v7.0 (chr-ID Gm08; pos 17058577 to 17059305)
gtttgaggtatggatggcattctctttaatattgttatatgcctaattcacctatgaggcatatattgtacttttttctgttgtggatcctttcatagcttgtgtcttctcttcctcctctaccttatgagttatctcctagttgttactttttcttcaccaaaaccttctttgtgtttttcttttttatctgctgttcaagagttgaggtaagtatgggcagtatttctgacaagaacactattcaaatacatcagaggggtgcagacttgtgttttcctgatgtgttgtatgctttcagtgtggtgttttctttcagttgagatactaaatggaataaattctgttggaaaaagtcgctatatttaattgttggaagtttgctttggaagagtatataccagactctcaattaggggaccacgagatcatttgttttcttttctaaaatgagcaacttgacatgacttttgacagaagaatatttaatgactagaaaaactagcacattctagaattgttctttgaacagtgtgtttagtgttgtcacagaaaataccattcagtttgatcattttaatctatggatttttatctagtaaatctgtgttatcctaattgacgtttgcattcatctctgattgtaattaatgagacaagcataataaaaatattgagcttggttttgttgcagctcttatcagctgctggaatctcttccacttccaa

SEQ ID NO: 23103 - DNA, 985 bp, Glycine max
  Intron number 4 from transcript Glyma06g10210.1 (locus Gly ma06g10210) derived from phytozome v7.0 (chr-ID Gm06; pos 7700527 to 7701511)
gcacaatcgtaggttggtatagttagcttgaagtttacttattcaaagggacattctggcaccttttcggtatggctttgctcattttattgcctgagttacataaatatgttttttcagaacttgtgaatcgaccatagactgttttccttgtgtgtgcatgtgtctctgaaagggcatgaaattgcaatgttagaaatgatgttctgttgttgtattgcgcatcttgctgacatatttgtagtcaagattgatttgtctacttatgtttgttttattattatgttattttcttgaaataagcattgccatctatcaaccttacatatttaaatgttttcaatgtgaatcttggaggtgtacctttggtatctatgcttgatcaattgtggtcgagaatggtggtttgatttcatgtttacacccatctcgttgtttggcaaatatttgtttcagtattgccaataataatcaattagcttctactttgaagcattctacatgattctcatatggataaacaaactaaaagtatattattgcatgtactttaaaaatgacacccttttggtgcttgatatggttacatgccatgttctatcgaaatataaacattcccatttcccacatcttaaatgatcatgatacatgatgcaatgacttttatcatttgaacatgagagatatttttatgttgttgtaaaaagtttgtgtaactgtatgcaccaggtagtaatactacccttcattagaatagtgggaaaccctttttttctttttggttttccttcagtgtttctttttgggtgggttcaaaccaacaccattctttaggactttgtttcattgggtaaaatgtgactcttcatgatttattaatctaaagcaaaaggccaagaaaggcggattaactaattttattaatacatattgtattgcgaatttttcagtgtgcttttgtctaatttgctgaaaagaaaggctg

SEQ ID NO: 23104 - DNA, 1027 bp, Glycine max
  Intron number 3 from transcript Glyma06g12390.2 (locus Gly ma06g12390) derived from phytozome v7.0 (chr-ID Gm06; pos 9575802 to 9576828)
tcaaaaaaattccaatactacgaaagcttcttaaggtgcttagatgggaaattactcataatttagttgtttgtcatattccttttgtcccaagaggttatatgtgtgtgtgtgtgtgttttaaattacttcatgtcattgaatcataagatgtgtatttttacatctaaaggagtatgtgttctttccttatgatactaaaatggggaaggcttgttgagcagtcggaaactatatttatcatgacatgctattattgttcttgctgaacaataaaaacccttaggtagtgtttggatacagaatttcagaattcttaaggaatttaaataaaatgcatgcaaaagaggtgcggaagaatgggagaggaacagatagaggtgcagaagggagagaggtgctgcaaagatatagtgcacaccaaagtttctgagtgaggctgtcgaagcatgaaggaatttttaaattcttttttttaggcattatttgaaatcttttcattttacttgaaaaatcccctgtaaagtttccatcattttgaaatttcttttgttttgatatccaaaatgtcattttgatatatggtattttaaatccacttcaaaattgaattcctcttaaaacctcatatcgaaagacttaattttgcgttgaattctatgtgttatatgattgctatggtgctgtttgttctattcatctaaaacgtaaaaatatattttgaaacttttgtccaatggccatattttggcatttgcatgatgataaaatattttattccccttcatcttgatgtttgtcaatttctctaatcatttagtttcaatgttagaatgtagggaaggttcaatcctgttattattgattatattattcaataagttgatagatggtagatcccaatcttttctttgctgttctcctttctgcattctctcattctgagtatcaagaaagtatatgacccttggctgatcaactttcttttgcaggtcttggagttcctagaagcaggcaagattttgac

SEQ ID NO: 23105 - DNA, 890 bp, Glycine max
  Intron number 1 from transcript Glyma05g36540.2 (locus Gly ma05g36540) derived from phytozome v7.0 (chr-ID Gm05; pos 40377476 to 40378365)
agctcgctttcttaactagagccctctccgttgaggtacgcgtatccgcgtcttcttaacttttttagtttctcaactttttcagattttagggtttgttcaggttttcactgttttcgctcttttttcctaagatcagtgaggagttcgtgaatattcgcttgagatttgactgcgaagctggttttagaggtttcggagtttctatttattgcttttgttattatttttttccaattctagcgttcgtttgttgtgtcttgtggttgtttcggtctcactgtgtgttcttttgacgaattctctttcaattttgcttgcttttgtgtttgatgtgggaggcatgtgtagctagtagagtttgtggcttctaatcgatgatttttggttaattgttgctaattttttaattgttctcatggaaagtggttgtgtttcagagaagttttggtatgcgttgatttgcacaagggattgctcgtgaatctggtctttgagggtttactgttggaatttgtttatatagatcgttttatgcgtgtttaattgtttttttccccttttttcaacagcttgtgtcatatgcatttgattctaagttttgaaagaactaacggtgttggataccggaggtgttttttatttggtgacgttaactagagcagcttttgcatgtttttcttttgtcataaatccggattgtaattggagtatctttagtgttttttattttccactggtttcagcaattggtaatgagacaaatgcataccatgaatgttacttttgttgctgtaattgaaatttttattatgttgaaatgctaaattattttgcggtttattttggttctagggtttctccaggtgtggtttgatttacagtttctg

SEQ ID NO: 23106 - DNA, 740 bp, Glycine max
  Intron number 1 from transcript Glyma05g24790.1 (locus Gly ma05g24790) derived from phytozome v7.0 (chr-ID Gm05; pos 30994672 to 30995411 reverse strand)
tgacttagtgatcaaggtttctggcaacgcagaaggtgacgttttgtgcttacttggtgcttcaatttattacttttgttttattttattttcctgtttgtgttcttttttgaattgttgactttagctgtagtgtttctggctcatatgtttgaatgagtgataaaactggagaaggagttagtaataggcttttatgttggagacttggaatagctagcttttgaaatattaattcaccttgttatatgcctttgtctgtaatatttttgttaatagaaatagaatgctaccttatcaaagaaagtgaagatttatgagctacatatggagaatcaaattgggcaagatgaaccaatttggttttctaccaaaatccttgtgtttgatgaggttatggtgaactaacggtgagatctaacactgttatagtggatgacagggtatgcaatatgaaaaacaaattaggagattaaattgaactgaaaaaagttaaggacgaaattgaaaacaatctttaaattagaggactaaaatgctaattttaaaatgtttaaagttatgcttggggagttcttgaggaacttggacttcgtgtttttactttctgtatttcacacaatttcattagagcaacataattttttatacctgtttgatttttttactcctatcagtttaaaatatgttaaggatgtttttaattgtacttgaatataatattacttctatgacaggtg

SEQ ID NO: 23107 - DNA, 919 bp, Glycine max
  Intron number 1 from transcript Glyma08g36810.1 (locus Gly ma08g36810) derived from phytozome v7.0 (chr-ID Gm08; pos 35144996 to 35145914)
attctagtggttctctttctctatcgccgttgcaggtactcctattttgacttttttccccatactatggctgcaatttgaagcaaaagggttttcttcatggtgaggattttgattttggatttgatctacgatgaaatgaattttgagtaaattgtgcaagttgtagtgtgttgggttgtgtgatgtgtgttttgatggggcgtttgtaaatggggttcatttgttggtaagatgaagttgtttctgaagatatgtttgtgttaatgttcttataaccaattaattgttcagtaattacattgtatgtaattacatttagttaatttagttaatcagtgtcaattatttgtagtatcgtgtcaaaattatcctttttgtgcacttaattacttttgattaatgttttaatgtttggagagagaataattaagtaatataagaaaaaataattaatttatctagaaattagaaaaatgtcttataaaaaggaacctatgaagcaccgacacggacactggacacgacacagacacatggacacctgtaatgtccaaaatatagaatgtagtacgggtgttgtgtcggtgtcggacactgacacggacgcgtgtcggacaccggacacggggctggggtgtccgtgcttcatagaaaggaacaaacaaatttctgaaaaggatcaagcttgttggacttgttaaaacaataaatgaatacattaatttggatttgttttatatatactttttaaaattgcctgatctgatatacaagctttttcggaggtcaatttttagcctttacgagtttagaattgaggcaaggatgtgattgtcaatgaagtgatcttctaaggtctctcttataatatgtaatttgttttatcaatttatactcttttcatataaactgcaga

SEQ ID NO: 23108 - DNA, 682 bp, Glycine max
  Intron number 1 from transcript Glyma06g14620.1 (locus Gly ma06g14620) derived from phytozome v7.0 (chr-ID Gm06; pos 11460964 to 11461645)
tccttgccctttcatctgctatcgttgcttttactgtaagttaacttctttcacatgctctaggctacctcaattattgttattgttcaatacaaactgaagggggcgttggtagggaataagttttttaatgcccaggaataagttttttgcaaaccagtaaaatctgtttgattgaccatcgaaaatatttagactagtttcttaggaattgaagagttactagatatttttatcagttattttaattatttatcacatcacattaatgagagtaacatgataattttatcgtagtaaaagaaaaatttaactcacgaagtaagattcacaactccccatggaaaattttgtaggaaacttgttaaaaaatgttccctgaaaacattgtttcccagaaatcttattttcttaaaatggatatcaaacatgggaaactaagattcccagaaaactcaaaacttctcccctaccaaatgcctccctagagttaagagtataaatagcagcttaatctgcattttgatgaataatgcattgctcatttgagattgaaagtgctgctgctggtggaacttgtgatgaatgaatgaatgaatggtgtatgggatggagcattgtctaattatatgtgttgtgtcttttagggcttgtatattcgcacgaggctcacaatcaaccc

SEQ ID NO: 23109 - DNA, 442 bp, Glycine max
  Intron number 3 from transcript Glyma05g23330.1 (locus Gly ma05g23330) derived from phytozome v7.0 (chr-ID Gm05; pos 29012684 to 29013125 reverse strand)
ttgccctctctgcccttattccagacctcaaaaaggttcaatttctttctttttttctaaactattattcttctctgacaatcttattcgaagtatatgtgatatttctcctaataaaagtttaaaatttaaattttgattcatcatgttcttcttagagtgtaactaacccctttcgctaagcacgttcaatcttttttcactgaaatagctattttaatgtttcctaagttgaaattatgttgcttaaacatttaatttaagtttgactattgtaaatgaaaaaaaatattaagaaaaaatatctcattaaataatattaattagattttgtaatagaaattaattatccgcaaaaatctaatgaatatttcataccagacgaaaaaacattcaaatctacatttgtaaacaataccaaggaatggtaaattttttgcag

SEQ ID NO: 23110 - DNA, 963 bp, Glycine max
  Intron number 1 from transcript Glyma06g34340.1 (locus Gly ma06g34340) derived from phytozome v7.0 (chr-ID Gm06; pos 35785409 to 35786371 reverse strand)
catttcgtgcatttttggtacatttttattttattttatccgtcaatattaattgttagcttttgttagagaattagggggaggatttgaaccagcggcttctctcctccttctccctttaactcttaaacaccctttccaaccaccaagccaaaccttataaactcacgacctcttcccccccttctcccttcaactcttaaatcccttcccaactactaaactaaacctaataactctttctgatacattttttttttatttccttccttctccctttattactaagtcaattttatatcttctgcatttctagtacatttctgtcacatttttcattttagcttctgaatataatgttatatttagtattacattaatagggagtaaacagatagaggttagaatttttttaaggaaagcaaagcaaaagtcaaaattcacaatatctctctctgatgtctcaaaacccttccccacattttgctcccattacatcattatttccattaccttgaactactgaataatttgcatgtaatcggatatatgtggctgctaaattcataattaatcaattttctttttttattttaccaaaaagcaatataatgacattgaattccttatcagacagttctgtattcctttgtttctggtaaaagttttctattcttttttgttggtacaatgtgtacaacaaacattctcatgatgactattgaaatgaatcaaatctgcacagtactattctgaccctgttccaattttttattttttttcaattgtggtgggaaaaacaatgaatcaacaattggcaccatcttatgagcacttttttttttctcccatctgattttcaaattcatgtattcttatttgatctttttgactaaatcttattaagctctcttctttgtctaagcaggcaagaagaacattgcaccatctaagaggagcagt

SEQ ID NO: 23111 - DNA, 691 bp, Glycine max
  Intron number 3 from transcript Glyma08g01040.1 (locus Gly ma08g01040) derived from phytozome v7.0 (chr-ID Gm08; pos 589259 to 589949 reverse strand)
accattacccacaaggtgaggacagatcactccattatttgttcaaaatacagtagttctgtatgctgttttggtttactctctaatgccctcattaatgccccaagatttctatctaacaaaataatgtaccaaataccaattattattgaaacatcgaatggactattcagaatttggttcacaaattggttagtcactttgtttattttaggattatttttctgtttgtgtatattttatactttacaggatacactggctctcaattctgaaatgtggtaatacatttctgttttagcgcttttcagccaatatttcttttccttctgttttggacttcttgtaaatgtttgggtgcacacaggacaagtgattgtcaatgttatttcctaaaagtaatgttatttctgttgatggtgattcgttgaatatacttgagcattttaggacattttagtcgattttcttctcaccttttgcttacaacaaatatataaatgtttggttgctcctgaatctgatataatgattatcagttatcaatcaatatagtcaagtacttggaatgagtgattgatgtcaaaccatttttatacatctatatcaattactatattactttatctgcaaaacatgttactaattgctggataagtaagctgtgctattttgattttatcaggaaaca

SEQ ID NO: 23112 - DNA, 638 bp, Glycine max; identical to SEQ ID NO: 22390
  Intron number 3 from transcript Glyma06g13810.2 (locus Gly ma06g13810) derived from phytozome v7.0 (chr-ID Gm06; pos 10920337 to 10920974 reverse strand)

SEQ ID NO: 23113 - DNA, 859 bp, Glycine max
  Intron number 3 from transcript Glyma06g07950.1 (locus Gly ma06g07950) derived from phytozome v7.0 (chr-ID Gm06; pos 5862575 to 5863433)
attttgttagtacaattggccacttgagaggtggaagtggttttcgcaggtgggtagtacatttccatcctttgttctttcttttcttttcagttttgacatttctattgatattctgatgagtttttaaggctaaaactgagtttatatgaagctaacaaacatcccaagaaatcgatttttctctgattccatgttgaacatcacccatcaccctgatatgtctacccgtctttagccacctagaatcaaattctttatatttagacatttgaatgttaataatctaatttaacatcttgactcttgaggggatatgtcattatcattactgcaaaggatatattatctatacatacctcctccaaggcatactaactggaaaagaaatcataatctctatcatttattaactattagcaatctggtatatgttgttacttgttatatatgtgcattttttcagaatacccttttttgttattcaatacattatgttcttcctgttgtattttcagataatggtgagctatttttactgtcttttctttttggacgtttatcttagaagctagccatatagaatggctaattttctcatagcctttaagaatgagatttaaactgaatttaagtgattgaacagtatcatttttccagaattcaatgtgatttggcaatcaatattgagatttgagagtgactgtgtttgaatagacttaccagggggatttagtgtgttgtttggtttttttaatcataacgccaagtttgttgtgctcatgtaaaagtaatatattatattttaatactttaagttgtcctatttgcagatcgcggagacgtcattctcgctcca

SEQ ID NO: 23114 - DNA, 862 bp, Glycine max
  Intron number 1 from transcript Glyma07g18230.1 (locus Gly ma07g18230) derived from phytozome v7.0 (chr-ID Gm07; pos 17988544 to 17989405 reverse strand)
ggggtgctattctagctaacttgtacgctaggaaggtgtttttctttatcctaattcatcattttatgtatggtcatttaatttgattctatataccagagtttcatcatagttttgcttcctcaacagcctgaaactcttagcagagttttctttgaatatacaccacaattttatttcttttgaaaggaatcgcaccacaaatggtcatttctacacctcaaaattaattagcgatgattaagcatatcttgatgcacacaaaaagattagtaacacttatgcatacataaaacagtgaaaacatttaattactatgataaggatgtgatactcgctttatatatatatatatatataacacttccacgtttttttcattatattgcttattatataaatcatttttatgttttttttcttttttccttattttccacctattttatcctaatatttcacccctaaatggtgtggataaatatcaatatttatttttctttttgttaataatataatagatcaaatatatattttttgtcttcttatttctgttttttttttcttctttttattacattactcatttacatgagtcactttctctctcaatccttttttctttcttcctgtttttctcctatatatatctaactccaatgttccacctaaggatgaataatatcattacttctttttttttaaaataatgatagatcaaattcaattttttaatttagtgtatattccagtatatactttttttgtcaattttcatggatgaatgaacctaaattatataatgtttaatatatatgataacataggcggacatcatcttaagaggatactctggttggaa

SEQ ID NO: 23115 - DNA, 552 bp, Glycine max
  Intron number 2 from transcript Glyma08g07690.1 (locus Gly ma08g07690) derived from phytozome v7.0 (chr-ID Gm08; pos 5524565 to 5525116)
agtttctaagggttctctctgatatctacttcaaggtatgtgctactgctatgtttaataagaattgtttcttcaatttgatattcatagtaattatataaacatgtgtatttctacttgattaagctaagttcgaagtataatcattagtattcctaattaagacaaaacttagattcagaactagagttttactatagaaattcaaggttcacattaaaattagcataagttactataaggagaagctctaattttgagtaggaaaaagacataaaaaatactcaaagattttgtcctttatattaatgttggattgtaatttgtaaaccaatttgactgaaaaaagaactataaaaattataacaatctgatttttttgaatgcacatgtgattgtagaagagtatttttggccccttatggaaacgaatttctttcgaagtaacttaacaatctgattcactaattcaatgttgaccacttgcttcaaattatagaagaactttttgagtaatggtttgttttgaattcttatatttttaggaacggt

SEQ ID NO: 23116 - DNA, 755 bp, Glycine max
  Intron number 2 from transcript Glyma05g10050.1 (locus Gly ma05g10050) derived from phytozome v7.0 (chr-ID Gm05; pos 9996218 to 9996972)
caaaatctgcagagtgtataaagcagttagagcaggttggttgtccattacttgctttttaccactatctaattggcagctgtgtaagatgtacaaactgtgtagagtgttgtgtgtcatgtgttttttttgttatcacagtacatatcatatttgttaataggactttgtgggatttcactacagaaatctgtgtggcaaatagtcaatttctttggaatagtaattctctttccaattctgaatgagaacacattttcagtcgctttgaattctcttattatataagaaaactgggaactgatggctgcatgattaagaacatcttataattctgctcagcaaatttgcttctgaaatgttttatcatgaaacttctaataactaatgcagctgctttataattgtatttgtaattaaaattattttcttgttgaacagttaagacactcagttcagattgactagtctattaatttacctttatttttttgttctatgccttggctgatatcatatattttggagtgatgctcctaaatttcgtttctgtccattataattgaatacttgatgaggttatctctatttttaatggcttggctatatatatatatatatatatgtatgtatatattttatccttccccaataattttgaagatatgttatttcttatatcttctttatccttcttattaatttattctttttctccaggaaattaaagttcttagcaatctaaaacattcaaa

SEQ ID NO: 23117 - DNA, 594 bp, Glycine max
  Intron number 3 from transcript Glyma05g34310.1 (locus Gly ma05g34310) derived from phytozome v7.0 (chr-ID Gm05; pos 38688355 to 38688948)
gaagagcgcattaaagcaactgcagggtatgtcctcatgaattccttttggcttgccaagtttgttttcacaaatatttttgtggcttttgtctcgtggctcatatgagtggtggttaaaatcctaggtgcattaatgatgcatttcaaaaagcaccattgggtaattgcatgtcttttttattttatctaaaataagggtaataataagtctaaggaagacttgacctgttctcgagttccaagtctcaatggataaccccgatagttgctccagcatgacaagtcaataaatgataaaagacagactccactctggcagtcaggctattatgtccattacttcttcattgcctgcacttaagataaaagatgtgacaaccacttctgtttcatttccattgtagtagttatttttgtgctaccagtcttttgttcttgacttttctgatttgtagtttgaattccgaaattgctttctatggaaaacctggaggatgagtctgtgactttggttcaatctaatggctttatgtttcccggaaaattctttatgccatcatgtgttcaataaacattttaattggaaacagat

SEQ ID NO: 23118 - DNA, 724 bp, Glycine max
  Intron number 1 from transcript Glyma06g08900.1 (locus Gly ma06g08900) derived from phytozome v7.0 (chr-ID Gm06; pos 6495016 to 6495739 reverse strand)
tgaagagtccaattttacagttgaacttacttacagtgagtttcagacttgaatgccactcctttctgcataatcggtatgcgtatgctttcaacttatcacaaaatgccttctcatcatacttgctatttcatggagattgcagattatggagtggataactatgatattggaagtggctttggtcattttggtgttgcagttgaagatttaagccatttttttaaaacataataattcattattgtgtacaactggaactacatatatgcaatgcaaaggacagaaactgtttgattttcattaatgcattctgggttttgttttacttcaatatgtatatgcaactgttattttaaatttttaaataccaaaaaaaacttgtattttttggttgcacttgttgaatgactgtcaagcatttatcttgaattaatgaagtcgttagttaaggtgagttgttaaaattctttttttatggtcacagaaaaaaattcctatatgaaattaggaatttaacaactaaatggcagttaagagcgacttttagcacaaaatctccatttcttggtgttcagtgttcatctatatgctgtatgatttttctgagacaattaagattattatggttttgtactgcaacttcgtagatttacaagagaatatatctaataaaggaaaaaggagggaaggttaattacaagggaaccagggcctgttaaag

SEQ ID NO: 23119 - DNA, 963 bp, Glycine max
  Intron number 1 from transcript Glyma08g08130.1 (locus Gly ma08g08130) derived from phytozome v7.0 (chr-ID Gm08; pos 5812982 to 5813944)
atcagcttttgtagttcacactctagttgcttctggtgtgcttcctaccctgaatgttttatatactcaactcttgttccatgctctctagttttcataagcaagtttggtgaattgtgattgcttcctgtatgatccaaatacttggatttttgaacttttctacgcttcgtttattacttaatgagtttttctggttttatggtcagagagatgttgctcttgcttgtaaattgtagttcattgtgtttgtgcctattcttctttacttatagttgtgaatttttgttctttcatttgactatttgagtatattatctccgaaacagagcatttcatcatgttactttggttttggcttgagatatgctgaattagttccttttctggtaaatctgtttttattttcttctgctttggaatcaagccttctgagcttacttccttttttggtaaatgcttttttttttcgtggaggatatttaaatgaaagttggttgagattgtaagacatgaaagggcttataatacgacacataaaattaatataaaacacaaatcttaaattaaaagttagaattattgttttaaaagtaagtatgagctattacagattgagggtgtgtggcgcatggatacagttgttgccttttgacaaaacagcctctttgatttgatagcgggaaaagcttaaaaaataataaagtgaaatgaatactattcaatgcaattagaaatgtctaacatggatatgtgtagaccaacatgtatagcagttcgtgctttttggttagacttgtttcatttcttttttttagaatggcgatttccagaaaaatgtttgataaagagtgataattgagttttatgttcatagtttattttgtttgcacttagatttttctatttgttgataattcccttgtgtgttctgtctgtcattcttgtgctgcaaatagcaaa

SEQ ID NO: 23120 - DNA, 617 bp, Glycine max
  Intron number 1 from transcript Glyma06g22250.2 (locus Gly ma06g22250) derived from phytozome v7.0 (chr-ID Gm06; pos 19048725 to 19049341 reverse strand)
ggctcgccgcatcagccagaagaggcttccttctggtattcaccatagtatgaacatgttcaattttactaattcagttgtgttttctgtctctaatttttcctccttgacaatctctgaaatgattttacatttgagccgttgacttttagagatgattttgattactgatggatttatcacattgatgccaaattgccaatcttgtatcagtgttagttggatatagtttactttttatttttttttattaattagcatctgactggttattcaaggtcttcagagtttggaaaggagaggggggggggggggtaggatgtgttgcttttttttttcttttcaatttttctctgtattcaataaaagtataaggtgtggataagatgcttgtgagaaactatttaaagagatttcatttcttgttttttattgtaagttcaatctgaatcatttttgttgttgtatacggtgatcctctctgtgaaatggtcagttcatgtcatttgcatcaccattgttggttcttggtcatatgtttcagtttcattagagttgagtatttgccaacttgcatctaatgcttaagttttccttaggtaattcgcccttcagtg

SEQ ID NO: 23121 - DNA, 992 bp, Glycine max
  Intron number 1 from transcript Glyma06g44270.3 (locus Gly ma06g44270) derived from phytozome v7.0 (chr-ID Gm06; pos 47205551 to 47206542)
ccccatacatatcctaacccacttcgttgattacggtaagtcctaattgatctgaagctattaacaattaaacatgtattagttgaatagttaagttcatcttcgttggttgccatcgaaacccaacactgaatcaaggtcttaatattaataataattgtttttgtgaatgccatgacccgtaaatgctactattatataattcgactcacattctacgtggcaaggtttgttcttagcaattcctctgtgttctcaaaggccgttttttttagtgtgtgtgtttcacttttatttccttttcggttccaatctatgtttgagtcgtattgtaatcatgttgagtcttggtcgatgccttgtataatgtgtatggtgggttgtatcttccttggattttattgaacatgcctgcctgcccgccacctgtttgatgaaatgcttgaacttttcagaaatgaactagtgtgtgatatattggcgcttgaatttgtgatgctacacctgttggctttcttgtttgcatctgaagtaatttaacaaaaacatgagttttttttttgttattattgtattgatgttgatgttacggctgagttttggatacatgactgtttatgtgttcttaaagtgcaaggttaccgtaatactatctttgtttttagacctgaacctgaaatcaaaccaataaggcctcaaggttgttgttggattggtttaaccataggttacccaaggctttttggcttcgaatttggttcttataacattaataataatgtaatacatggaattgcacatcacaagaagatctgttgctattcttaatttcttattcttaagaagcttaaccacagtgtttattttttaaaataaaatgaaatttgttggtttgatattgatggtaatttgttctgactcttaacagttacaaaagaagtgactgtgaatccgaatccaaatctgaatgggttatcttcaatttggcagac

SEQ ID NO: 23122 - DNA, 1042 bp, Glycine max
  Intron number 3 from transcript Glyma06g14300.1 (locus Gly ma06g14300) derived from phytozome v7.0 (chr-ID Gm06; pos 11263932 to 11264973 reverse strand)
tttcaagcttggaaggacgaacaaccgtggggacggtatgataatatgcacgttctctctcaattcctaaacaccactttttggatcagtattggttttgtcggaatttcatttttttctctattgcaaataaatgtcaattgctgaatttaaatggttagttgtgctttttcccattgtattttgtggcaacaatccaatctgcatgccgttgtccttgaaatttccattaatactccttccgtcttattctattttatgaaaacaatcgattataccaattcccatgacaaaatgctcttatttaacaaaaggagattgaatttagatgaagaggttagttttccacaatgcgaggattcaaatttctgttgagagagatgtccatagttaaaacccggtgcttgaataggattgtttttagagaaataaaaaaattacttattacttattagttatactctagttttataagttattactctattagtgcagttatttcttgagagcattattgaaaaaaagttattaatacattcttgatacttaagtgacaaataatttgagactgaagaatatttcaacagtaacattatctccgtatatgttcttgaattttttatgagtatccacctatataatggatatgaagagtggaaaaccaaaaaatttcattgtagtcaaagtgaaaattcaatgagagagttcatttccatttgggatctgatgaactaatttattgaaattggcaaacgggaatagcacataatggattcagaaagtatttgttgagaaaggaacaagcatttaacgttgtttttattgagagaaaaacatgttctgttttttaatctcttgctgatggaagtttcagtcagttaaatgctgatctggctctcataatgttatcttccatgtgcttaatcttgttccggaactgcctgtgaaagatttatgtacaaactagaaagtacaaattctcatatggtttcctctggggtctgcaggtcttctaatagcagtgcaaaaggagtactttaac

SEQ ID NO: 23123 - DNA, 706 bp, Glycine max
  Intron number 2 from transcript Glyma05g08350.1 (locus Gly ma05g08350) derived from phytozome v7.0 (chr-ID Gm05; pos 8288192 to 8288897)
aacccctgcgtttgtccaacttgcgaaggaaacaggttaagcctcgtttcactcttcttcgtactatgccattgcctggtttgatattctatgcgaattttgagtatgtatgcttgctgatgttgggttagaggttaattatacattattttttttggaaaaaatgtaaaatatattaaatccaaaatgatacaacaataaatgggacatactccgcaacgggagaaaatcaaaagtcttcataatacaagaaggcctaataccaaaacaaatcgcttgtatatgcataagaaacttaatcttgctaataacctctgttacagaaaattgatagtttttaaaaatcaacttgttcctagacagtcagatgcagtagattgtaattgttatagtcagacaacaacgaaagttaattatacattattgacaacatgtatggttggttctggtttgctcttcagatatattcttttttttatatatataaaaaaaatgtatgcttgctgggaaaatgtaaggcaaggaagataatttgattattggggttgtcttagttgaattgcaaggaaattactcttttatgaatttgaaatttactttcttcgttaacatcaagcattattacattttgggttatgaaattttctaatacttactcttggtttttgcagagttcaacgctgtttgaactgtcttggaaaaggct

SEQ ID NO: 23124 - DNA, 597 bp, Glycine max
  Intron number 2 from transcript Glyma06g01200.1 (locus Gly ma06g01200) derived from phytozome v7.0 (chr-ID Gm06; pos 750907 to 751503)
atcacaatcaacgctgtaagaataaactttcttttctaagtttcttgaatcaacactgttgtgtgcaagaataactcatttcatggtttaacttgttttcgcttgaggctatcattgtttcaataaatggaaatgttaactggttgacatggaaaagtttttatctcacttaattgcattcgttgtgcttttattgttgccactttttttttcccggcccgcaaatttgatcctcattattttaattatataacttttatttattcaataatttaacttctaatatttaaaagaaatgttgatgatgtagaagagtgttccttggatgtcaaatgttatcaaatcaacatttcggataaatattgcacgtcgaataaataaaaattgtacaattaaaatggtaaagaacaaattcatgataaaaaaaaaatagaagattaaatttgaaaattaacaacaatatagagatcaaaagtgcattagaattttcagttactgaaaacaggcataatcttaatttttgctttgttgaattctttttataaaatgtttcatttgttagtcctcttgttagccataaagttgtgtgatttggtt

SEQ ID NO: 23125 - DNA, 730 bp, Glycine max
  Intron number 1 from transcript Glyma05g08530.1 (locus Gly ma05g08530) derived from phytozome v7.0 (chr-ID Gm05; pos 8385195 to 8385924)
aagttttggcttatatccttcggagagtactaaaggtaacagtagcacccccattcattgtctctgttgtgttattgtttgctttgcattggttcctttatttaatgttaatgccttcaatcacacacacggcacacccttttgtgtatatgttctcaatgaggtttgtttggtgttgcattttgattgctctctgctatttccaacaaaagtgtttgtttcttgattgtgttccttgtttcattcacatttcttttttgttgtcctgagtttgatcactgacaatgatggaatttcagaaaacgttttttgtgttgtgttgtgaatcgtacataaggagcgtcagggaagaagcaatgtcacgcaatcaacaaccagatggaatatttttatttgcttttggcttttttttttctttctctttttggtttgctgtaatgggttataaagtttgattcatttcccttttacttttgtatcttttttctgtttctccttagacaggagcattcttttattgaaatattattagcacccgtgaagtcatcattggttttggggtctgcacctgaaaagtgaaaattggctcttgattttgtattacacccccaaacgttattgtattacaaaatgcaaactttgatttttgttttcctgttttgaataatttctaactttttttttggtttttgcttattaattttaagtgaggtgctgattattgtgttca

SEQ ID NO: 23126 - DNA, 343 bp, Glycine max
  Intron number 1 from transcript Glyma06g16040.1 (locus Gly ma06g16040) derived from phytozome v7.0 (chr-ID Gm06; pos 12580107 to 12580449)
gtggccgcatcaatagtgacataaacaggtagatactgaaattttcctttttcttttcttttgatttcccgcgtgcatcttccttcataagcaatcctatttgaagtatggtcaacactaaaatgagattcaaactttgatttgtcacgttgcgagggtaatagtctcttctgctagactcaactcgtgttaatgatttttttccttagtgcatctgtattagattatgatgatggtaatgactatgatgtaattgaagtcatcaaatatgacagaaaataacatagtctaaatgaaacaaatatcatatattatccactaattcttttttgttttatcaggt

SEQ ID NO: 23127 - DNA, 641 bp, Glycine max
  Intron number 1 from transcript Glyma08g27150.1 (locus Gly ma08g27150) derived from phytozome v7.0 (chr-ID Gm08; pos 21459087 to 21459727)
ctccttctaccttggggtgtttagtataaaaagtggtaggtgttcatgtgagtttgccagatattatcaactataactaggatttgtattaaatttggatttttatattcaagattaattgcatgtttcgcaagtgaactcaattgaatattttatattattgttaaatagttgcattattgtccctgtaagtttaattacatcctttcctgactatgatgcagccttttgctgcagttttctttaatgtctatatgatagatatatacccatgcttctaatttctaaatgattctagagctttttaatgtataactgcattagattttgattattttcagtactttataataatattcttaaatcccctaaaaatcacaattgaactatatgatattatttaataatagtatccattagttgttgcaagtcaacgatctatgtcatgaagtcatctcgtctgttcttcatacatccacttccaaagggaaacaatatgaattttaaatattaatcgatttgattcacctttaaatttgattaaatttcatgaagaagcaacttcctcctatttcgtttttttttatttaatgtgtttctatgcagattcctaggatcgtgatacagccagtcgtaaatcc

SEQ ID NO: 23128 - DNA, 507 bp, Glycine max
  Intron number 1 from transcript Glyma07g01010.1 (locus Gly ma07g01010) derived from phytozome v7.0 (chr-ID Gm07; pos 587590 to 588096 reverse strand)
tttggtttctgcagtaaggaagccgtttcttccaggttagttacacttacacatgaccattttggagattgacttttttctattacttgcaattgtgggtttatcatacctcaactgcaacttagaaattatcagtgacatttctctataaaatttcaaacatttgcagtaacaaaatagcattcaaagggcttgccctcagaacctttagctcagtgaacatttttttatactcttgaatcttgattacctcattatatttcagctgatatgcttcattctttctctcatgtgttaactcttctcacccttcttttcagccaaagaagaggctctacagtctccaccaccacatactatagaaccaaaaaaggtgtgtttatctctctctaagtttggaactgggtgggtttagtcggtgtactagtgactaatacactgttgcactgtgtctgttttgtatctatgttaaagggtttaatgggtatagaaggtacatcagagaca

SEQ ID NO: 23129 - DNA, 744 bp, Glycine max
  Intron number 1 from transcript Glyma08g20190.1 (locus Gly ma08g20190) derived from phytozome v7.0 (chr-ID Gm08; pos 15241836 to 15242579)
gtgtcttcagttgattagtgctaccaaggctggttagttctttctctctctctccttgcactgtataatattaactcctccttcctactttcgtaaggaaattaaatcaaagatattttttaaaatacaaatctaaacataaaatatatattatattccattctttatcatccttatcaataacctgatcagttttcactaggctgactaatcagccggcaacaactagattgacttaaattcataaaatatatgttttacagcaacagtcgaaatatatataagaaaaaaatatgacacattaactaagataattcattacatttaattgtataaaaaaatgaagaaataataaaaatgttttaaaaaaatttacattaaagagatgagattagctatgcatcatggacacgcatgggagctgaggaaaaggtggttgaaagtatagaataaaggataagagaaaaggaaaaattaatatttttatgttttagaaattaaacagatagaatttatttataagaaaaacaaaattaataaataaattattttttgataattcaaatagtttttttatttccttgacgtgaagctttttgatgagtgtctatatatatatatacttccctggcttagcagaaaaaaactgtgatagtattacttttaaacatatattgcatgctcaatcacaaaacaatcttaatatagtcttgaatttatgtatattttgaacttttgtaggaa

SEQ ID NO: 23130 - DNA, 699 bp, Glycine max
  Intron number 3 from transcript Glyma08g42340.1 (locus Gly ma08g42340) derived from phytozome v7.0 (chr-ID Gm08; pos 42335967 to 42336665)
ctcttcgagctttcgtgttacaagatcctagcgtacgtacatattaaaagtcaatatattcatacaaaaaaataagttaaatacatatataataaatattttaatatttcaaaagttctttcatgaaatcgataaaaaataatgagactaatgcatatgcactgacggtgtaaaatagttttacatcgtctttgtagttataaatcaccatttgaattactttaaaataattattttaaaagtaaaaaaatttatcatatataatgtgttgtgattaaatagataactatgtaaaaaaaattatactgttagtataataatcctttttcccaaaaaataataaataaaatataatttaggttcttcaagatttggtcaaaattaattttaatctctacattttaaaaacaataattttgcccttttggtccttatattttttggaatgtagtagagttttgtccaaggactaaaaatactttttctaatcaaaatactgaaacaaattttgatcaaatcttacaattttgattaaatattgagagatctaaaaaagacattttactcaaaaataattattctttaaaataagttgaaataaacacaaaatcagtacaattgtaacaacaatttaactttatttccgtgcgactaattaaacaattatcatacatgtttaggtttccaatttggccatac

SEQ ID NO: 23131 - DNA, 631 bp, Glycine max
  Intron number 2 from transcript Glyma08g28500.1 (locus Gly ma08g28500) derived from phytozome v7.0 (chr-ID Gm08; pos 22829963 to 22830593 reverse strand)
tattaggatcaagctctgagtacgtccaaagcaatgtatgtatcattctatgattttttttattggctcatttaatttaacatgcaaattattggctgataatattagatctttttctgtttctctttttttttgtatgattaattttttttttcattgtcttactcatggtgtttgagttgtgtgtggaaaactgcttattacgaaaaagctgagaacctcttcaatcccgtgtttctaagctgtttgatatatcatttgatcagtgcttatttattgattatcagaaactattttaccatacaacttagcattttaatatttggtgttctcatttaatctttttcttaggaaatttgaaatgttctgtaattcacttttgaatctatttcacatatggcatatacgttcgcttcaataatgcttacatgtcaataaggtaaggttccactgattatggaggggaaaacccacacagctggaatatgattttaaattgccttcattatcttgtttaacttaattattgatattatctctaggtgtgaatttaacttttccttttttgttaaataactttatcttttcaactacagataagccggtatttctctgatccccaatactactt

SEQ ID NO: 23132 - DNA, 918 bp, Glycine max
  Intron number 4 from transcript Glyma08g12190.1 (locus Gly ma08g12190) derived from phytozome v7.0 (chr-ID Gm08; pos 8860413 to 8861330)
cctttaattgtccttgtctttgaacgctataacaggtaatttctactgttctggatttccctttgggtgggtctgcatggatttgctggagtaaagaagaatagaattaatcgctggtaatacttaaggcaagagtgggatggaacaaatggtattactgaatgagatggtaaaaacttctcaacaagcactcataaacaaatggacaagggagaaaatgaatcaaacttcttgcataagttatgttcttcatctttttcagaagcttcctttttctaacttctctaaaagtactgataaacctaatagagcttggcacctatacttcccttataaaaaagacagcatttgggaacatggggtgcgacaagttgctggttggttaactttggatactttttctccacatgcatttgaattggggtcaagaaaacttttgctatacctacttttaagatgtcgattcttcagagaagataattgttgtttattcagaggcacgtgataatgcacatgagtgtggaaatgcttaaaaaattataatttttttaaagacatgttagtttgttagaaagttaattggttagtatagggaatcaaatccatgacctttcttctcttcccttctccgttgactattcaactcaccttatatctcccaaaaacttgttagccattgtgaataaaaaaatatttagaaagtaaattccgtaacaattattttaattaaatgtttctttttgtttgtgaaaattgaatgaatatatgaaatggcacatccccatatataatgaatgatatgttggtagcgatttcaaataatgttagttatttataggtaaatgtaacctttagtttggcgtttgattttgttattccacagggcatctgataactggaaaaatttgaaagagctgg

SEQ ID NO: 23133 - DNA, 298 bp, Glycine max
  Intron number 1 from transcript Glyma08g28040.2 (locus Gly ma08g28040) derived from phytozome v7.0 (chr-ID Gm08; pos 22309756 to 22310053 reverse strand)
ttaccaaaagtgggggctgttttctgaatcacaaggttcttaatttctcgcctgattttgctgtctgagttgaaaagaaaagttttttttattgttgtttttgaattttggttggtgggttttgagttttatggatgatggggtttatttggtggacaattttatttccgttgtttatgagagtaaagtgacttattattggtatgttaatgattgttgaataattagatgtttcaatattgtgtattgattggtatttgtattttttgtttagattcatctttgaagttggtggtgg

SEQ ID NO: 23134 - DNA, 371 bp, Glycine max
  Intron number 1 from transcript Glyma06g05560.1 (locus Gly ma06g05560) derived from phytozome v7.0 (chr-ID Gm06; pos 3977579 to 3977949)
aactggttcgttgcatcactatattattctgttcttcaatctttctcaccataaaatggatttttatatggtctcagagcacatcctctgtgttgctttcttcacttttgatgtattctattctacataactggtgcttaacgtaaaggaacacttgttttctatgatgatgaatttgtttactttgttaaagaacacttttttttttcggggtgcgtcttttttttttttataggtttaacaattttgtatgaatgcattttgtgccctgtatacacagagtgaagaattcttcatcatcattattttgttttttatgtctattattatatggtgtgaattgcaggttaagaggaacatagacttggtgt

SEQ ID NO: 23135 - DNA, 439 bp, Glycine max
  Intron number 1 from transcript Glyma05g32520.1 (locus Gly ma05g32520) derived from phytozome v7.0 (chr-ID Gm05; pos 37453318 to 37453756)
tcgtcttcaatttccctttggatttcattcattaggtaatacacaaatgacaaatctctctatatttaattttaataataatttttttttcttaatgaaatgaaaccaatttatattctgattctaattattactattattttgtggttttttttttttttacgtgtgtgattgattcaggtgagtacgtacgattacgatggattcgagttcggagcatcaagaattcgattatttgtttaagttgttgatgattggagactctggggttggcaagagtagtcttcttctcagtttcacctccgatgcttttgaagatctctcccccactattggtccttttctcctttgatttgtatattaagatagatatttatgcacctttgtctcttatttgatttgatcatgcctcccgcaggtgttgattttaaggtcaaat

SEQ ID NO: 23136 - DNA, 696 bp, Glycine max
  Intron number 1 from transcript Glyma08g16360.1 (locus Gly ma08g16360) derived from phytozome v7.0 (chr-ID Gm08; pos 11965410 to 11966105 reverse strand)
tccaacaggtactcattttttttccctttccaccaattctcgcttcgatctcttttatttatcctatgaccctcttttcgattttgcgtttttttggctgcttcgtatgttttggtgaggaaacagataaagataaaataaagaaaaaagaagggttcttttttgttgtttgccgttgttctttggtgtggtgagatgatgaacattttgttactcttttgtgtgttggggcgcctgtgtgatggatcatacaggccatattcttgtgccactttttttttttctttttcttttctcgttttactgattggaaatgtttgttttgttaaaacacaaaatgtgatcaattttctgtaaagttgggtttgggatcgttatacaaggtgaattttgaatttgaagtttagttgttttttttgttatggtaatggttcatttgacgtgacttgaaaattgtgttagaaattggaattcttgaatattagtgagcatggggattttgattagtttgatgtatgcactccctgtgtatgtttttaatttttctattgaatttttgtacactcttgatttattaattaataatttatttaggggtttacttatttattgaatttttgtagactttatcttgattaatttattattttgtaacttatttgaaattaatgaattgtcttaggttttgcaagttct

SEQ ID NO: 23137 - DNA, 574 bp, Glycine max
  Intron number 1 from transcript Glyma07g00580.1 (locus Gly ma07g00580) derived from phytozome v7.0 (chr-ID Gm07; pos 277181 to 277754 reverse strand)
ggtcgacgccaagcctgaaaaacctagtacgcctcttctctttcagattactctatcctcccccattcccctcaataattaaccctaaatcactcatccccaatttttatacctttgtgttcatcatatccatgtcttgccaggatccattcccgtatagtgcggattattcttaattctttgtataactgcaactttttattttgttgtaacaagatttattagcctaaaatgatgcgcttgataaggattagtggaaaatgcattcaccccagggctctctttcttgttttaaagagaggatgggtgttgaagtagaatattgataaccattcttaacatacttttatgtgctgaacaaacttttggattaggaggggtgcaatggttatccaaacatgcatatattgctgcttgtttacaatagctgttttgagttaatggcatttttctgttactcatagccaattgctttgcagcaaaagagctaacattatgttcatgtattctgatcaaagtgttcaattttctttcttcagctattcgttcagacaccccagagcagtgatctgga

SEQ ID NO: 23138 - DNA, 972 bp, Glycine max
  Intron number 2 from transcript Glyma07g08420.1 (locus Gly ma07g08420) derived from phytozome v7.0 (chr-ID Gm07; pos 7033461 to 7034432)
agatattggagtcgcatttcaactgaagagtcaaggtgagattattgtaggtgaaactatgttgctctggacaataagtaataatatgtagaactggcctatgcttgactttgttttattgtgttttcatcttcatgggttgaaaattgaaatacaaaatattttttttgctggatttttatttttgagcccttttgtggattaaggccactcatttttcaccttgtggctttgttatttaacttaattataaagctcgaagattgaattttccatacttttccaaatccattttactaatattcaaggttatctaatactaaatttcttatgtaaggcactaaatgagtttagttatcagtgaattattcaaacttggtatattgaatgttcatttaagttcatttgtagttaagtttgattatttaaaagaatcaaacttaagatttgtaggttttaccttaacagtgtgtgaataactggtatatacatgtttaacttggacaatttcaatttactttttatatttacttaaaaaaactgtaaccttttttattatcttcttatatatatatacaatttatttaatgtcaattttcaagagtcacactttaaatgaatgactgcaatttttttttaaaaaattgtcatttttatcatctgtgatttgatctccaatcttaatcatttttaagaatacaaaactatattttatctcagtttcactttgccttctagcttgacattgataccaatttagtcatggttgcatgtatgttcttagttcttactccattagtttttctagtggctcctcaattttaagttttagccaccttctgctagaacacatgaaattaggcactttaaaattggatgacccctgtttttctatatgaggaaacctgatgtattatactatttttgttcataacagattccacacagttgcttatcttcaacaaatttggt

SEQ ID NO: 23139 - DNA, 457 bp, Glycine max
  Intron number 1 from transcript Glyma05g35350.1 (locus Gly ma05g35350) derived from phytozome v7.0 (chr-ID Gm05; pos 39423982 to 39424438 reverse strand)
cttcattgacggacacttcgttcactctgtgtcaggttcattttttttatacctatgcactttctgttgccccatctaattatctgcttcttctacctttctatgctcctctaatttctattcctttttctgtatttttctttccattgatgtacatggatcaaaactaaatactcctattattatggtgtgacataattcgcatatatataattttgaccttaagcatatggttagaacctctcccattaaggagggatcccaacagattgtcccttgtaagtttatgttcaaactgtaatttagaggttaattaattatctatacttgtgtcaacagtactactatggtgtctcaactctcaactaagtcttatatactaatatatatgacttttgctaaaactcttgttgaaaaaataggaaagacatttgagacaatagatccaagaacagga

SEQ ID NO: 23140 - DNA, 655 bp, Glycine max
  Intron number 4 from transcript Glyma08g07730.1 (locus Gly ma08g07730) derived from phytozome v7.0 (chr-ID Gm08; pos 5558940 to 5559594)
ctgagaggatgtaagttcctcacttgtctttggttatttgtttatttgtttgttcattttgtaattgttatcctgtcaatttttaccgtcgcattgtttactctattgttgggtggattttgcttttgtttttctgaataatgaaaattatttttatagaattgttttgcaaaccatttttctatttggaagtttttgccgttctccgctactcagaccatcaccatggtgatagcttaatttaaaaatctattttactgctggtatgtttgggatttgcactcccagttgttgttgttgttgttgttgttgttgttgggggtgagaatggaatgcctggagaaggaaggtattgctatattatgtggggtttgagatgagagctgcaatgatttgaagaaaacgaaataatcctttactaaacaagtttcaaagcaatcaatttaagaaaagctcccaaaatagacttttttataaaaaccaaaaaaaagtttgaacaataatcatgccggccttttgcttcaatatgatgactttcttcatttaatgcatgatgaagtatgtttctcaaggattcttacgcatttatctgttacttagttgagtttttcaaattgcagtcacaaaggaaggattattgaaacatccccgagat

SEQ ID NO: 23141 - DNA, 934 bp, Glycine max
  Intron number 1 from transcript Glyma07g02900.1 (locus Gly ma07g02900) derived from phytozome v7.0 (chr-ID Gm07; pos 1977088 to 1978021 reverse strand)
cttttcagcgacccccctaagaagaggaagtttgggtatccattttccttcccactaactatgtttactcattcacctctcgatctcttttgaatttcgtcgagcatcctcgctgcagttaatatgtccacttcactacctctaaaaaacaattttttactaccacatttggtgtttcaagctgcaaatagatactctaaaaaacctgttcaatttttttttcttgaattgaaaaattctgcaatggtccttaacttttgcatttgggtaagttgttagattaagtacttgttcagaaggcttgctactttaaagtttataccatgaatttattttgataagctaatattgtgaaatttgttgaaaaaagtatttatgagaagatcataagtcactttcataagtcattaaatcaaaataatttcgctacaataagctttcctaatggaaaatgattaatgtaaatgatgcttttttaaagtcatggactaaaacaattgatacatccttcttgtcggtccttaacattagtaaaaaaggcagtggaaaatgactagagcaaatcatgaatttcaaagttagagacaagagggaaataaaagccaagcaaggactaaaatgactgatgcatacaatatgaggactaaagtagtggtttactctttttcttttttgacggggtaggggaaattactttatttgttatactgttaatagatgaaaaatattcttactttgtatttttgtttttatttgtcaggtttgatttccatcttgtacagttcttttttgcctgtttgccttccgtgggtatgatactcacattttcaagttttttatctatcactagccccattatttcttaagattctactgcttagtgcaatcatctaagtaattttttcccacacagctgtatatttggtggcacagt

SEQ ID NO: 23142 - DNA, 946 bp, Glycine max
  Intron number 2 from transcript Glyma05g08580.1 (locus Gly ma05g08580) derived from phytozome v7.0 (chr-ID Gm05; pos 8424190 to 8425135)
ttatccgtggtgcctctgatctcaagttggtattcttttttgtttatatgttgtcaatgtaaggactatgaactaattagaaatcatcaagatatgaattttaaagtgatttttccaagaatttaatttatgttacgctgtaatcattttctttcattggcaaatgttaattattagttggttagctttttgtcagtaggcagagggatcgaacccgcgacctttccctccttcccttcttttttaaccagccaaccaaccttatatcttctaattatactgtaatcataaattgccgtgtttggtaagatgaatgacttttataatagctattttaaatgtcatagctagagtgatttttaattagttgacaatgaaaaacacattacagtgcatgaaaattatactctcttacaaaaaaaaaaactaacaattttatcatatgtaacagtcggtaattggataacaggacaaaaaataacctttcgctgctagtgcattctaattattattattttcttggcatcttttgatccagtttctcaaacttgtacttgtttgcccgttgcttctagttagagaagtgcacattctgttgtttgactttcgagtcatgatgctggctaatgggaacttttaaattatgcagtcaagtatttggatatcgtgtataatgtgagttatctatagttaaatgggctatataatttacgttgtattaaaactaaatggagttgatggttatgtgttacttgcacatttgcacctccttcaatgtgtatcagtatgagtgtgtttgcattgcaacttttcatggcattgagaagaaagtttgatggttgatagataaatacacttgttggcatggattgagtgaagtgattgctcctattcaaagagatgctagttatgtgcagggtcactcttgctgaccagtcaactttag

SEQ ID NO: 23143 - DNA, 985 bp, Glycine max
  Intron number 1 from transcript Glyma08g00580.1 (locus Gly ma08g00580) derived from phytozome v7.0 (chr-ID Gm08; pos 266060 to 267044 reverse strand)
catctcgctgatttcattccaaatcttgtgtggaggtaaggtaaaactataatgtcaagattttattttcttccatagtaaaatgtgtaacactgtaacgtgtaaatcaataagaaataatggcagacatttttaagatgacagtataaacatttttatttagtgtatgtgctatttacttatatattaagaatttaatttctatacactatcatatacacccattgactaatcagaaatcatgacagacatgagaatgatctatacactatcatatacgccattgactaatgagaaatcatggcagacatgagaatgaaatgtgacagtaagagatcggatataccttaaatagagttttataagatgtttttcttctagtcaatcatggcatttcatcccggtaattgatgccttttcttgacaaccttaaacttttatatattataaaatatatcatttactatttgattcctgagggaaaaaaaatggtaaaaaaaggtacgtacaattaagaaagacttagagacggataatattcgtctctaacatattagaattttaaaattcagcacattgatatgcagggacagaattagagacggattgcgttatcatttatcaggcacggattaacttcgtctcaaatatccgtccctgaatttgtttagagaaatcctagaaggatctctagatggaccattctgtctccaaacatcatctctatgtgcttaattttgtttgtttccggaatcacttctctaaattccgtgggtatataaaacttttctggtagtgactaaaattggcagtaattatcgagatgaaatgtcaattttgattttaaaacattacaaaggatatttatattattttttttcatgaaagttttgtatgagatcacgactatgagcattgctgtttaattgtttgtctttctttttttacagtgggaaaattccttgcccgtatcctggacggatat

SEQ ID NO: 23144 - DNA, 380 bp, Glycine max
  Intron number 2 from transcript Glyma05g25260.1 (locus Gly ma05g25260) derived from phytozome v7.0 (chr-ID Gm05; pos 31391318 to 31391697)
attgtatccaattttccatccattcccatgaaaaagtgggaaattctcttgaatattttaatgcttgatagggcattagaaaggaaattttgttgcactcttattttcttcaacataaattttggtctgatgcacatttgtttctttttctcctacacatacgagtgaagttatttcaaagtgtggcatattttatgccaaaagtgaaaccttttactttgattcatcatgtatgtatgatatttttagtcaccaaatgttttgtctggcaagatactgtcatccaatatatggcatcatggaaataaacatctatgaacagttctgtttgtttcaaatatccttcctgtgtcagatcatattgcttattctggtcgtca

SEQ ID NO: 23145 - DNA, 747 bp, Glycine max
  Intron number 2 from transcript Glyma05g08440.1 (locus Gly ma05g08440) derived from phytozome v7.0 (chr-ID Gm05; pos 8339105 to 8339851)
gaagactggagactggctttgcccaaggtccttttcacattatcatcatattttcagtactcaaaatagtatctctattttatcctacattatcatcacattttgagctgcttcagttcaatgaagagcctgcatttaattatgtctacaaacaccaactacatatcacctatatgtccaactagtccaagtaaaaacggggttaacctcacactagatgattggtgcaattgtctttatgtattttatgatggttggtacaattgcttaatttcaccgatcatctaggatgagattgtttaaccccatttttacctgtccaacaatgcgttaagttagacaacccgcccaactatcataaaatctaaacaatgtaatttaatagcatgtaattgttgtacacaacaaagctgcattttcatatatagatggtgcaatctctttttcttcctccagagaaacagaattatactcagtcttgcacataggcacgtatagtgacacgataagaacaaaagttgcagaatttttttaggccaaagccagtagaaaaggttgagatggagaattaggaccatgtaaataattacagtacggatggtggccaatataaaagagttcagtttactttattttatgacactcaacccaaaaaatgaactaagatacaaatacttgtaatccaaattaatttcttcctaattcaaagtatttcacctttattttcctttttctaatgtaacagac

SEQ ID NO: 23146 - DNA, 519 bp, Glycine max
  Intron number 1 from transcript Glyma06g03230.1 (locus Gly ma06g03230) derived from phytozome v7.0 (chr-ID Gm06; pos 2270253 to 2270771)
ccagcacaaggaattggaatccagagtccgatccggtttgtctctctattttctctcaccttaatagcgtctacgattcctccatgctttcaatttttacttactctcgaaacccgcagttttagggtttcgtgattatggtttcgcgattatggtttgacaaccctattatagctctttgattaggtttttggtttttttaggggaaaagtttctgcggtttggttgagtttagagccagacctaggttaattttgattttgatgattctacattttcttttctacgaattagggttaggttatcaactggatctattgatagaatcaactgaggttcttttgatgaaataagtgaattcctagttgagcaatgaaatctaggcacagttttttgtcagagaggacacaatcatttatatctgaccatggttgttgttggataagactggtgactgactttggattaaaaacttaaattgcagtcagggagaatttgcgagcttcaaagaaagagttc

SEQ ID NO: 23147 - DNA, 770 bp, Glycine max
  Intron number 1 from transcript Glyma08g40920.1 (locus Gly ma08g40920) derived from phytozome v7.0 (chr-ID Gm08; pos 40844194 to 40844963 reverse strand)
agtagaagctgctcacagttccagaaccccttctggtactttttcttttttttgtcagtaaatcttcacttgtcaatgaaacaatattgtttctaagattctaaattgtggtcgcggtcgcgatttcatggcgaccctttaatcacaactgtggttgcaatgcggtcgcgactgaaatcatggttgctaataattttttaaaacacagtgtcactatgtttttgaaggggtgtttttgattttcctaggtgcatgtttgcctttgtcatttataaatattccttttttttttcaatatagatttcaaagctgtgggtttgatggtgttgtagattgggaattctttgtgggttttttaaggtttcttgtctcgttgtttttggatgctgcaagcttgctaggattcaatccatgggatcttgtagttaaccgaatctagttaaaacttatacaatgctcgagtttggactataactaaactaagtaacactttggcccttttgttttagtccttttacatgtgaaaagaggaggaaaaactgaaaagcatagcagtcctaataagtgataatgaaaagttttgttataacatataaagtatttgttcagaattttcctaaatgggttatgagtgtagttggttgagttttaaggttatattggcaagttcctgcttttgtttgtgaaaatgctagcatatatgaactaactgttttcctcttctcgctgcatcaggaatttcaaaaactagtccttcatctgttccttcc

SEQ ID NO: 23148 - DNA, 638 bp, Glycine max
  Intron number 1 from transcript Glyma05g37920.1 (locus Gly ma05g37920) derived from phytozome v7.0 (chr-ID Gm05; pos 41403592 to 41404229 reverse strand)
atagttcagaaggaagaaaggaaccataaaaaagtaattgagactcgctatttttttcatttattttttttcattctgggcagaagcagaaaaaggttgttttggagttttggagttttgggtaattaattattaaataactcttatttttataattttttattggaaatatttatgagctcattgttgttttatttcatcccattctggatagaaagtgagagaaaattgcttttgtgtaattaaattattcttatttttatacagatggatatatatatatatacatatatatatatatatatatatatatatatatattatttaactttttcacggttaagtaaaatgaaagaaaaagtttaactttttttctttcattttcttttttattgaacaacttaaaaatgatcctattttctattctctttttatattattttatttctctccttaccaaataaactatataaaagttttcaataaaatacaattgacagaaaaattaaattggtttaatcttaaaataaatagacttgatttacttaaaaaattagaagaaccaaatatgcaaactcaaaaattaatatagagataaacacaaaacttacaattgacttatggttaacaagaccttg

SEQ ID NO: 23149 - DNA, 369 bp, Glycine max
  Intron number 2 from transcript Glyma06g09700.1 (locus Gly ma06g09700) derived from phytozome v7.0 (chr-ID Gm06; pos 7278322 to 7278690)
tgataattgctttccattttcgtaattgagggcctgtttggcttcttttctaagttgtcatccaatttcgaaacgtgatttccagtcaagtatggaatgcgctgttatgttaagtaggagtttagaagtgttttcgggaagtacaagcaaaaccagaattagagagtttcttttttattttgattctttggacttttggagtgagggacagttctggaaatcatattttgatttttgagaatcttccttgattaaatgaaaaaggttttaaaagaagagccatgccgactcaatatttgctctgataagtcattattaatgtttctcttgttagctattgccactcacaagcacttctttctattgtaa

SEQ ID NO: 23150 - DNA, 563 bp, Glycine max
  Intron number 2 from transcript Glyma08g38440.1 (locus Gly ma08g38440) derived from phytozome v7.0 (chr-ID Gm08; pos 37513450 to 37514012)
gtgttaggaaggaggctcttgattggatttggaaggttggtttttctctaatgggggttcttgattcttgtttgtttgatactttgattgatggagaataattactttcaacaaagttttttttttctctttcttttctttcaatgagagtgaaaaatgaattccctttaagatttttattttttggttaacttacttggattcttaccttggtggttcaagtatatttaatggggttttagccatctaacagattaacttttccattctggtttcaatttctttacaatttatggctttcttattggatttcatttggctattgcattaaattttcctttattttcatagatttcgaagtgttttatttagtggcagtatttctgttaattcctaaactggttttgcaaggccaaattcatttgagaattccttatatttttgcatctctactcattctatttggattttgatcatgttccgctcattgcatatgtgatttggttttggattggataactttgttagtaaattttacattgcctaatgtgatcaacaggctc

SEQ ID NO: 23151 - DNA, 895 bp, Glycine max
  Intron number 2 from transcript Glyma05g36680.1 (locus Gly ma05g36680) derived from phytozome v7.0 (chr-ID Gm05; pos 40498642 to 40499536)
aggatttaagaacaggagattcagtgtaagccttttcttttctatttttttttctttttatatgtctatgattgatctttttgtttgtattatctttgaaagatggctgccctccacatgttgaggctatcctcattaagaacaccctccacataggcaaaaggatttccctccaatcccaaaggactccccgcctgtgtacctgtgtagttattggtttcttttccatctctctttttggattttgcttattgtgctttaatctctatctattacataggtatctacagtaggtgccctggacttaaattgttaattttccatactgtagtttcatctctactaaattatacccaaatgcttgttgttcttcaaaagctgaaattttttagcagaatattcgatttccaaagttcttagaacctttcatgacatccattattttcataaaaagtgatatggaaaaaggaagtataaggtgtaaagaatatatgaagaatgaccttttttttatgccaaacttgcacatttgaaggtgactcaccaggaataaagtcaaaagaaaaaacaatatatagaattcgtgcacgtgtaaccccagtggatagtaaaaaaaccaaattttaaagatagatagatataggttacatttgcttgggaatttctagtaggcaagtgctggattgcactttggaagctcttggattaatttcttatgctgttcccctgtaatcctttttcctccccacgtatccaaactcttgtctgctactgatttaatttagtagtgttgagcatcaatatttcaaaactaaggatatgattgtgctaatattagtaactataaattcatgaaatgaaggctaaaaggttgttgaaatttttctgtaaccag

SEQ ID NO: 23152 - DNA, 721 bp, Glycine max
  Intron number 1 from transcript Glyma06g02050.1 (locus Gly ma06g02050) derived from phytozome v7.0 (chr-ID Gm06; pos 1346757 to 1347477 reverse strand)
gtgtctactgggatccacccctttcagagaggtcccattattcacctgttgaatatctgttgacatgttatcttttaaaaaaaagcattgcatctgaaggatcaatactaaaagggactttgatgtatgccacatattgcatctgcttggaagttcaattttttttatagctttcaaatgaattacaattagtcaaaaagtttggatcaaaatgtatgtaattatttcagttggattataaatgaattctcatctttgaggcataaacattatatatgatttaaaataaatttaatgtttttttgctaatgaatactaccaaaatcccatcaaatgtcattatttgaatttgtcacatcaaatcatgattgatgaatgaactaataccgatttcaaatgtgttatgatagaatccatgtaccaatgaggagttaagcttttttttatattccatacacactgggatttcttattcctcttttctgtctggtcattaaaaaataaaagaactttttgttcaggtttagtttgcaagagaaagaggaaagtgtgttttggatttaattgcttaactagaccaagtgattcttccattcttttgttatctatattttcctcactctcggctcttgattatgttcagatgaaattatattcatttattcaccttcttttttgttctgcaggtatcaatttaaatatcctcgtccaccaaagccaa

SEQ ID NO: 23153 - DNA, 553 bp, Glycine max
  Intron number 1 from transcript Glyma08g01870.2 (locus Gly ma08g01870) derived from phytozome v7.0 (chr-ID Gm08; pos 1206415 to 1206967)
gaaccgctctcacagccatcgtcacaggtttttctttttcttttccttttctgaaaacatgtttttttggtgctgtgcaaattggggtgtgtgttttgtataaaaagcttttccgcttgaagcaagttaacatttttaaagggtgtgtgcccgaaaacgccatagtctacttggaacacttttgtgggatgaaatgaaagttgacaaagttattttcattaattttgtttttttttattggcaaatattattttttgttagtggagaattcgaatccgacctctcccccttcctttctcccttcaccacatgaccaacattatatcttcttaagttattttatagtttattgatgatgcatcacttatggcttgttgaatggtgacatgagttttgttgaattattgaacaaatgagatcccatgtaacctattataatttagatgggagtttgaattttgtactggtttcaagtttcaactaccatgatattgagtacttatatagtccatgtttaggagcaacaagtggccttggtctggaaaccacccgg

SEQ ID NO: 23154 - DNA, 677 bp, Glycine max
  Intron number 2 from transcript Glyma05g09130.1 (locus Gly ma05g09130) derived from phytozome v7.0 (chr-ID Gm05; pos 8933443 to 8934119)
gggtcgcacaagtttacggtggccttgtttacgtagctacattaattcatttccattttaaatatacccatcaatgtttcttcttcttttttatctttctcttcttatcttatcacaaattttatcatttttatattttttcttaattttatctctcttcatagatgctgataatagattaatgggtgtccatcaaatattttacatttgtttcaaaaattcattttcatgcaccaattaacgattttaataactgttcaccattcccgattttggttgcaacgtccttgtttttggactcactgggaccactattggttgcaacgtacttgtttttggactcactgggaccactattgttgccgcagaggtcgctgtattagttgttttatttttatccttcaaatcaaattcacggtggtgtgaccactattatgactgcataatgtcgaattacttttaacttttaagtaattattatacgtatataggatgacaatgtaaaaaaaaaaaaaaaaaaaaccttttacagagtcagggtattttaattcaattctttttgttttatttccattgaaactgttcatttcttaatgtagtactaaatgaatggcactaaataatgttgctgactcacttgctctgctttcatttgataggactttagcaaggaaaac

SEQ ID NO: 23155 - DNA, 713 bp, Glycine max
  Intron number 1 from transcript Glyma07g05130.1 (locus Gly ma07g05130) derived from phytozome v7.0 (chr-ID Gm07; pos 3804492 to 3805204 reverse strand)
ctttccctgtcaccgctcaaaacatcaaccccaaggtttgtgttgccttcaattctctttttcagacccacccggattgttgttttttggttttttacttctggccgtgctaaagttgcaagctttgaaggctttttttttttaatctgggcatgtgtgatgttgaattgatgtgtatggttttgctttggtttcttctcttttagtttgtgcatgatgtgtaacgtgtttatttgtcaaaggatcgacctttgatgaaattatttctttttttggtctgcaaggattgctaatttttattattgttgatctgtgagtcatgtttgactctgatcttttttctatgctgttttctgtctagtggtgtgagtgtgtaactgatgaccgagtaatagctcatttttctactattgtatgctcaattgagtatcttttgcttcttaattgtgttcaaccctggaattggtggagtaaaatagtagaaaaagagatatgtcttattatgatcatacttccaattcaggctaatttaacatagttggattggtttatgttatttaatggatttttcttattaacagtgctttattttatttataaagtgtgattgtttgccagaataccttcccactagtagttggatatgatgtcaccaattttaatactttatttgctgatttgaaactaatgttttttgttgtctaggttctgaa

SEQ ID NO: 23156 - DNA, 776 bp, Glycine max
  Intron number 2 from transcript Glyma07g30090.1 (locus Gly ma07g30090) derived from phytozome v7.0 (chr-ID Gm07; pos 35149579 to 35150354)
gttttgacatccaggtatgattcaatccactttttactatatggttttttcttgtgttgtgttgaactttttttttaatgtacttggcttatgtagtacttgtgttgtgcttaactcttttttaatgtacttggcttaaatgtatttgagctgtgttgaacttttttttgaagaaataattgatttttactattgagaaattcttgaaagagcttttaaaaagggtggttattttcacccaaaaaagttgaagtgaactttcttgatcatggaatttgtgtttaaattccgaaagtatgtttcagaagcaaatgtctaggcacctcaagaatgtctgtactatgccttcaagatcatgattttttttgttcccctctgttaaaacgttgcgcatatctttgtgaaatgaaactgtaatttgctcttggtgatttttcacatatggttctatggaatacgtatacgagagaaaaattggtttcttggatgtactagtattaaacattttacaaagttacactatctggattatgagcaggggaacagctaatctttcttttcttgtctggctgttatctgttgaatcattgttgaaatctattaactcctattggttaaatgatatgaatttagtttagtcttttgattaacgtcagcatcttttttctgtatagaaattcttacagttatttgtgctatgtctctggttgatatagtgaatttgaatctggttgatttcaggccttttccttttgtgctgacaaggaactattaag

SEQ ID NO: 23157 - DNA, 943 bp, Glycine max
  Intron number 1 from transcript Glyma07g32010.1 (locus Gly ma07g32010) derived from phytozome v7.0 (chr-ID Gm07; pos 36949570 to 36950512)
tgctcccttttaatcaggtacctcatcatcaacaacatcaacgtatggaacagtgttaacagtgtctacatataatactgtgcttagtttttggcctgttgtagttgtgtcacttttctgtctctctggttgagtttccatttttcatgatgaagctctttctcttttctttttctttttttggtgttttaattatggtcttgccagaattgaattttgatcaaggtttctaaaaatggttcacggccgcaattttgattctaacgcaaggttttggggtgtctgtgactgcaattgtggtcacatcgatcacatgtttcagtaattctccgtgactgtgatcatgaccataatttaaaaccttgatcaaaattaccggttgctgctgataattgtttgctattcttgccttatacgggttggatatggatgtgtatatttgaaattcggttactgagattcccttttttttttaccatgcactgaatttgatttatcagtgttgttttgacttttgaggactaaacatgtgttactgtccgtgttttggattatttacaaacacgattttcatcagtttgatttaaaaagatgcttttggttaaattggagttgaagacaactgatttacatttagaaacttttgtctcaaaagcaagtttgtttggacctttttacctgacgcaaaagcttttttttccacttctacaactcaattctaagagcaaagttgactttagttagtttagttacaaccaaacttgttaatgtttgttgagtttcccccacttcccttatgtttatttttctatttcattcccatttattgtagatggttttctaatataaaattaaaattaaggagtgaatctttggttcattcacaagataagatagtacaaaatgagaaagtctgaatttcaatgaatttggttccttgcag

SEQ ID NO: 23158 - DNA, 687 bp, Glycine max
  Intron number 1 from transcript Glyma06g13200.1 (locus Gly ma06g13200) derived from phytozome v7.0 (chr-ID Gm06; pos 10357268 to 10357954)
ttcttcacgctctctgcttccttactcctcttccggtactctttttctttttcttcttctctctctctcaaccactctctatatactttttcaatctttccttttctccagtaaccgctccgtcgctttctccctctaattattttcttcttcttcttcttctcttgtttcaacttggctgcgaatttgactcttcggtttatccattaggttatttaatttgtacaagggtagaggatggagatttgtttttcttttatgaaattattgtttttattgttaagtgtgtacttggaattttggaatttcgttcttgatgattattgattaataatacactgtttaccatgatgtgtactagtatgtgagtgtgtgtgcctgacaaatttgagggaaactatatttgtggatatcatgcttcttcttcttcttttaatgtgtttgtgtgtgttgtcggccattattggaagttttatttcattttgtggatttattgtgattttgatttttttcgcttatgtcggatcaatatattgcaaggtgcttgggcggctgattttttttaccctattgttgttgctatggataagttgctcttttttttttggtcgatcattggagtatctaactgtggatgtctctcttgtttttactatttcaggagtaggctgtgagattttgaggttc

SEQ ID NO: 23159 - DNA, 873 bp, Glycine max
  Intron number 1 from transcript Glyma06g39760.1 (locus Gly ma06g39760) derived from phytozome v7.0 (chr-ID Gm06; pos 42669069 to 42669941 reverse strand)
aaaacaacacatcacgcagatacgataccgtttcggtaagccatcttttttttttttttgaaattctcttcgcgctgctcatgcgtgttgcgtgatacctgttcccacttcgcgggtgcaaggccctgtttggaactccaaataaattagcttttgtttcttcgcttttggtgcgaattcgattctgtggacgattaaactgaaaacagttggttatgttaatgtttggtggtgctttttgttttattttagaaagttaactctcttttgttatgtttataataatttagcttcgttgttgatgttcgccgaagttggttgaaagttcaaaacagcgtaactaaacgacacgcgtaacgaactttcgtgttgttcgaggataatggtggtgagagattgcaagggtttaggttttcgttttctcgttaggaggtgatggtggatcgtcattaccgtcttgcttttttgcttttttatttttataaatatttaatgttttaattttttttatattttttcaccgttggtgttagctgttttgttttttattacttaaaaatttatatgaacaaaaacttagatggaattctttagctgcttttggtattcatctttaattagaattcaacttttttttttttataaagatttgcattataaatcggcatagattagctgaatgacattgtttgattcatgtagtggatgatttcacctagtactttaattttgttattgttatatggattattaaaatgaaactctaattcttacatgattataacactatattttgtccaatttatgtatttggaaacttgaatttgaattttttttatgtgtgtgataaaaatatgcagttgggaaacagca

SEQ ID NO: 23160 - DNA, 944 bp, Glycine max
  Intron number 1 from transcript Glyma07g07480.1 (locus Gly ma07g07480) derived from phytozome v7.0 (chr-ID Gm07; pos 6175870 to 6176813 reverse strand)
cctcggggattccgaggagttcaagtcttcttcctgtactagtttcattttctctctctcttttttttttggactaaacttagatgaagggacttaactgttttaacttttaagcgggtttttccgattagaattagagttttacggcgatagcacagataacaaatgttcatattaaatgtcaacataagttttcgaagtgaaactctaattctgatcggataacaatactaaaataaacttatagaattgcatcatctatttttctcttctttcgattaattaataggtgaaaaaatggttattcttttggtgaacgtgtgtgtgcccgcacacacacgtgctcctctattgttgttttggatctcggaatttgaacttgtgtgccatgaagtttctgtttttaagcagccgagaaaaagggtagaagtgtcaagaaaatttaaattggagtttgagaatttggttaagtgctagagttctcaaaatcatagctttctgttttgggcataaccgcatagatattcagcaaatatccatttgtttgtttgtgtgtgcaggtttaacttttgaactaagattgcactttctctcaggccttaatttttcattgatgtattgcatttaggtcatgatttgattggttttatcaacaaaattagcacgtgtcaccaaaaaaaataaaataaaattagcatctatatatgtctcacagacacggcagattttgaagttctgctgctaaatgtttgagctaagaaactgcttcattcctcgtcaatgcattgcatttcaggtcactagtttgcgtagttttctataggtttttagcattatggattttcaagtgctactatatatcggtagatttttcttcatgcttattatcaaatggagtggatgaattggaataatcccttgtgtttgttttttagctgtatcga

SEQ ID NO: 23161 - DNA, 477 bp, Glycine max
  Intron number 2 from transcript Glyma08g21030.1 (locus Gly ma08g21030) derived from phytozome v7.0 (chr-ID Gm08; pos 15968495 to 15968971)
aaaaggagatacaagtttgaatttttatatcgacttctttattttcgtttcctatcaatatggtgttctgctttatggttttgcttacttttgcagatactgctcttctgatctcagtttaaaatatatggtcactactccttgctgttcagtttgccctttagtcaagaaatttggccttcttaatgattttaatcactttttttgtgtaaactttttgttttacgattccaatcatgttagaatcaaacatatgttctgtttataacttataaggtttttgtgaatgaaaagagaaagaaagttggccaacatatcattctacttgaccaatacagtctcccacttctgctactttactatgaaatatgaattgtcttgttctcttgtttccaccctgtcccagatttatgataatttcattatttttgtgtcaaaatagggaactgtagttcttgttttccaaccagcagagga

SEQ ID NO: 23162 - DNA, 562 bp, Glycine max
  Intron number 1 from transcript Glyma08g11280.1 (locus Gly ma08g11280) derived from phytozome v7.0 (chr-ID Gm08; pos 8233563 to 8234124 reverse strand)
ctgttcttccaaaccaggagtgtactagtccacttccattgtaattaccctcttctttctctgcagcttctctgtttatcttactctaacacacacacatacaccaaccctccctctgttctgcttccattccactaaagttttggtttttctggcctctccattcttcttcttcctctgggtttttcacttgttggattttcttactctctttcattgtcaatggataaccaggatcaaagaagaactcacactgcaggtgctttttcttttgcattttctctttaaagggtcactgccctcatcctcttttcccccctttcttcttcctcttcttctctctcttttcctttccatattccattattatgttattatattattttgttactttggtgcttttcttatgaaaagtttttgtctttctggggtgtctggttttggaagttgtgtctgtgttttttcttttcaagtgtttcaagtttctcaaggtgaagatttttatggtcttatttttttaatttttattttggaaattttgatgctgaagggcacgagagtc

SEQ ID NO: 23163 - DNA, 883 bp, Glycine max
  Intron number 2 from transcript Glyma06g13010.1 (locus Gly ma06g13010) derived from phytozome v7.0 (chr-ID Gm06; pos 10146223 to 10147105 reverse strand)
aactcgacgtggtttcttccaataggtaattggaatttacaactattgctcttacatttcttcaccccttatcattatttgtatgtgattgcttacatgatctagccacagggcatgtttaggtcgtgcatttccacttccaagtttcaacacaaaaatgctcagactgtggagcaaaagtaaaataaaatagcgatgcctttctggtctggattaaagtagtgtttccctgaggatttctacaaaatgtgtttataattttgtatatacattgctcacaaacaattaaatttttttggcaatccttcattttgaaattaaagggaaatgttaacctttgttgtgctggtatttcgtctttgtctatctccggtatgtaggattatatctggtatgactcttgtagctgtataaaattattgattatgtatgagaattatggtgcattgctaatgggaattctaagtagtttgttataccatttaaaagatattctttgactcctataaaataaagcatgctcctcattaaaccatttctgaagttctaatacttgcaaggtaggtcctgatgtgcatgaaaatgacacctgggtatacacacactatatacctgcatggcagatgtatgcaacaccactgcattccctaatcccttgactcaaggaattattatatagttagaattgtaatgacttatgcctttttgtaacattttctgaccccaagtttaaaattgtttatacaactttgattagtgttttctgcggtcttcataacaattttgctgattcgtattgttttaacagttaccgtgaaacttcctcgactttaaatctatcactaaatacatgttttgcaattcctttgtaggtttgagtata

SEQ ID NO: 23164 - DNA, 651 bp, Glycine max
  Intron number 1 from transcript Glyma06g09370.1 (locus Gly ma06g09370) derived from phytozome v7.0 (chr-ID Gm06; pos 6912477 to 6913127)
tctgaaacggtatccaaaagatactattgtacattgtaagtacgcacaaacacagctctggttgcttccttttgtgtctgttgtgttctttgactatttaagcagtatcatcgtattaatgtgtggtacatcattgaaacagtgcatcgttgatgagagattttctgttttttattaagagtttgatttcaatgtaccatatgtaccaccattgtcaaccaattagaaatcgtggtatccgtcaaattagattttacactgtcaaagattttatccaatcaaatcatggggtaaaacattttatgcagtcaattgtcaactaattagaaatcatagagtgtgatttttccatagatgtttctatcatgaagtaaccacatatatataggagacaatgactgccagttgaagtttatcatgaatgtcggtgaaaattgtttctcaactcttgagactcatttgtgcggttgcaaactagaagcaaccttcatccccagctcttatttaaatgagcttaaaaagttatgcggtttcaattatcttcattctaaatttctattctctattacattcttcaaagcaaaattggcttccaccatttaatggaatgcatcaccattgtgaaatgcaggcagtgaacgcaattcttcc

SEQ ID NO: 23165 - DNA, 1017 bp, Glycine max
  Intron number 1 from transcript Glyma07g33180.1 (locus Gly ma07g33180) derived from phytozome v7.0 (chr-ID Gm07; pos 38100059 to 38101075)
tccttcggttgcactttcacgattgcatagtaaatgtaaattttgttacttcttacacttcaaaatgaacaacgcacgtacttaatttgcatggctttatatgtctttctgttagactctaaatcatactagatcacactaattagtagttgttggcggaattttcataaatagaaatcataattttgatgatagaagcatgctgttaattgattgacactagaaatatagtattagttgaatacttgaatgtgttataattggtcctcatccacaaaagtttattcccactacttggccactttagccactggctaccttcccagttcctatatctatatttgttttatgaacattaggtagacacaacacattaaatctagaaacttccttagttttccttattaattctattaataagaacggatcacatacgcatgcatagatatagatttgaaatgggttacagcgtactgctcattccataaacagatcagactacttaagattttctaacttctaacatgtctacaattttattgtggtggaaatctttgtgtgtctggggagaaaaagagaaatgaaagatgataataaaatattgcaggaaagaaaaatggagtgaaaaaaatagctgtatgataaggataacccatttttttaacagaatgataaactagttttacattcattcaatcacaaattatcgttgatatgacttttgaggtaattatgttaaaaattggtaaacttgctatttctgatagtttgtgatcgaacaattgcatatgttagtgcattagcctttcttctttcacactgtctctcctaaccttagttacactgatatagtgaaggttatatgtattgtctattaagtagtaaccctcttctttatattgtttgcattacatatgcaattatcacatttggtatatatatgccatgccactataatcataataacatacacggggaagaaactaattatgttcaattacttgtcaaagggctgtg

SEQ ID NO: 23166 - DNA, 451 bp, Glycine max
  Intron number 3 from transcript Glyma08g11760.1 (locus Gly ma08g11760) derived from phytozome v7.0 (chr-ID Gm08; pos 8571212 to 8571662 reverse strand)
aatcctgtaagttagttgctttgggaggtctggtgccttagtgttatcatctcattgtttttgttgaactttaaactgacttttttttttggggggggggggggggggtggcggggattgaaggcataagatcatatgataaataactgaaaactgccagtggttgaactaaagctgtagataacatttctttgcacattatcacattgattcttatgacagactatggtttgtagaagagagataattctaaggaatctgttgtcacattaattgtttgaatttaattgtaatttactttgttctttctgtcacaatgatagggtgcatgtgtgtccaagtggaattttttcggaattattgattgttaatgcatgttctattctctttgctttatctatttggctctctgaatgtttctgtggctagctagtcagaaatcacaaggaag

SEQ ID NO: 23167 - DNA, 515 bp, Glycine max
  Intron number 2 from transcript Glyma05g08790.1 (locus Gly ma05g08790) derived from phytozome v7.0 (chr-ID Gm05; pos 8677578 to 8678092)
gccaaggaggtaagagtgttgttcttgtttgaagtttttatattcttcatcagtttcctgattccgtttggataaacttctcaaccagtaattataggagaaaaagatgaattaaacatctcttgtaagttaaaatcaaacttttatgtaaaaactctctcgtttaacttttccaaaagctggggttcataagttaattttaacttactttgattcactttgctttttgttttcttcctctgtaagtgtttattgagaagtttatccaaacttgtggttgggattgggaagctgaagctcaactgggaattacaattatatttttttaccatgcactttcaaattccttcacctgtttatagaatatatgacaaatagagagggaaagaagatggagatgaatttgttattgtatcattgtaacttaaatgctgcttttcaacttttaactatactactacgttgctataactcttgggttagttttgttgttttaagtttattttagttcatag

SEQ ID NO: 23168 - DNA, 760 bp, Glycine max
  Intron number 1 from transcript Glyma06g09170.1 (locus Gly ma06g09170) derived from phytozome v7.0 (chr-ID Gm06; pos 6753079 to 6753838 reverse strand)
cattttgcccactacgtatatattgtcatcttgaggtaagtttatttattgtatttctctatcttttcattaggtttattacttttttttattattgttgctattttaatcttttataatacaagttactttatgttttctttgaattaaaatataaataaaagtttatattatatacgttaactttttgtttggggtgctccaaactgaatttggagagtaaacttagttttataatatatttattatcctcaaaagtaagtttgtaagttaaaattttgcttcaaaacttattgcatgtttggattaaaaagtttgtaattttaagtttgattaaacttaattttacaaaaataactgagtcttacttttaagactaaatttcaattagcaaacgtacttttaaaggataactaaatacgtcaaaaattgaatttactcttcaaaacgtttagcaccaaaaagtattttttgaatgactaccacaaccctcaattttgtagaaaagacacttgcagcaaggttttttgtggattatttatgaataattatcataatgttttttattttttaattttgtttctaacaaatggattctgtatcattttaatttttgtggttgcaagagtttgcgcacttccccattaactctcgtgatgatgcatagaatacttgcttggctatatatatgcacataaagttcgttcaataactactatatagttcctctatgcatgtagctacactatcatagagaatc

SEQ ID NO: 23169 - DNA, 745 bp, Glycine max
  Intron number 2 from transcript Glyma08g20450.1 (locus Gly ma08g20450) derived from phytozome v7.0 (chr-ID Gm08; pos 15479187 to 15479931 reverse strand)
gattttttgctcggtaaatcccttatcttttttggttacatgttcatttatcatgagaaaagcaaatagaaaagatgactagttagtagttaagctaacccttccttttcttctgcatgagtgccaaacttggtaaattttaaaactctagcggagaacgtcatcatcctgcagcatactctctgactatgcaaatgcctaatttatgtagaggatttgaaggaattagatgatcaattattcttgatgcctcatacaatttcgttataccttctattgctttcacttagcttgttggcataggtgaattcatagcatggaaatggccaagaatattcaaaaaccttttcaattaataaaaagcaaaacctatgcctgaattatgaacagattgtttcattgaatgtgacaatacgtttgagtgctatctttccttttgttgcctatgcctctagacagtggttgctttgtttttggcatagataaatgggtgtcttattttatactatgaccaggaaaagtggcatatgaaatgcatccttgttggctcaaggaccattgcttttttttttcttgtctggcatactcgcttgtgattaattggatagaaatggtgaaacttatatatagctggtatgcaaatttgcatctgtaatctctaaaacacaactatgctgtgtagatgacataatttttctttacatgagcaggaaagcaaccaagggtggcagaagagtaattgctc

SEQ ID NO: 23170 - DNA, 966 bp, Glycine max
  Intron number 1 from transcript Glyma08g04310.1 (locus Gly ma08g04310) derived from phytozome v7.0 (chr-ID Gm08; pos 3026292 to 3027257 reverse strand)
ctcgcccatcccttgtggttagagatacggtgagtacactttaaactaatgatcttctaattatattgttactctataaactaatcataaccatttacaattggataaaaatatgaacacttttacaccagctatatatattgaactatttactcattaattgttgtttctataaatatacattagaaagcatgtgggtgttgctcttactttcagttgactgatcctcttaaatccagtttaaatgtgttccggtccaaatcgttgcaagaccctcgttcagctggaaagagtgacgggtacagagtctgctaatatatggagtgaatcatgatatgaaactaggttcagaaagattgtacagtattaatttttaaggtgtgtctgtagagaaaagagtgaaaaaaaaataaacagtaaaataatataaaattcatatttttatactttaatttaatttaaatttcacgcctaaagtttttaaatgtgtattttgttgaagtttgatttcaaatatgtcttctgttattcaacttagtctcatgaattattgtgagggccgaatacaaaccccaaacgtcattttcattattaaagaattagtatgacagaaattgcatcttgcgaaaactaatttaattatttttaaaatttaactcgactattaactctaaataaagacactctttaaaaatgtttttttcttaaactaaaaatctctcaaaaatgtttttgtcatggtcctcaatagttcgcatgcgcaaacaacgtcagcaatccaaactttttatattgatagtatgttcttttctctcatcgaatcaaaccattttctatgtaaatctccggaagcatgaaaagatgagggttactaattttcctagaagtttattaagcaacttttatgatctttaatattaaacgtgatattttctttttatgtaggtgcatatcttgcctcagcag

SEQ ID NO: 23171 - DNA, 578 bp, Glycine max
  Intron number 1 from transcript Glyma07g17660.1 (locus Gly ma07g17660) derived from phytozome v7.0 (chr-ID Gm07; pos 17412965 to 17413542)
gactgaagaggagcacaggtaattcattgcatatcataaccttttttgtgtgtgtgtgttttatgccttcagcagcgagcacaatttagatcaatgttcaaatttatgggtaatttaattaatgaataatcattggttagctagaatgttaaaaaaatctatatttaagactcaagaggtttctttatatccaaggttttaagaatgatatgtgactgcaattttagctgcaatattaaggtttttgaggtatatgcaaccgcagttactatcgcatttatctgtaatttccaactctatcaagaattgtggcaaaactacaaccaggatagtaactgcaatttaaaacctttttttataggtattctggttagaatggcttgtgtaagtatttggttggttgagtgtttataaataatgttcttcttgattattatgtgattttgccatgtcacatgcttttcttgctgattctttgcatttgcatatatgtctcatgttcagggtttttgctcttaacctattttaatgtctttgattaaacaaccacagacaatttctgctgggtctcaagaagt

SEQ ID NO: 23172 - DNA, 481 bp, Glycine max
  Intron number 2 from transcript Glyma05g27880.1 (locus Gly ma05g27880) derived from phytozome v7.0 (chr-ID Gm05; pos 33732481 to 33732961 reverse strand)
ccaaggtatgatcatgtctttgattattttgtatgctgttttgggaattctaatgctttttgtatggtaaattggcaattgcttttacagcgtgcacagtcctcatgccaaggtttaattgaagattcaaatctgttttgtattaatttctttatgttcttcatttaattatgtaggaaatggaaacccgtttctttattattattttcctagttattgtatgcattcagctaagaaaaacagttgaatctgtctaccttttaaggtgcatgaacaatctttttacattgtcatcgtatcagctatttaagcaaatgtttttcattgctggcctaatgaaaaagaaaaacagtaagggcctgtttgagttctgtttttcttgctctggttttttgcagtttgtatccaattcagttacaatttatttttattgtctgtaatgtagtctgactaatatctatctggtttcttatgcagttac

SEQ ID NO: 23173 - DNA, 759 bp, Glycine max
  Intron number 1 from transcript Glyma05g27880.1 (locus Gly ma05g27880) derived from phytozome v7.0 (chr-ID Gm05; pos 33733030 to 33733788 reverse strand)
gtgatttttacttattactattatttttcagctcggtatgtcgttttgcttctaaaccctaatcctaatcctaatcctgcagattttactttaatttgttttggtgaaagttctggattgatgaaactgctgtatcttttaaaatcagtgttctgcttccgatggattgtgatgtttgtgttgtttccaagtgtgttttgaaaatttagcgacgtgtacaatctgtcctttttttttcttcttttggcctattattcagttcggtagaaaagtgttgcgaaagaagaaagaaaaaaaaggttgtttgctattttgggaaaaaaattgagggcatggcaaatctaatgcctgcttggcttttttttccctcttgatttgctagcttggtagccgttgtttgtttgtatttttttctctgcctaaatggaataaccatgcctgagatatcatgatattttataatttaataatttatgctcagcaagtaaaacaaggttgagtttgttgttttctgcttcctgattctttcgaagtttactgaaatttggttcgtgtgtttggcctttagtgatttactctctgcttacttcataataagcctggatgtaaggaaaaattagagaaagggatggtgttttgaatttcgattctgagctgattttttattgttgtttttttttgttaacttactttctttccttcctttccctttttggttctgcagctagaatagttgaagattatttggtacctaagtta

SEQ ID NO: 23174 - DNA, 599 bp, Glycine max
  Intron number 1 from transcript Glyma06g18660.1 (locus Gly ma06g18660) derived from phytozome v7.0 (chr-ID Gm06; pos 14953626 to 14954224 reverse strand)
gaggtgaaatatttgtttatttatttcttttaattttatattgttcttatgtgaaagttttctctcttttttgtttttttttcttgataggggcataccaaaagtataaaaaaaaatgttagtgctttaaacatatagcctggttaaaaggttctgatctatcaatattcttgtgcatgaatgccttgatatttggtattttgttagatagatttgatcttatagttttacctttagcctagggctgtcctgagtaatttaaccttgttatagaattgattttaagaatccaaataaggaaaaaaaggcttattttttagcctcctattctctaccctcaatcttcccctgcttacacacaaacataccattaagagcataagagaaccttgcaccgtgccttttccttcttcatattttgggagcttgtgcatttgtagcagtgcataacatacaactcatctattttgcctattactcttttctttctagatgtgccttttatgtcatttagaatggagttattgtggcaaaattagcttactgatgcagatcccttttaaaccatacaggaaattattcagtgttcaattacactg

SEQ ID NO: 23175 - DNA, 571 bp, Glycine max
  Intron number 2 from transcript Glyma07g37170.1 (locus Gly ma07g37170) derived from phytozome v7.0 (chr-ID Gm07; pos 42319959 to 42320529)
gcaagccgggtttttcttcgttacaacttggtaagaacaaaggcataagttatgattttttttctcacctattacataaaatctagttttttatttcaagaaattatcttatagtccagaatcagtactaccatatatctatgttcttgagcaatctccacgtgataggtaactaatttttattaactctttcttataaattaaaaaacttagttatgtggcatgtgaagatggatcaaaatcatagacacgtcatagtcctgaaccatcaaatgatttctcctctctgtgtttcatgttatcagagtttttccagattaaaatggaaacatttcacaagtgctaattcagtaaaatatatatgttgtgaagattcaccaaagatatgtatattcatttggccggtggtggaccaaattgaattaagatcaaaaaataaatgtgtgtttgtaacttattattttcatacacatgatagccattagcactgaacaaaagtgaaaacatgtcgcttaaactcgtgctatgtgttgtaggatttgctttgcagttggagagattctgctgttgg

SEQ ID NO: 23176 - DNA, 520 bp, Glycine max
  Intron number 3 from transcript Glyma08g39480.1 (locus Gly ma08g39480) derived from phytozome v7.0 (chr-ID Gm08; pos 39012144 to 39012663 reverse strand)
gttcttccataaaaaggtggtcaagaatcatcatagtgctaactaatctctgcgtgacatgtaacgaagtgtagttaattctttctaataacttgaaaaacttgaatacgtcttacatagagattgtctatctgggatcataaactcatgatggttcaagactacctaacaatttctcctttttaggataaccctagtggtcgataaaatgcaggttttgattgaagaataatatcaactaccattatcgttaagttgtcattttagctatcaacaatactattttgtatgaatgagtttttttcttcttctggaaattgtaacaaataattttttaactaataaggagaggagtgagtgtctgaatagggagagaaattatggttttgagagagagaaatttcactttcatgcatgtctttcaccacaagttttcataccaatcagcatctctcttttcttattcattgccttgctacgtttgattttcttgtctaattgtgatggccatcaggtgtta

SEQ ID NO: 23177 - DNA, 343 bp, Glycine max
  Intron number 2 from transcript Glyma07g13230.1 (locus Gly ma07g13230) derived from phytozome v7.0 (chr-ID Gm07; pos 11783270 to 11783612 reverse strand)
ctcccaaggctgtgtttccctctgtaagtgttttctctactctttttacctttctaaagttttggatttgttgttgtgtttattgtttttctgatattgttttactatttatggggctatagagtaagaaatgttgttatgctctcagttaatggtaaagaagacactggcattttgctgtggtgataggctagtactgcttgatagtgtaattaggtgcttgtataaattttagttgattagaataatatctggagaaaatgtatgggtagtttgattgttgataatgaattggtggttgttttggcatatgcgaacttaggttgttggagcaattgatcaa

SEQ ID NO: 23178 - DNA, 1034 bp, Glycine max
  Intron number 3 from transcript Glyma05g24570.1 (locus Gly ma05g24570) derived from phytozome v7.0 (chr-ID Gm05; pos 30731484 to 30732517 reverse strand)
caagtaagacactttatccttgatgcttcatgcttgtactaaactacccaaagtttggagtgcaatgaaactgtttagtcttctatgaacaaagtcaaacctgcaaataaatagtctagaaaagagaaaaattatggtaacatccagaaagaagcctgaatgagttcctacactgcactcccctaaactattatgcttggttttttgcttgcttagtcgcactcttaccctcaaatcccattaactgggatctatcttgcaatgtgctaccacttcaaaaggaattagtgtataaagtcactaacatgctctagttttgtttaaaaactgtatgaagctaccaaataactaaaattgtttttgtttctactgctactcaaacgctactcaaactgttcactgaagttagaaagttgcagacaatatcatttcgttccaaatttttcttgacacataggttgaaggacaactctgaatagtagttgagaatcatcagatcaaagaattggtagcacttaaaactagattacctatatgtaaaatatttaagcacacttggtttttctttttcaccatgtgttgtagccctgtaggaggacaatggattccactgtaaaaagatctttaaatatctatgtgggagtttccaaaaaaaattctaaacattagaaaatagagtttggacatagctttcaacctggctcatggatagcctggtccatgatttcttaggccttcctattagctgactcatcattatcaaagaagctcacttagtatttctctgaaccagatggaggggagggtaaattttaaaatgaatttcccatatatctgctatatgggattccatcatttactgcctttgaagtatttatgacatgcataggtgggtttactaactgtatgccaatcttatactgttgccaaaacattaagatattaaacttattttttccagttcagacgtgagtaattaacctcacattttttctgcaggagttgtggtcgtgctaggcttccacacttctttt

SEQ ID NO: 23179 - DNA, 920 bp, Glycine max
  Intron number 1 from transcript Glyma07g13120.1 (locus Gly ma07g13120) derived from phytozome v7.0 (chr-ID Gm07; pos 11606285 to 11607204 reverse strand)
actcctcttccgttctctttcttcagcaactcaaggtatgtgagagtgaaagagagagatagatgaatgttgcaattttatgaaattctgtttttaattgtcaaaagtggtgaaagaattagcatgtttagtattagtatggattttttttttttatttggtgtgtgtgtgttttaaggatagatgaagataattttgtggtttagaggttttgttagtagtcttagtagttcgattccgctttgattcttgaattgaagtttgattacacttttaattgatggaatcagtagcagtagtagtagtaattcaaccttactcttataatgtgaaatcattgttggaattttctagagtcctgttttcaaacgtgtctgattgattgctggttgtttcggtgttggaattttctagaatcctatttttaattgtggaaactggtgagagaattactgggcttagtaattagtattagtatcaaggttttaaattgtggttgtggttttgttgcgatccctgatgttgtgggaaattgcagacaaatgtgttgtggatcaaattgcggttgcacaccatttattaaaaccttgcttagtagtatagatatttttttttctgtgtattaaggattggacattgatgaagggattttgtggtttaagagcatggttggatgtccgattccaataatgcaaactgatgttcatacattccaaagcatgaaatggagaagcaaatttttttgtcattcgcgttgaatgtaggttttgttaatttaatttcaactgataaccaaacacactcccgatgttttgttgttggtctaggattgtgcttttattcttaaattgaagttaaaagatatgtgttttgtgtgttgattaaccagcaacgcaactttctggtaacaattggggagg

SEQ ID NO: 23180 - DNA, 693 bp, Glycine max
  Intron number 2 from transcript Glyma06g42640.1 (locus Gly ma06g42640) derived from phytozome v7.0 (chr-ID Gm06; pos 45934056 to 45934748)
cggtattcctcttctcattttatttatcacttatggaatatttttgtttcaaaatatttgtcactttagaatatgaaaaaaaatattttttttcttctgatacttttagacttaaatttttttttattctgatatatgaccaattcttgtatggttttcaataaactttttaaacttttttttcctactaaaatttaattagataacactttgggaagtaatttgggtagctcttgagggattataaacaaaacaaaactttatcagagattaaggacataaaacaaaattgttggaaccaaaattgatcatttagaaatacaaaatatatttaagtcatgcttttcagaaataaattcactagtatgttctgtaaaaaaacattcactagtatgtgtataatgtaattaattatttagttagataaggttatattatcacaaaacttaatataattatttattttctcaagatgtgtgcattactttaaataacaaataaaatgagagggaaatggagggtaaaccaaatatctcatattatgacaataacattgtgattcttctttccatgctcaaacactttaataatattccattgtttcattagaatctaactatgctaaaatatcaactctcttttttgtttgtgaaaacaggtagttgttgggcattttcagccgtggctgcgacc

SEQ ID NO: 23181 - DNA, 811 bp, Glycine max
  Intron number 3 from transcript Glyma05g29760.1 (locus Gly ma05g29760) derived from phytozome v7.0 (chr-ID Gm05; pos 35268500 to 35269310)
caaaatctgcaatagcaatatcaaaatgtaagaagcagcattgttcccttattttctctcttctgccgttacaaatcgatgatgtataatttgataaaaaagaaaatcgatgatatataacaatatcaaaatgcaaaatcacttcatgatctataatacattaatatttaatactttaaatttcttttaaaaaatataataaatttacaagacatttaatattttttatataacataatactaatatatttgcactgatatagttttgttctaaaatatgattctattttttttaattttagtttgttacgtttaaaattaatttattagttatttatatataatgtttaagtgagcacattctacataaaatattacattgatcaagaaattattggtttaaatggtcttgagtttagtatcaaatttgagtcttatgaataaaaaatgtgattgaggaaaaaaatttactaaagatgtaataagcataataatactccatattaatatcatggtgacaaaaaaaattatattaacatgaccttgacatgggcgttagttaagatatgaccagtcaaattctgatgcagagaaaggaatcgattaaattttcccatgaattatccaggactcttgagctctctgtcaaaggggttttaaatcacatgaaaaggacaaaatcccccatatttttttttattatttgctttgtatttgtggcaatttttaagcttaattgttttaactattattcttttgaaccttataatgatgaagtatgtatgtttctgtttgtttgtttggtgaaggc

SEQ ID NO: 23182 - DNA, 884 bp, Glycine max
  Intron number 1 from transcript Glyma05g08670.1 (locus Gly ma05g08670) derived from phytozome v7.0 (chr-ID Gm05; pos 8547282 to 8548165)
aaggttctctttctatttccctctcttttctttttaattgttctttgttgttgtgtcaagaaatattatgattactggcgtttggattctgttttgcattcggtgctgcttggtttctgtgaaaatggaggaaagaaaacggaaaaaggacgggaaattagttgatccctacaatttatgttaagagtgtgtccatgattggtgaaattagttaattgagagtaagcatgtgtatatgtacgcagaaattttaattcataacaccaagtaggcgcaagattattttagcttaatcagtaatttcgagttcgagttccaagcattccaccatgtaggcacaaggttgttttagcttgatcggtgattttgagttcgagttccaagcattccaccatgtaggcacaaggttgttttagcttgatcggtgattttgagttcgagttcccagcattccaccgtgtaggcacaaggttgtcttagcttgatcagtaatttcgagttcgagacccaagtattcggaggaagagctttgctgcttcccatagtattctacctagctcgaacaagattatcttttgtggatgatacttgtggtttcttataaacaagatagatgttaattcatgaaatgttgattttagatgcattttttaaaaaggtgtaatgtgcaaaagaaaaaaggattgtgtctttgattcgatgagtaataattgagtttgaaaacattgttatgatattttagttgctcttgttttgtcattatttttttactttttttttaatatgcagctgatatagtgacaggaattagcgtttatgttatgctataggaacgtgaaagatggttgttgtgcttttttatttcttgtttttgctaggtttta

SEQ ID NO: 23183 - DNA, 570 bp, Glycine max
  Intron number 1 from transcript Glyma08g11670.1 (locus Gly ma08g11670) derived from phytozome v7.0 (chr-ID Gm08; pos 8499194 to 8499763)
ccgccggaatccactatccacgcgccactcccgaggtcaatttaatttaatttaactcatcatcagtcatcaactaaaataacactaacatgcaaccacaatttaactcaattatcttttttctcttttccatcaagttgagttacaagcttgtttgctctgtttttttttttttttttttgcttctgtttgtttcagtgccttaatgaatctcgttctggttcgttctcaaaagtcaaaatcctatttgcgtgtttggattactttattttgaagaagataatcactgttttttttttcttcctgagcatcgcgttatgacattattatcagcttttgagctttagttcttctgaatttcttcttctttgtacgattagcgaattgaaaattcttctgaaacaaaatcaacaaattaaccgcagctcttattatcagtctccgtcaacgtttttgccaaatttggagcagtgcaatatagtctaataataggatgttaaattctgtgatgttaactttatgaaatttattttgttaccgtggcttattatacatttggtatgattttag

SEQ ID NO: 23184 - DNA, 577 bp, Glycine max
  Intron number 1 from transcript Glyma07g32560.1 (locus Gly ma07g32560) derived from phytozome v7.0 (chr-ID Gm07; pos 37434264 to 37434840 reverse strand)
tgaagtgtttgttctccgtcatctcgcgtcgttaggttagttcatctctgccactgtcgttcctttttattcttaatttcttttctttaatcacaattatcctgtaacggaatctgttcgtgtagagtctgtcatcgagaaaaccgctttctacgcttttaaatttgtgtttttttttcttcaactgagtttttggatcttcttgaataaggtgatccttcaccaatttttgttcctttcgatgaatttgagagccgctattggcatttctgtccctgtacgcatgcgtagggattgctttatgttttaatattattgagacggtcttttgattcaattaatctctattaccgatcgtcgattttagccaattgagatgccaatttgatgcctctaacagtgtaattaatacttctcctccaaaatagtagtattatagaaaatgattagcataagtgtattaaaaaagacctgtttctatgtgtgaatatgttgattgttctgtattacgttaattggaactcatattgtgtatttgttagttcattgaactcactgcattgagtggatttggtac

SEQ ID NO: 23185 - DNA, 532 bp, Glycine max
  Intron number 3 from transcript Glyma07g08090.1 (locus Gly ma07g08090) derived from phytozome v7.0 (chr-ID Gm07; pos 6737820 to 6738351 reverse strand)
ttatcaaatctaaatttggaaaacttgatattctggtaacatgcaactttgattctcctctcctttttcttgattgtttggttgtaaatgagagtctgtcaaagcaatcctataagtctgcatgcaattacttttctgtttttatgattctgaatattaatttttactcttctcttagttcccattgcatgttggtttgatcatcttgctactgctgttattcgttgttagaatgttagttgttgttctgcatgttaagaatgcgcgagttctgttttactttattttaaaatttggcgtaaagtgtgttcatttaatgtatcagattatgttccttgcttcttgtattacgttaacatttggtgctaagtaagcttcagtttctgttttatcaatttgggaaatttcttacatatctagttatggagttatgataaattttcttgattgattgccttaaagggaatctcatgacctctcagtttggtgtatgcatatttcattaagaaaagttgtacaatgcaggttaaca

SEQ ID NO: 23186 - DNA, 1024 bp, Glycine max
  Intron number 1 from transcript Glyma08g04950.1 (locus Gly ma08g04950) derived from phytozome v7.0 (chr-ID Gm08; pos 3535329 to 3536352)
ctgaagacgaggtgctaatcttcctacacctttacgttttcggactttgttacttgttaagttctgcaacctaatttcccgttgtgagagaaatgacgtagagagtggagatttcgtggctggtttcatttttaatgacgaaacgatatgacactcttgtttcttctgtcggtcatttcctcttgttaaatttaggtcaaaatttgatactcgctaactagcttgaatatagattttgcttgtactgaataaattgatttgcaggctatgcatgcttcttaatcttctttactcttctgttattgttcgtgccaagagatgataaaatagaaaaaaggaaaactgtatcatatggcacttttgcttgggggcagtactattgaagcagtggatatgatttccttaaattgcagcggcgttttctgatctttatggttattctcattttttaatctacgcgtttgtgcacatgtcgtggttatactgtgtattgtgcataaaaaactaggtaaaaacctccttgtttgtgtcattatcactaaatatccacaataaaactgattgaatgctatgtagcagaaaaagaaaaagaccagattgaatgctaaatgctgatgctcattcattgctaaattgagcttttataagctggtaatggtaagttaatgtggttaactaacagcttctgatgcataaagttatttcattttctcctactagatatgaagtgatctttaactgtcagtccttcagtgcatttttttataataagttgtttagatgggaaagctttgtttcaaaatttaattatcagagcttcctataggtttcttgattagtttgatgactgctttttcttttgtaatgtgaaggctatttgctttggctgtgcttctttcatactttctcgaaagcattattttattaatttggctttgtcactcctgctatttttgatcattctgagggaaatatattctggaatgtaggtgatttttccagctcttgatatacgtgtgaagaa

SEQ ID NO: 23187 - DNA, 889 bp, Glycine max
  Intron number 3 from transcript Glyma08g05860.1 (locus Gly ma08g05860) derived from phytozome v7.0 (chr-ID Gm08; pos 4172986 to 4173874 reverse strand)
accaggccaatattatccgatatttccccacacaagtgagttattcacttcaccaacatcctgattgatgttaaagacctgaatccccaaccccactatttattttcactttctttctatttgtcactcctatgagttaaatggactattgcctgttataactttgtagggttttgtttctgctttttaatggaacttcaacaaaatgaaaccaaggaaagagaaaaagaaaacaaaagagtgagcatgacagttatcagggctgctgagtgatatgtagtaacttagcccttaaatatatcagggtaattatttcttgtgctgcttactaaaaatgcaattgcaaaccaattaatatacccaaattcttttgttcatggattttgtgttctctgtcatctatggaccttagatattcaattagaggtagtatctgttaacttaattttcctttcatccttgtttctttatctactctcaaattgaagtgtatgttatctcagagccttgacttgtgccaatttcttatccaaaatcatttcatgccatgatgtaacatttactgtgcatgcaatctcatccattgacatatgatcattccagtttgttctttgttacattaccctttgagcttgctttctgcttttcctgtcaaattgttaatgcttgtcaaatattattagctgggtcatggcccttccataaaataacagcccatacatatgggagagaatccatctgtttgtttttactgctttgtgttcccaccaattcctggaatcaggtgtctcaaataatagttttctttttttcttttaaaataatgtttgagcaaacagttaattggtctataggctttcaattttgcattcaaaggttacttcaaaag

SEQ ID NO: 23188 - DNA, 876 bp, Glycine max
  Intron number 1 from transcript Glyma07g34480.1 (locus Gly ma07g34480) derived from phytozome v7.0 (chr-ID Gm07; pos 39437557 to 39438432 reverse strand)
gccgaacaggttagaaacttgagattatactctttattattgggtatgaattaatttttttttttgggttggtataccccactcctgcaccctgatgaattgggtttgtattgagactagaggcagtgttcaattcaaagaaatattgttccatgcgtaatcaaaccgtgtttttttcttctagcagcaagatgctcattatgacacttgaaccttcgtactaggagcctctcctcttttgagggtatataataatatattgcttgtttttaatctttttcctaatttgttagttttgttagaaatgttaattaagagatttgatctttccttcctttatcattttccaatggatcataagtaatcatataagtaaatttgacattacatcttaacttaaaattttaaattttaaattatgagtcttctctttcatttatatgatattcaacttttttcatttttatttaatataaaattttatctcacacttgtattctaatatcctataatttgtgctataattctttacaaatagcttttatttgcaatggcaaaagcaacttaatataacaggaaatctcgtgaaaaagagcttcaaaggtctaagttcttcacatccatgtcttatgacctgttggtatctcttattttttaagtaaaccattattgcattttgaaatttaaggagtgattcaaatagtgattgtatgttagcaacgtcaagttgaataaaaaatcttgcttttcattggtaatcaatgattaaatttgctttttgccagtactatgtgtcactctcaattgcttggtctgagtacttaatttcatattgatgcagaaactgaaaactggtgttgtgaaagataacattaa

SEQ ID NO: 23189 - DNA, 897 bp, Glycine max
  Intron number 3 from transcript Glyma05g25060.1 (locus Gly ma05g25060) derived from phytozome v7.0 (chr-ID Gm05; pos 31216063 to 31216959 reverse strand)
cctgcagtcacttttatattggccatcttgtgcgggtacgtaatcactagtcataaccattatatgcttttttatttaaatatattatcactaaactctaatagaagaatttatagaccacatatatgtctataaatttatgtggatagcatatatatgccatagccatcatttcataaattgtaatcagcgatcaatgatgggtttagtgacttaaatctgactcactagctccaaaaagttgtattatgacttataataatagcaaacctttcctttttgtaaatagtagtggaggacgcgtataccttgtaaaaacatattggatgtcatcttcagacacacgacgtaagggctagtaaaaagttaatttaaatctatatatatttagacctatagtactaattaataaccataaataacattaagccgaatatatgtaataaaataccaaactcattaaatatatatgactaatatgaccatggactatatataaatctgtttttataatcaactaaatacgccatcaataacctaattaaactatttatttagttcttatttacattttaagttttagtccttaaccataagataaaaactattagaagttttaaactctgcacaatttttttgtaatagtttatcaccactaaaatgtttattagcagttttacaccggtagaaaaatattttctaatgttagctatgacggtcaaaatttaacttacatgtgtttgggattaaaacatacagttttcttgtataagtactaaaatttataatggagttataagggacctagtgaatactttaatctaatataaactaatattctactgtacatgagcatgcatgcatggtttggatgaattctttttgaattttttcagc

SEQ ID NO: 23190 - DNA, 420 bp, Glycine max
  Intron number 1 from transcript Glyma08g22540.1 (locus Gly ma08g22540) derived from phytozome v7.0 (chr-ID Gm08; pos 17113761 to 17114180 reverse strand)
gggcgtgattaatttcacaaaccattaacatctttttttcccaattaaaactaacgtcctaattagcatgttgggatatctttcaaaatcatggtgactatctcaaaactatgacattatcatgatttttctaaaataattatatgtttcatatttaccatactttcataattgattttgacttaccttcccctcatcccaaacatgttagatgtctttttaaacatgttagatgtcttttttgagataaaaaggttaataattaaacatggtacagcatagagttttttttccggccccaaatatttattttcttttcctaggtagataattttggtggggcttgcttattcaagttatcattttctatgtggttacttcgcaggctattcggctacggaattggaattcatttgctag

SEQ ID NO: 23191 - DNA, 857 bp, Glycine max
  Intron number 3 from transcript Glyma08g19590.1 (locus Gly ma08g19590) derived from phytozome v7.0 (chr-ID Gm08; pos 14803550 to 14804406 reverse strand)
tgcaggccgataggaaaaggcagaggttcaatcaggtatgtatccgttccctttctcattctaccagcctgaatcgatctacctcaattcgcataattatgaattcttgtgtaaacaattcaacttccatttattatctatgaattcaattcaaattacagtactgcctagcagcttgcaagtttcatagatcgagagaaaaaaagcgaataaatgttcatctttaacttccattcaaacaagtgggttaggtttgaccagcatacacacaacatataattctggtggaacggtgaaggatgctatccaccaatccatataattgcactggttatgttggattagtttaggtttaatcgcccctctattttgggatgagttcgagatgctttcttattcatctttcaagtcgtccagattattgtgcacacgcaattctcttccgtaaccattaattcttgatggattattcaatctcactttcacaagactttgaaatactcttagaattgttccatatgtcagttatatccttatccttggaattggaattttttttggaacactcaatacctgttatatagtatgtatgatgcatcacttcagtacccagaatttataatttttggttaaattggatatcaggagtaaaattttttgtttctagactttagagggtgaagtggactccctctttccttacaattgtactaagcatgacttcaataaatgataattgagcaacaaaccaccaaggggcaaggggcatgtgcactggctttaccttttatgtagttatttgctatttggctgttaatttgatccctgtctctcctttactcgtttgcctgcagctc

SEQ ID NO: 23192 - DNA, 1024 bp, Glycine max
  Intron number 3 from transcript Glyma08g23640.1 (locus Gly ma08g23640) derived from phytozome v7.0 (chr-ID Gm08; pos 18015899 to 18016922)
cagtaggtgtcgtggacaaggaattccgcactgaagtaagctttgctattgacatattctcgaagttaatatgcaattctgtttggatcagcttctctataaatatttatataggagaataagataacaagcatagaagtttattctgtaagctaaatttaacttgtgcattagtaaaatgagcttttggagaagttaaaattagcatattaatattctgtaacctgcaggggatggttggattttttgtattgggtgattggtcccatcttgtatataggttggggcaccctttgtgcccttcatatataatacaaataatttgctgagtaaaaaaaacaaaattgtttggcttcttcaaaaagttgattttaacttatgggagaaaattatttcattttttcttttcattctcttctcttataagtgtttatggacaaacttatccaaacatggtcttaatcaatgatattttgtttgattggaaaacaatattacttgtacatgatttgattaaaattgggtagttaataggatggttggtgattgcatccgtatcctctttctcatatgtatatatatgatttcttcttttggatcttgaagaggtgtctactcagtggccttcctcaatgaataggtaaatggctatggctgagtcttgggtgaaatcaagttaacatgaaatatcttcaaagttcaatttatttttttgttagatgtggtatgcttgaagggttgatcctggactaaaggagctctgtccaaaatgggtgacctgactttgaacttgatttgttgccttgaatgaaacctacgagctacaaattctagacaaactatgtttgccatgcaaatttgggccataataagagaaggaagaaaacgtagagattttttgacaaacatcttgagctaatattgataatgtatttaacactaaaaaaaataacactgcaatgagaactgactgatgtttgcactttcagttgtccagccttataacagaactggcatcagcagc

SEQ ID NO: 23193 - DNA, 913 bp, Glycine max
  Intron number 2 from transcript Glyma07g34800.1 (locus Gly ma07g34800) derived from phytozome v7.0 (chr-ID Gm07; pos 39811828 to 39812740 reverse strand)
ttcagtgcctacctgctgcccttgaggtggggaattttggttcttctggctatgttgcaggtttctacatggctttagtggatctcctcacactttacaatcgaattattgattatttatttttgttgtttctcttttggttctttgtttttagtatttacatataggtaatattttggcaccatgatttggatttatagatggccaaaaaaaaaaaaaaactatggaatgttatatatgggaaattttttactttctaaaagttttcacaattcttattaactgttcaggattgtgttgcaaataaacattgatttatcataagaaacaggtgctggttattcagaattttttaggtcactcaatggatgttttaataaggctaaaagcagaatggtctccacatgctgataaggcactgaacagtgaatatcatttattattctttggcctacaatgatctcttgtgagaaaatggttaagaaatttctagtatgaaaaagtaagcttctctcacaatttcacttatctttacattggtcaatttcctgggacttacactgttctgagtttatgtaaatctgagttgcattaacataaaattttccacatgttttaggtgtcaaatgctgatagaatatagtatatctaactacaatgtgttttttttttctgtttagtttttttggtaatttaattacacatattttatggattaacaggaaacatacaaatttctttatggtgataacctaacttatagtaaaatctatttttctctagaagtaccatcttaaagcaacaatggaactaaagcaatattatttaagatcttatgtttgttataatttctaattgaagatgctgaagttatctcttatttccaaacaggggccgggaggtgtttggtgtg

SEQ ID NO: 23194 - DNA, 975 bp, Glycine max
  Intron number 1 from transcript Glyma07g34800.1 (locus Gly ma07g34800) derived from phytozome v7.0 (chr-ID Gm07; pos 39813204 to 39814178 reverse strand)
cgaggccatttccattgctccaacattgctgatcggtgagttttctctgactgattctgcaaaattttatctttttcacaaccctttgcaatgagcgggttgcgtttttgttttcatactgattgtgcctgagttgagaatctttgtgttttctctctctttttcttcttcttcttcttcttcttcttttttctgagatgggtctgttgttgcacacactgtttgcccattgttccattttggggcacctatttcttgaaatggctttctgggtttgctttgcttaaatttcttttcctctcttctgataaaagcatctagcttgatacggggttcggatttttaagctgttattgcacgtgaagattatggattctcttttgtgcactgcatgatgactcgcaatttttcttctcatgggttcacttcgtatgtgcgacttgaagatttgctattaccttggctttaaggggatggtagtcctaatttttttgatttagtgcccaagtggtgttgatattttgtatgcgaatgtaaacttttgagtaccattataatatttgatagtatattttatgttttcatatgataaatttctggagatgggctggtatttgcaactgaagagcttgtgtgatgatgtttatttcccatagtttgtatttttcctgtctgtcgattttgttattattttgtgaaaacttgtggagcttcctgttcagatgtactggggcattccagtctgtgttgttagggttatgtacatgaaatagtagtctttgacttgttagggttactttatgcagatgaagtttaccccgaacaattttctccacctatgttgaagttttgttgaaaaatctttgtagtttgactataacaggaaatggtgttttgatttggtttagtggatctgggtcttcaattattaagtttgttgaagctaagtttagtgtgatgtaggaaaattgaccg

SEQ ID NO: 23195 - DNA, 748 bp, Glycine max
  Intron number 1 from transcript Glyma07g06050.1 (locus Gly ma07g06050) derived from phytozome v7.0 (chr-ID Gm07; pos 4747393 to 4748140 reverse strand)
ccaagtctagtagtgtctgggtaagattttcaacttttaacacactttattatgccttttttttttctctgctttaattgggtttagagatttttctcagtgcttgtgttatgatgtataaagcatgtagctttgtagcaatttatatcttggccgctgtggttttgaagtcaagcttccctgaatggctatttggtcaggattatgtagtgaagattcataatggttaggataggggaataggattgtaagaatgaggaatttccgtgaaccatagttactatttttgagtggaggaaactgtatataaaattctcttaggctcatagtcatattaaatgatttagtttaccaagatagcaatctcatctatttgtgtgttatcattgatctagcagtatgcaattggaatatttcttgaaatttcacatgatgtgtttcaaataattaaggaaaactactttaggtcttaaaaagaagaagtatttgtgtaaatttttaaaaaatcactaaggtgtcagcatagtttgtcccaataataggtgcttagaagttagataggaatctgaaaattgagggtactcagtccacttgaccaaagttgtaatttggggtagagggtgtaccataaaacgggttgatttgtgtcataaaattgtgtgtgtgtgtgttttttttttgtaagattctatcgataaagttaacatggtccctaatattgcacgggttttgatttctgcagacaagg

SEQ ID NO: 23196 - DNA, 723 bp, Glycine max
  Intron number 1 from transcript Glyma07g31660.1 (locus Gly ma07g31660) derived from phytozome v7.0 (chr-ID Gm07; pos 36621409 to 36622131)
tgttcttcaacttgttagcacacagcttgatcccagtacgtgatctcttcaattcattctttttaattttttattttttttttgtctatctaccctattcaacccatgaaaatcttcactgcaaagtaaaattggagttttgcttagtagggttatgtttgatctaacatattgttagatgggaggaaattaaatgaaagagtatgattttttatgaagttttattctttggttcaatttcttaaagaagagaagagggggagtagttttttttttcatctatttttttactattttccaattttttgagagttttgttggaaagaggagatttaaaacattctaagtgtatggactaaactatcttaacttatattttgaaataaaaaaactataaaggtatacaagtaatttagcttttaaaatatttcttctctccgggagaaaaaaacaagaaaattttttatcattaaatatgtgtggatcaattgggggttgatttattcaattttaagtcatccatatgtaattatgttgaatatttagatgaaaattttgattgtccataatagttacactcattttaaatatgattgttttcaattattggggattgttttaaatatgattgtctctaactactacaactatttgatatatatagtgtcggcttaatttttaatgtccaacttgttatgctgtaacattaaaataaaagggaga

SEQ ID NO: 23197 - DNA, 780 bp, Glycine max
  Intron number 1 from transcript Glyma08g14420.1 (locus Gly ma08g14420) derived from phytozome v7.0 (chr-ID Gm08; pos 10474873 to 10475652 reverse strand)
ggttccaccgtagaagacaagaagaaagagaatatgttgaccactactcactactaagtgtatagttgtgggggtttgagtattctcttgtcatgttggctctcttctttttttctgagttccatttgggcataaaaacataggatggtaaagtggtctattggagtttatcgattaatgaggattgtgctgtataaggatttaaaaaaaggtctgtaattttggctgcaatatcaaggtttgcaatgaaatcacaacagtgaccacaatttaaaatcaaatgatgaattagtttctttctttttgaacttttgatatattgggattaacttgatgatgaaaccctcactacagaataaaataaaaccatgctcagtttgagaaagaaatagttctactgtttagaaatgcccatagggaatggtattttagctaaattgactgttgacataaatttatctcaataattctgcagcactctgtgcttgttctaggaagcgagaccaattgctcttcgattataaactctttgctgtgaattgtgtcaagtgtcaaccctttacattcgaaatgataaattaacttgtttatcttaaaaaatgaatttgaattaatataaattcattttacccatgtatgaatagtaataataatgtaaaacccagaatttgagtttggaagtttgaaggctgggtgcggttttgttgtttagcataagtgtgttcagagagaaaagtttcttgtaggctgtagcttccatatacagacagagactcccaa

SEQ ID NO: 23198 - DNA, 696 bp, Glycine max
  Intron number 1 from transcript Glyma08g19240.1 (locus Gly ma08g19240) derived from phytozome v7.0 (chr-ID Gm08; pos 14514897 to 14515592 reverse strand)
tatccctcaggtaagtagtcacttctcgatgatatattattaggatatttatttatctggactaaatatatttttcatagatcatcttatataaattgttagtgggagtgataccgtgattgattctcttaagtaagattttgagttcgggtgtcccttggatgaaaaatacataattgaaaaagaaaaatatcactaaaaataatcaattaattcgtccatgaaaattaattctcagcaaaaatgacgaatattcagcaccaaataactttggttttacaaagatacttctaagggaataaagtaaaatgttttagacttaagaattaaactgaaactaaaaagagaaaaaataagatgaggaatcaaacatgtatttttagcaaaaatattgaaatgaaaaaaattttagaatatactctatagcactctttttcgacattttcttatcaatgaaattcatgtgtaccagtaccacattaaatatgtagatcatatttctcatctggggtgtcattccaaactagtgagacctacatgaatttcaactaaaaataataataatatgttaaaaatagtgtattagaaaatgtgctgattctgcagattatttgttatgtgtttttggaagatcaccttctaacatatgaatgcatggcaggacattgcatacgcaaagcttgcaaatttggaacc

SEQ ID NO: 23199 - DNA, 371 bp, Glycine max
  Intron number 1 from transcript Glyma07g19590.1 (locus Gly ma07g19590) derived from phytozome v7.0 (chr-ID Gm07; pos 19728264 to 19728634)
ccattgagactcttggaggtcattacagtaagtacattgttcccaaatttttcactctaagtttttgtccttggtttttgatttctctgagacctgataaacttgatggggtgtaatgtatggggtggagggaataggaagaaaaagggttcaaagaatatttttttttacaagtgatgtgagaaaatgaggtagaaaaagaaacgcaagaaagaataagtgtgtgttcaataattttcttgattgttcttggtttgttttacattaccaatactaagatgaatttctctaatgaaagttttgcctgtttctttttaatttttcttttattcatgtgtgtagaggctactcctaagcttgttctgcagctg

SEQ ID NO: 23200 - DNA, 798 bp, Glycine max
  Intron number 2 from transcript Glyma06g42140.1 (locus Gly ma06g42140) derived from phytozome v7.0 (chr-ID Gm06; pos 45354370 to 45355167)
ctgcttcgtgccacccttcaatctccaaggtaactcaattttttttaaaattatgtaattacgattttttttagagtagatattcaatttaattcttaaaattaactattagctcgaactcgaagttgttccaatttaaccaatggtcgagtttgtgttgtgctgactgcatcaaatactaggagggagagctttgcagttcataatagttgtatgcattttgaacaagattgcctccagcagagaatatatatgattctgtaccaaaaagattaatccatggatttaaaaaatttaggccagtttggtaaagcttatttttctacaactaaattttatgtgtgaattttttcttaaaaaatgttttttgtcttaaaatttcaaaataagctaattaaaacacttaatctcaataaattcaggaggtgcagctcaagtgaaaggtaatgcgggtgtctatttctatgttgctctttttttctttttttttttctttttataattatcattattgtttaatgttaatgattggtgttcttgattggatattatattattgcaaataagctatagatgagtggggattcatgttatggtacattgggcatttgtcttgagcttgaaatggtgaaaaggggaaagaggaaatggaaattttgtgattgagtaagggtgtgggttatctatgtgaagatatatgttggaaaggaagattgaatttcaggattttgatggttggtgggtgtgtgtgcttgtggtgtaggtgcttgtggcagattcagataaattcaagaaccc

SEQ ID NO: 23201 - DNA, 465 bp, Glycine max
  Intron number 1 from transcript Glyma05g30190.1 (locus Gly ma05g30190) derived from phytozome v7.0 (chr-ID Gm05; pos 35618128 to 35618592 reverse strand)
acaagtttcttttgaaaacagtaattctcattaccctgatcagaaaaataaacatgatgtctattgatttcctcatcaaattctagggaagttagttttttatttgtcctgaattattgcactgctttccaaataaattcatgatattactttcataccataaagtaatacaaagtaaagttctatttaggataaaattgggtgggttctgaagtaaaagatagtggtgatgtatcttctttacgggggtggatttgcttagactatcttgtatatgcaccattaacattcagtgatgagatgctaggcttttaagattcctaaaatataaggtttagcagatatttccttcattagggattattgtaatgtagatatggttgcataaaaactttgtacttaatcctgtgtcactaagatttaaaattaatgtacattataatatttgattttcttgattgcagg

SEQ ID NO: 23202 - DNA, 469 bp, Glycine max
  Intron number 2 from transcript Glyma05g37870.1 (locus Gly ma05g37870) derived from phytozome v7.0 (chr-ID Gm05; pos 41378841 to 41379309 reverse strand)
ccctgcactgctctcaatttgctgccgaaggaaaggtttgattttttagctgtatatgctgcatattcgttcttgttatgcttattttttgataaaatctctatggagtagtttctatctttattttactgttatcttctattgggttcaacctacctagctcaacatggtcccagtgacattcaattgtgaattcttggtgagctccgtacagaacctgtttgttgtggggcttttgttttcttgatgtaaaagggtttttgaatatttaaaaaaatccaattttggttagtgaagacctaccagacttgttttaatgtaattctgtgagtgatggggtgagtagtgtgtgcagttgaaggtggtgttaggttgagaggttattatggttttaagcaaaaagggtcctttgggtaaatttgatagtttcttggctaactggaatttgccaatgatttatagggttggg

SEQ ID NO: 23203 - DNA, 720 bp, Glycine max
  Intron number 1 from transcript Glyma06g14500.1 (locus Gly ma06g14500) derived from phytozome v7.0 (chr-ID Gm06; pos 11388492 to 11389211 reverse strand)
acgctcaagagagattccggaatattcgcttgcaggtcccatttccccaactttttttttgtttcgctttttaaaagtttgtgtttgaatcctccgaacgtgaatggaatttttggttagggctcagcgtaaaaaaaatctggttggatcgggttagaatgtcgtgtatttgtgttgtgtggtgccttttgccctaattttgaagctgcagttttaaataaattagcataatcttggtaaattttgtgagtttagggcctgctgattattgatggattgaagcattgtatctttgatgcagaatgaccatgtcgactgtgtttaagacaaagtttgtgtttgattttagtaactcttggtgtgtactatatttgtatttgtatttggtgatttgatagatggtaaggactagaacactactctcaccctgccgcttgcttttgttttcgatacctctgcctgaaacaacatgggataattcgactagaaaagtgttgtggcgtttttgtttgtatcaatccccctaggcttgtgtttggtataatattttaaattattgtttctagtggtataacaatcctgcatcacttgttctgttttaaataattgatgttgaagactcttctgtttttgatagtgagatgtgtactttactgtatgtacgtatgcccatttccctgcacttgtgacatgtctgatggttctgtttacaggaagaat

SEQ ID NO: 23204 - DNA, 898 bp, Glycine max
  Intron number 1 from transcript Glyma06g09150.1 (locus Gly ma06g09150) derived from phytozome v7.0 (chr-ID Gm06; pos 6746097 to 6746994)
ttaagtaagctttttcttttttcttccttctttcactttacgtttcggaatttcaacacgtctttctccgtttattttaagggacttttgttaattctgttgctaaacgagcttgtgcttctcatcttttatatttttttttttctttttaagcctcgcttgtatatatgtagagaattatatagatagagattaagctcaataaaatgaaattctgatgagccttagatgactcaatgcaagtaaataagcttaaaaacaaaaaatgtgtgcactgtagcttgattgaagtaattggtgctgtgaaagaggaaagtttgtgggcacatttcgtggtttgattttggggggttttagtttttcggtggttccagtgagagaacttttgaaggaggaaagtttgcaagcaaattacgtgtatttagaattgagtcatctcttggaggaagagtaattggacaaagagagatgaaagaaaatgtaagtgattggaatcgtgaggctaaaagagggggggggggggctagaattattttgctcttctaagctgagtaaaatttgcttatgtattattgtgttggtgtgctttattattgactggtaggtttactattgaactgtttataaacagcaaagagttaaggttcacaaatttctaatagttgttttcacggggggattcggttgttttatgtccttttccgagatgattgatgagacattctaactaatggatagttagaaagctcttgcttattctgtgctttcttttcttggttttaattccctgcctcttagcatgcatagctaactttctgttcgctttctgtaacatttggctcaggttattttctcttttgttctttcaggggcattctgatcatcattcacgggctca

SEQ ID NO: 23205 - DNA, 554 bp, Glycine max
  Intron number 1 from transcript Glyma08g09930.1 (locus Gly ma08g09930) derived from phytozome v7.0 (chr-ID Gm08; pos 7101864 to 7102417 reverse strand)
ggataagggtttagcatctgttgaagagaagaaaggtaaataatgggtcaatcagtttgtatgtattataaatttattagattatgctacaacttcgtgaatcttggactgagtgactgttgatattaacagcgttttgtgttcattataatccaggtagtagtgacttgagagcaacaatttatagaaaagtcagggcagataatcagatcattttatgcatgtgtttgcatataaaaaaaatacaattttgatgaggaaagtaaaaaatctcttatttaataaacattgtggaaaggctaggtactagcaggacttggtgtcaaactggaatacatgcaaaagacatttcatggaagactcccattgttgctgactaaaaattcaaatggtcgaatgttaaaattaaggctgttttttttgtttgtttcttatgatcttgtgccttctgctatccaattaatggaaagatagaggataagttcactgatcattaacacacaaaaaatgcctgcagtctattaacttctttgttctcttgcttgtgtgagcag

SEQ ID NO: 23206 - DNA, 796 bp, Glycine max
  Intron number 2 from transcript Glyma07g02910.1 (locus Gly ma07g02910) derived from phytozome v7.0 (chr-ID Gm07; pos 1981739 to 1982534)
tattccaagttgggtcaatcgtcttgctcgaattggtaagtggtaactcaccattgactcttcactagttactactatttgctacaacaacaacaacaacgttaactcaacatgtttatttattttttaaaaatgtttaaattaatgtctattagtctattattggtcgttttcagctcaggtgttcttgattgcttgttgaaattcgaaatttgaaaattgaaagagtgtagttgtgggtgtgattttctggtgaagttgttgtatccccaataaaatatagctattcagtgatgtggaaattagttggatatatgacatagcgaccaaggtaaaatttaaaaatagtagttatggttgacttgtatcgtagaggatggtacaaaagaaaggataattttagaagggatacagaagaaattactttggaattatatttgattcgtttgtaagaacatgaaaattgttacggaaaattgagtgagtgatgatgatgacaacatcaacatcagtcatctgccacgtgatattttataataaaaaaattgtgataggcctcattatttctggttcttatttaccaactgtgaatttattggttctgggtgacaatgattgaggtaaacgaagttcgggattaaaatgaggaagacagactagcttttaatttttcatttgattctagtttaatcaatttaattccaaagattcaattgaaatttttagcttgatttattagttcacgtgattaattttatgtttggatgggttggtttatgattgggttgtaggattt

SEQ ID NO: 23207 - DNA, 865 bp, Glycine max
  Intron number 1 from transcript Glyma07g38970.1 (locus Gly ma07g38970) derived from phytozome v7.0 (chr-ID Gm07; pos 43575619 to 43576483 reverse strand)
gaggcccgagctagagagtattcctgagcaaggttagttgattgatgatgatgagatcgatcgactagttgtgctcaagggttgcatacatatatatatatattagtcagtatttgtatacctaagaaatccagcatttcttttccaaccttttcatgtaaaataactggattgaggttggaggatttgtaattgatcagttcattatttctgccagtgaataagtgttcttgtctttgtcttgtgtgtgaaaccagatcaaaaatatatatataaaagtttcctcttcatgattgatcagttataaaccaaaatatattaacttatcccaagctagattcgtgaggaaaatgagaccatatcaaagatgtttcgtgcatcatacggttattcatgaatcatgtgatgacacgaacatatatacctttccaaaagctattaaaggatatgtgcggagtacttaatttaaagtatacgtgcgatatatacaaactctagactaattgattaaagtataatttaaagcttgaacttattattattattattatttttattgaatgttggttttttctaatttttattaatttaatatttagcaaccatctttatactagaaaataaagcaaaaatgaaagtacaatataattttacattcattaaaatgatttaaaataaatgaaataattgatcgatgttagaaattgtagatttttttttaaagaaattattgatggttcgttttaaataattaattcttgaaaactagaatcaattgaaatggtaattacaagataatttatatatatatatatatatatatatatatatatatatatatatatatatatatatatcaggttaa

SEQ ID NO: 23208 - DNA, 388 bp, Glycine max
  Intron number 1 from transcript Glyma05g19580.1 (locus Gly ma05g19580) derived from phytozome v7.0 (chr-ID Gm05; pos 23467055 to 23467442)
tactggaaagctggcaagcatcaagaacgtgctgtgtcagtattcctcgcttttcgctttcgttttaatcttactgtttttgtgtatttcgcattttggtttggttgccgacagagtgcaactgaaactgaaactaatagttgtggttttgtgcttttttgctgaattgagttgtttcagtgtctttgattagtgtttaattctatggatgcacagtgtttatatatatatatatatatatatatatatatatatatatatatatattaattactggttaggcttggtagtttaaatgtttgaatgaatgttgatgtgtgtttatgagaagattggattgtgtttgttttcaggttcgatttgtattttcggaggaatccgtttggtg

SEQ ID NO: 23209 - DNA, 793 bp, Glycine max
  Intron number 1 from transcript Glyma05g37600.1 (locus Gly ma05g37600) derived from phytozome v7.0 (chr-ID Gm05; pos 41160319 to 41161111)
agaagggtttgcagcacaggagatttgcaggtaaaattaaaaacacccagaagttttttttttattataaattatactattttctttcaaaaactatcttgttcgaaagattgccagatattaaatgtgatagttcttctaatgaaaaatttaagccttgattcatccttacgttataagaggatttaactcagctgggaggttgaacagcgtgaattgttgtatctcattatcgtccattaataacaccatgatatagtaattattgtaatttgcttgttatttttgtaacatttttctttcaaagttggttagattgaagcttgttttatttgttgagcagaacatgaagggaaatcacatgtctccaacggaggcgccgttgttggaggaatcgaacttcaaagtagggcgttacagtgccgaggaaagaaaagaaagaatttctaaatacagagccaagagaacccagaggaacttcaacaaaaccattaaggtaaggaaagaaagagtaacaaatagtactatttctttgtaattcaataatgtctcaatgcatgaaatagtggcgtatatatgtgtgattaagagaagtaatatgtaggaataggtgaagtttgatattggataaaaataaaaagtttgaataacatattagtggcaagataaaaatcataaaatctgagtattaagattttggtttaagatatgaggtgaattttattttatataattactgatgacttagtataaaggtctctgatttttatttattttttatatggttaccagt

SEQ ID NO: 23210 - DNA, 703 bp, Glycine max
  Intron number 3 from transcript Glyma06g45920.1 (locus Gly ma06g45920) derived from phytozome v7.0 (chr-ID Gm06; pos 48647249 to 48647951 reverse strand)
tggctttgactgccagagactctgttcattccattgtaagtacttgtttcatcctcatctctaaggaaatatggtcacttagaataatagttaatctgtatccaacatgtattcaaaatgtaatataatttccagcaaagcaaggaaaactttctggcaataagtgagtttgtgttaagtagtaaaagtaaaagaaagaaaagaaattagagtcattgaaatacatgctgtttgtttggttttatttttgggaagattgtgagtatagaattgattctgcataaatttttatatgtttagttttatgttagagaataatttataattatagattgaagtaattttgagtaggtcatgtgttgataaaaaatttatattaaattttaccgtcaaatttactttataataaaaatatttaaacataaatcaaattactttctaaatcaattttatgaactccattcaaacattcaaacccacgtacgcatagatgaaccaagacaattagaatcaaataataatttagagaatgaatggtgaaaaagtgatgtgcaagagtactggctaggtgttaagttatatatagttaaatatccatatttgtgtcatgttttctcaaggctttcttttatagaatagaaatgaaatggcccatgttgttattctgccattgtcttgtgtttgcagggtggaccctattgga

SEQ ID NO: 23211 - DNA, 766 bp, Glycine max
  Intron number 3 from transcript Glyma08g03980.1 (locus Gly ma08g03980) derived from phytozome v7.0 (chr-ID Gm08; pos 2816797 to 2817562)
ctgtcagagaattctcggagttgacattgattctggtaagattcttatctattctaatttctagtgctgaatggtattctttaagtttagaattgaggtttgttctgtgtatgtttccatttgatgtagcctcaaaatgtaacatagatctaatatgtttaattatttatgcttgaaagttgaaacaaaacattgacgttgttttggccatttcttgtatgaatcattgaaaacaagaacaaagtgaaaataatgtgtcactttctgtaattattagtgatagcattgaatagagacagaaaacatttccttagggcctaaattcatgaattcaatccttagagtgcttaacagtcatattacttaagccaactagagctattaataaaatttccctgtagtattatatatgcagcatgaacaggtggctaatatgcattatacttcttcagcaagtaacttttaagatttaaaaaatcagcatagaacgtaacactcagtttcaaaaaattaaatttaagaattgatttcatgttatctccagaaaaaagagggtgtaaagatgctctgaagatttttcctggagacctcgtggatattattaggaacttagtgaagttgtttacagttatgttaatatcattcataatttagcaacaggtagtagtagtataagtataaactcaacttttgaacttcccaattgggtagtatcaataaaaaaaaaactgattttttctgctcaatgtgctagatcgagttgagg

SEQ ID NO: 23212 - DNA, 318 bp, Glycine max
  Intron number 3 from transcript Glyma08g12740.1 (locus Gly ma08g12740) derived from phytozome v7.0 (chr-ID Gm08; pos 9318946 to 9319263 reverse strand)
tacctgttttacctatcattgatctcttttgaaactatctttagtaaactttatctcttctttttttcataaaaaagaatccaatttgaatccttgttaaagaatcgaaactcaaatctaattagcttgacagacaatggttctgtcacattaagtttgatgacatgaaaagaataaattccatagattaatatggtttgttttcatgttattttgatgtgtgaattttcagttaattaaaatttcgtttttattgaatataaaatattgttattgcatgcagctgagcttttgggattcgaagattttatcccaccc

SEQ ID NO: 23213 - DNA, 1017 bp, Glycine max
  Intron number 1 from transcript Glyma06g46470.1 (locus Gly ma06g46470) derived from phytozome v7.0 (chr-ID Gm06; pos 49078838 to 49079854)
ttgctcttcacaacccattctttctattccacaaggtctttctttctctcttctctctcagatctcatgattttgctaattactcaattacccatctcatgatcttgctaaaaaactaatattttcttaattgggttgtccaatccgggtttcggatgagtttttgagatctgggttgtgttgttttttttttttttttagttatgtaaagtgggtgttagttcaattgtggaagttgaattatgactccttcaacttatataacatttaatccctctaaccttctgattcatgtgctctggcattagtgatttgatgagaagacactgttaatagaacaagtcaaaggatggtgctgattggtttgcttcgttgacattattattatgctaggtttttggtttttcctacaagatcttatgaataaagtaactgcccattgtccatctaactaaaagcagttaaaaattccagccatattgatttacacattcactgccaaacttatgagccctagtcatccccacattgccacatgacctatttatgcaatgagtttaaacaaatatgaaactatgtactattgtaccaacaagtgatgggtctgagtggtgccgaggtctcaggttttagccttgtagatagaaaaaatgtggttggaaaggaagaatccgactaaaggtggtcagttaggttttccaactgagattagtcatcgacaaaactggtgaatattacataccaataacatgataaccaaaaaaaatatactgttatttcctttggttatcactaatgaatttgaaaaatcaataatcacataaattatagtttcaaaactttgtactataacaccaattctatttccaattgagtggctttgtgattttatcctaaatcgtaatgtattgctccctttctcctcatctaacttcaaattgagtatgtacttatctcagtttctttctgtgtgtttctgcaggacttagcaacacttccttcggaggttggtttgtc

SEQ ID NO: 23214 - DNA, 740 bp, Glycine max
  Intron number 1 from transcript Glyma06g22960.1 (locus Gly ma06g22960) derived from phytozome v7.0 (chr-ID Gm06; pos 19846143 to 19846882)
ttaaaagctaaatcaggtaatgaagaggtcctatttaaacaatgggccttatattctctccagttttgtagcctgtagcaattctgcacattttgcatttaaggctatgtctttatatttaatgaccgatgcagagaaaagtaattaatgatgatgatgatcgcatcttcttctcttagtatattattgaaatcctcaagtgaacaacaacagcaaccccttgtcctttcaaattcaagggaactgtggtagaaaaagtatatatttatgctttttgtttcactttcatcgacagcttctctctctctctctctttctctctctctctctgcttctgctgccgcaataggtaagtcagataacaattaatgagttatgtagattttccaggtggtgtggtgaggtgagtctcatccatgccatgccatgccattcattaataagacgatatattgctaagtggcttttgtggctgcaatctggctttatcctttctatatggaaaaaaaaaaaaaaaatctgattttggggtcagagagatgaaaggataagagttttttcaggtgtcaagaaaaagctcttttttcacctctatttgagaaatatgctttatattatattatatagatagttcatgttcacttaaatttttttctacagtttctacatgctttggtttgtttagtgttttacccttctcaaaaactaactaattaacctacacttttttccttctagct

SEQ ID NO: 23215 - DNA, 688 bp, Glycine max
  Intron number 3 from transcript Glyma05g26670.1 (locus Gly ma05g26670) derived from phytozome v7.0 (chr-ID Gm05; pos 32589211 to 32589898)
ggacaattgccattttctccaccatttatttcattgtaattattactaacaatgatagtttttttttcctaatcaaataattttccacacacattccctcttttgatatactgctggaaatgtcctacataatttcttggacatgaagcaaaatatatgcttgcaaaatgccaaggatttacctatgcaaagatttttgggatcagtcaaggaaatacagtattttgcataatgcaatttgtaatggtgataggatgttatttcttgttcttgtttgtttgtggaatacgaattattttatacattttgtgtcaaaaaacaatgagaaaatggttaaggatatggaagaacagcaaatattatgctgtcaaaaaatttgtcaaagggagattcagaagactagttttgagtgtactgtgattcaaacttctttcttccattgcacttcttctacttgatatccaagtttcttagtgtggaagtaaggaacttttacagatttctcttgagcactgaatataatttgtaaatgcatcatcacatttttcaggaacccttggtgtttgtatcagcatgttggtattctttgtcatcattttgttttctgtacatcttttgcttctatatgctttgctgtccagtattctatacttgttttaaaatgtaaactggccgtttcattcaggga

SEQ ID NO: 23216 - DNA, 472 bp, Glycine max
  Intron number 1 from transcript Glyma06g44550.1 (locus Gly ma06g44550) derived from phytozome v7.0 (chr-ID Gm06; pos 47443441 to 47443912)
aggtgtaaattcatctctatatatcccttgaaataaaccaaaaaaaattaattatgaactgaaaggaagtgtataataatattaccgttaagtctactgcatgtggccaagtgtagacgtagtattactcaaaaaaattaaccacagaaacaaacactcgaaacgcccccactaattatgatgacactcctgattccaatataatgccagcaaatatattaccattacccatcaaagcattttccatgctctaatccccaacggttacctcttctcaaccctcactatatatattaccctatctcccttcacacatttcatcatctctttctctgattctcttcttattcgaagaccaccaatttagcaagctcagttttagtttttcaaatggcaatattccataggtttctggggctcttgattttgatggctcctatgttgttgcttcatgttgtggctaggcaatttg

SEQ ID NO: 23217 - DNA, 696 bp, Glycine max
  Intron number 2 from transcript Glyma06g44550.1 (locus Gly ma06g44550) derived from phytozome v7.0 (chr-ID Gm06; pos 47443997 to 47444692)
acactcttcgtaagtccattacctttttcattttcaacatatatcaaatttagattaaacttcctccgtttacttgttataagaaatatatactataattttttttgtataaatgaaaactgaggcaatacttcattacatcgaagtgggtttcctgagtttgatttctccatataagtgagctattataaactatttgtacttgagtttgatttctccatataaaaaaaattgtttacattctcttcttgtttttgaatttgagttattatatgtttcctgagttcctctttttttcccccacttctcaccctttttaatgaaaagaaaatcagatagaggcttttttttttcaaacaaaaaatatgtatgatcagaattagtttcttgtgatttactagtgttttttattcaaacgtttacgcaatggaactgttaaatgaagaacatatgacttatttttatctttgataaatcaaatttaaaacgcatttgaatttgagtcatttaatttccattcaactatttgctggctgcgttaatgcgtgatactaaattgatattaattttgtttttacataaaaatagtaaaatcgagaaaaacttaatagaatattaattagttcttattaatttatattttgttgttgcatgcatgcagatttcaagtacaataaagggattgattcggttgtg

SEQ ID NO: 23218 - DNA, 398 bp, Glycine max
  Intron number 1 from transcript Glyma07g08560.1 (locus Gly ma07g08560) derived from phytozome v7.0 (chr-ID Gm07; pos 7144996 to 7145393)
agtctagtttccggtctctactctctaattcgtaggtcatagacaatgttctttctttctttaatttaatataaagatatgctttttagtccttgaaaatattttaaaatgttaattttagtctttatataaatttaatgtttagtcttgatattttgatagaaacattttttcagtacttgatgaagacttacaactacatcacttttggtaaatgcagagattgaaatgtattaattttttacaggactaaaatcaatattttaaaatattttgaaggataaaaatatattttaccttttattctataaaatctgatttaaaattgtcagtttctatttctaaataatagtcaatttgttgatatattattcactttgcttttacaggtgtgtgat

SEQ ID NO: 23219 - DNA, 325 bp, Glycine max
  Intron number 5 from transcript Glyma07g10310.1 (locus Gly ma07g10310) derived from phytozome v7.0 (chr-ID Gm07; pos 8618913 to 8619237 reverse strand)
caggtacctacttctaaaaaaattcatggtcttatttaatgtaaaaaaaaaaaaaaaagagttatatgttggtttctcattttgtgtggtatttaattaataaggcatgaaaacctctcaattcatatactactatatgctaattattgtgatggataagaataaatataagaggtggtgaataactgaatatgaaatatgctagatagtagacaagggtatgagtaattaccatttgaagatcaaattcaaagaagcttatattaatttatttagttgatttgtggcagagagcaagggcatccgaggcaaaagagctaggaaa

SEQ ID NO: 23220 - DNA, 621 bp, Glycine max
  Intron number 2 from transcript Glyma08g05020.1 (locus Gly ma08g05020) derived from phytozome v7.0 (chr-ID Gm08; pos 3588033 to 3588653 reverse strand)
ctcctattcttcatcaggtactgtgatctagcatttcctataactaatttttgcaatttagcttttggacaagttagatgagagaccttttataaaagtttagtgcataagctgattttagcttacgagagaagctcaattcattttacttattttcttttcctttaagtgtttacgacaagtttatccaaacatgatctgaatctgagctatattgcaaacaatagttaataattgatttagtagattttcattttgataagagaaatgaataaaccgtacctagtcgatctccaatgttaaaaaagttgttccactattgtacagtagtacattacgtactgataaatttttatatgcatttatgtgagtttcttatttttcaagtttgaagcacatagccaactttgatttttctgttgggtaatgagagatatgcactttgatttgagtcttgtagctaatactggcatctgtaaccaacaccagaagctgaaattgtttgtctcgtcatttataaaatattttgagtgctttacacagacctggagtatggcagttaatttaagtcaatttcacaaggcaggtaaacaaaaggtgtcgatttcttcttgattttga

SEQ ID NO: 23221 - DNA, 649 bp, Glycine max; identical to SEQ ID NO: 18805
  Intron number 1 from transcript Glyma08g25940.3 (locus Gly ma08g25940) derived from phytozome v7.0 (chr-ID Gm08; pos 20329974 to 20330622 reverse strand)

SEQ ID NO: 23222 - DNA, 336 bp, Glycine max
  Intron number 2 from transcript Glyma07g33960.1 (locus Gly ma07g33960) derived from phytozome v7.0 (chr-ID Gm07; pos 38889139 to 38889474)
cgctgctaggcaaccggtgtgaatttaattctaaacatgaataatttttgttttgtgcttttgacttatatatgtgttttttttatacgtgtataagaatgaaaagaatcatgattacaccgtagatatgtgtattgagcaacaatattatcaccactaaataatataaatggaaattaaagttaacttttatcaacgtacattgctataaaggttttctcacataattcattgtttggttgcataaattgtgcttataaaggaaagaaaaaaattaattgataaatattgattcgtacaggtggtcactaatagctgggagattgcctggacgta

SEQ ID NO: 23223 - DNA, 945 bp, Glycine max
  Intron number 1 from transcript Glyma07g01100.2 (locus Gly ma07g01100) derived from phytozome v7.0 (chr-ID Gm07; pos 653908 to 654852)
tcatcatcgtcttcttcctaggacctgtttcaggtgcaaaaaccctcttccttttttcaactgcttattgatttctcttttcatttttgtttttaattgacaatctgttggggtatgcctttgtgtgatatcttcaaccatcgtatggtaatttttttattttttttattgttactgatcacttgaatttaattgtttggggaattttacttatggggtttttgggtactttgatttgggagccaagattcaaactttagtgtgtttggggattgaatttgaggagaagattgtaaaacaagaaattctggtgtaggggaattgtgatagtgtattttgatgggcatggaaagttattttcactgtcatgttttaattattgtcagaggttgtgttttaattatggggtttttgggtactttgatttgggagccaagattcaaactttagtgtgtttggggattgaatttgaggagaagattgtaaaacgagaaattttggtgtaggggaattgtgatagtgtattttgatgggcatgggaagttatttttactgtcatgttttaattattgtcagaggttgtgttttaattatggggtttttgggtactttgatttgggagccaagttcaaactttagtgtgtttggggattgaatttgaggagaagattgtaaaacgagaaattttggtgtaggggaattgtgatagtgtattttgatgggcatggaaagttatttttactgtcatgttttaattattgtcagaggttgtgttaaaaagattaacacaatttgtcttgattgtatttctaagatttttttttttttggtatttctaagatgtgtggataacttctcttatctgaacagactgatttctttttctcattatttttgttgtttttatcagattcttcgtagaggagtactagggctgatcactgg

SEQ ID NO: 23224 - DNA, 1021 bp, Glycine max
  Intron number 1 from transcript Glyma05g08270.1 (locus Gly ma05g08270) derived from phytozome v7.0 (chr-ID Gm05; pos 8238465 to 8239485)
cctttccttctaccatcactggaagaaaatttgtacattcatccattcttcacataatatataataatatatacaattccttctagcttccttttcttaatttcaaaaccaacaaacaaatgtatttcatattataccattttattatctatctctaaacgaacagtcctcttcatcatcattaaagttggtgctcttcagtgccatcatgatgatgatgtttctttttgcaagctctttgttacttccatcagaatttaagacttttcaagcctccggagttagggtgcttctttttgcaacttttcaggcttttctttttctcatcagttactacttcctagctgtttgatgcatgatgttgaagttccaagttgggacgctagctccacctcctttttttctttttttcttcactaccctccttgaattaataatccttgcctcaaaatccaacaaggcttcagcttgatgtgtaatattgcaatcagacaactgactgtgtgctctgtaaggatgtcagtaatacaaatattgtccatattcttaacttgttctttttattattaaaatgattaagtactctcaaatgtaaacagtcataatttgtatgatttgaagtgcactttgaaggcattgcggagttgccatctgttttccattgtcctccttgggaggaattgaaatgtgacaatgttgttgtatatgattggtaaccgttttaaaaaaaataaaaaaattgacttgtcttcttcccatctcctatgttatctctctcaatgtctctgtgctgtagggtctacactaaactaatggctgtgatgtttcctgctccttccctcttttgcaaacttgacacttactacttgcgggagcgggactgtgcttcctacttgcatctttcacctcactcttaatttctttatcaatacaacaaattttaatattagtgctacactcacgactaattaatatttgatctccaggtgcaacattcctagtttggtttggacccactgtt

SEQ ID NO: 23225 - DNA, 987 bp, Glycine max
  Intron number 1 from transcript Glyma08g39720.1 (locus Gly ma08g39720) derived from phytozome v7.0 (chr-ID Gm08; pos 39242802 to 39243788 reverse strand)
cactctagtaaatcagtttttgataatattaaaaggtgagattaaagaagtgctttcatccatacaatttcaaacaccacatcttgccacttcactactattttgtgctataattttttttatgttggttgtgaggattggcaagatttatattttttatgctaaaattctgatgaggtctttttgtaggcaacaaatatgattatatgatcaagtgtttttgtaagctacgaagttgatgaaattgtcatatttggaaaaaaaatcatgtgttttgatttaccatttgctaatggaaataaaagttttcacaacactctaaattctatttcaaaatcacgtttatatatttgtaaacttacttttagagttggtaatcatcatttttttttttttttgcttattaacacaacttgtatgcatctaattctaaatatcttcagacttcagaattttaattgaaattcttttgatgatttttctacttatacatattttatatgcattccctgcagcagcaaaatgagtttcattttttggttggggggggggggggggggaatttggaagacatgttgcaacgttctggttgataagtgtagttttaatgaaataaacttgataatgtagccacttgtattcttattgatagttggtctagttatgtctatctgttacatagttgtaagaactgttctgaaaaatcactaacctagtcacttggctagcacattcaaagtgcatgataaattttcactcaaaccagttgacctgagtaaaattgatggtttcatcaataaaagcctattttgtttgttttatctagtcgctggccatctggctaggttgaatacaactttaccttgtctgttcattgtaatgctatgtcctgattgtatgtttctaggcatttatcgtaaatttaaatatcaaacttattgatgtgaaattacgctttgtagctatttgattgaagaaaagaactac

SEQ ID NO: 23226 - DNA, 548 bp, Glycine max
  Intron number 2 from transcript Glyma07g05360.1 (locus Gly ma07g05360) derived from phytozome v7.0 (chr-ID Gm07; pos 3999779 to 4000326)
agagccaggttggtttgttttgttcaagaaactttaacactctttggaaattatctttgtactagatttttattttgtcactgtagtatgtactttttagtttttaggctttggtgttgtttcctatcctgttggttgttcttctgacttgagaaggttgttattattgaatccttcgtttcaatcccatgttggtcttgcttgatgacaaatggaccatggatatttgggcttataaaactgacttatgaccttttctataccgcttttttgcttatttcagtttagtaagttttacttggaattggaaccttatcaaagcaagatcttttcagtttattccaacgaggtcatggataaaactctcatatgacttatttgataagtgattaattaaatcttttgtcttggtgggctcatcagttttcatcaaaggctgtcaatttcttctgtatacattaacctgatttgtcttggctttttatctgagtaagctgtatcaaataaatgccgattatcttccaaattttgcagaggacttttgtttt

SEQ ID NO: 23227 - DNA, 930 bp, Glycine max
  Intron number 2 from transcript Glyma05g33310.1 (locus Gly ma05g33310) derived from phytozome v7.0 (chr-ID Gm05; pos 38011339 to 38012268)
ttgttcactcttccagtgcaaacctaacaaacgtaaatttctcactttcctttcgtagcatagttagtttcaactcaactattgcattaacattttttaaatttgttccagtaactagatcgtgtctagtcaggagacttaggataattaagaacattcaattataaagtgtagagtgtagcatgtccctttaggtcgagagcgagctaatgcctatatagggctgtatgataactgaccgaatcgatatcctggcaagagtataacgcaacagtctatccgttgccccgaaagcatcgcgagtggttagagtcgcttgacagctaaatgggacgttaatctgtcaaccaggagccccggtcataaataaacaagggaaaccagccaggttaaataatgaagaccgacccagaaacttaagggcttagagagactaaggtgtgaaagtagttgtccatgaaacaatcaaggaaactttagagatacacagtcccacagtcttcttaaggggtacagaaattaattgccaaatttagatactctactcctgcggtcgtatagtttaccaaaaatgatgtggtcattctcaataaatgaaatcaattcaatccagttctcttacccctggcaaatgtacaacaggtgagaaccataaaaagaatatggaaaatattctgcgagaaaatgcaggttagtttctgactgcttatgagttatgaatatggattgctagaacttatttggaaaatcttcttcataaatagttataactggaaaaaaaaaaatgaaataagtttcttattgcaattcgtatagagcttggtcaatcttcaggcactaattgttttgacttgtgagcatttctttataatttgttgctttcattatgtctgatctttgttttgcaatcaatcagggaagtaaaaacca

SEQ ID NO: 23228 - DNA, 544 bp, Glycine max
  Intron number 1 from transcript Glyma06g20520.1 (locus Gly ma06g20520) derived from phytozome v7.0 (chr-ID Gm06; pos 16933814 to 16934357)
tgctaccacaactaaaccaaacaagaaactcaagggtatgacatgccaagacatgtaaacatttgatgttttgaacattatctttctccattctcaacattattacgttttttacaatagttcatagccaattccacaagagcacttaatgtaaccagacagttaaggtaataatggtaattgcaatagtaattcattaaggcgccctatttggataaacatgttcataagcacttataagaaaagaaaataagaagataaaacgaattaagcatatctcaaactaaaatcaatctatgctctggacttttatagaagtcctctcataatttctctaaaagctgatgtgtataagttgtttttagttcatagaaaaagttcaattcttcttgccttcttattttcttctcctataagtgcttatagaaaaatttatccaaataggatctgagataaaaacaatttctctcaagtcctactgcattcatagtgattattgatccataagtttctgtatgttttgatacaggcatcagaaagcttg

SEQ ID NO: 23229 - DNA, 714 bp, Glycine max
  Intron number 1 from transcript Glyma06g44730.1 (locus Gly ma06g44730) derived from phytozome v7.0 (chr-ID Gm06; pos 47575369 to 47576082 reverse strand)
cacgtagtgcaaatacttttgagaggttacataaagtaagttactgccttgtctgctatgtctgtgcttgtattataattgaactgttgtgtgattgttactgctatctaatgaatgcttgtgccaaaatactttgaacactggccatgtcaaagattttgcatggacttttgctggaacggttaaattactaatggaaattttttaaagcgcgattttaagttaattgggatttccatgcactgtgtaacgtaaagtttatgaaccagtcatggcagagtagatgggagggagttggaaatgttggtagcctgatattaacatttcagaagacagtgaactttattacataagaatgtttcccttaggaatcatgtggctgttttacaaactaaacatagattagtgttaatgagttaatgttggctagtatccactctcctggctccatgaaagaaaagtaaatggtcaatgaagtttgattatgtagaatattgaaactgtgtggccagattttgtgtactagtcgtggtggattaattttgtcttgtttctgtgagtataaatttcttttattggcgaaggaaggagtctatgtattgtactatgatattctttttcattgactatactagtctttttctttaaatgaataatttgatgagattctattatgcagattgggcaaggaacttacagtactgtatataaggc

SEQ ID NO: 23230 - DNA, 952 bp, Glycine max
  Intron number 3 from transcript Glyma07g05930.1 (locus Gly ma07g05930) derived from phytozome v7.0 (chr-ID Gm07; pos 4634225 to 4635176 reverse strand)
ttgtggagaaagatccaaccggccgctacataagggtatcatgaccattcttcatttatatatttttggattcatttgtggtcaacttttgtggttctactagatttgaaccaatgtatgggaaatgtgatgttgtgtttgtgtgttttatagagggaggtgatgtgttttaattgcttaggttggtttgatggtaaaaaagtgctagttgagctagagtagctaggcgggcacatttggaatcaatgctgcattcgtggttgcacatatgctggtcttcaaagttcaaacaatagtaatttgatattgattagccatatttttcttgtatgacttgtggattacaaatttgctatacaagctatacaagttgaataaatggcacgatgctagagactgtatattatgtgccaaaatgcatcctctccttcactttgagttggggacgcttttgtcaggcttgaaagtgttcttatcattagagaaaaaatttgtaaattgcctattaggttgtatctgtaatgaattgcctcgatacaactatgaaagagagaatcacattttaagttccatttttactatataaaccaggtgtgttagtgattattatttttaatgcagaagtgtaaaacctatctcatgcttgaaattcattattacaaataatcctccatatgaaaaatttgctttctgtaaaacacaactagggatatttattacaatatgcacacatcgtccaaggggatttgtttacttcttttcaatgatgctaggattcacttgttctttatatttgctattttcattttttttctctcatttttgtctcagaacaatgaaatcttgggtaaaggggatttggttacttcttttcaatgattctatggttcacttgttctttatatttgctattttcaattgattttttttctcttgtttttgtctcagaaca

SEQ ID NO: 23231 - DNA, 808 bp, Glycine max
  Intron number 1 from transcript Glyma07g11690.2 (locus Gly ma07g11690) derived from phytozome v7.0 (chr-ID Gm07; pos 9904538 to 9905345 reverse strand)
aaatcaaggcctcctatcgtaaactggcgcgaaaggttccaactttctcctgtgttttcgtgccaattttaatgggtcgtgtttggttttgggggaaatggagtgaattagggtaattggaatatgggttgttaggtttatgggaagttcatatcataacccagcatgttcagatgttctattgatattaatatttctaatttgagatgtttgagtagttgtatgaaaatgtatgataagcaatttggtgcgttcatataaggctgtatttgttagatataaaaccatgaggaaggccggcatcacactctctaatgcaatccttctcgcacacactttaatattggataagtttaatttgaaactgcaaaattgtaaggtaggttcattgaataagaagtgatacctacaaaattttgtgattttcaatcatttcagtcagtaataaagagtgtttaaaacagtgtttgaaagtatgttgcaagcatttctcataaaaccattatgtgcctttatccaacagcttaagctttggggattattggttcatgacatgttattagagcttctatgaccatgtggtttagaattcaatccttattgtccgtgtttcttcataaaagctaaatgtcagcacatgctagggtgaacctgtgcattatacctgctttaaagtccaaagggctcttgaatttgggggcatgttacacgcaaaattattattgttcctttaccaaataagttaatcagaagaattgtttcgtgaccattttttctttttgtcttttggaatcagtaccatccagat

SEQ ID NO: 23232 - DNA, 345 bp, Glycine max
  Intron number 1 from transcript Glyma07g36580.1 (locus Gly ma07g36580) derived from phytozome v7.0 (chr-ID Gm07; pos 41931450 to 41931794 reverse strand)
attgctttgtcaatgcaaggcattctttgcctccacatactatcttttagagtagattacactgacaaattttgtgaaattgcacaaaatctttctgtttttttctctctatactaactccttaactgtttgaaaaacattgaacagcattatactaaccctttgattgtttaaaaagtattacaccgtgtcctcttataagaaaagtggttgtacaggttaaaaaacaaagaaatttgtgcaatctctcaaatcttaaggatgccagtataatttactctatcttttgaaggttctataaatcccattaatggtgtgatattttgttgacatttcagggttgtg

SEQ ID NO: 23233 - DNA, 400 bp, Glycine max
  Intron number 1 from transcript Glyma06g37040.1 (locus Gly ma06g37040) derived from phytozome v7.0 (chr-ID Gm06; pos 39383439 to 39383838)
ttttgcacgttgcagcactctacgatcacatagaggtatcatttaatctatttacatacattgatttgaatttaatcttgatatgagtaaaatgttagtatcagggcataatgcattggtacaattcaaaaaattaaaatttaacaaatccaaaaactaaaatggtggatgcttatgatttagagagtagaataagaatttttattttatatatatatatatatatatatataagtgttactaaatgactagaaatgatatcttcttgttggaaaaaaattagtacgtagttctgattaagtgtaagtatttttatgacacctgtatataattaacaataccatttcgtggtgcttttgacgatctgatcattatacaggcagtgtcattattgttaact

SEQ ID NO: 23234 - DNA, 722 bp, Glycine max
  Intron number 2 from transcript Glyma06g47330.1 (locus Gly ma06g47330) derived from phytozome v7.0 (chr-ID Gm06; pos 49820918 to 49821639 reverse strand)
cattgccttcaatcgccgtggcacccttcttgctggtaacccctttctctctgtctctcttattttcatattcaactgctgctctgtcctttctgggtattctcctttgatgcattttcgtacaaagtttttatcttttcatttttggtagcctgtgtttatgctaataatttggttttggaaaatgggttgtgggtaaaaaactgagttttatgtttttaatgtcgatttcaaggttaaagtagcgaactttagtgagtaattccctttttccctgatgacccagataagaaaaggacgttatttttactcagattgtatgtatagggtgtttttttggacactttttcttgtgggatttatgtggaactttgggattctagcatcaaggccggagtcctgtttttaattttttcatgccttggcttggtgatgaagaaatattaaagggtatgcatacatttttccctaacgtagtaatgacgcaattgatgctcaatgcattggataaacatgtgtgtatgatgtagttgatgtttactttgccattatactggaataagtttgtgaggcaataatgggtttgtgtgctatttgttcaaatgtgggtggagtaaatattatagcaagtgttgaactactattaaatatttattggagttattttcaatatcaattttctcacttttgatcttgatttgctcaattgagccaccagctgg

SEQ ID NO: 23235 - DNA, 418 bp, Glycine max
  Intron number 3 from transcript Glyma08g01170.1 (locus Gly ma08g01170) derived from phytozome v7.0 (chr-ID Gm08; pos 682385 to 682802 reverse strand)
agacaacaggtaatctatgatccatcttccattatcaattgctttagaactttgtttttattatgattttttttttaatcttttaagacaaataagctcttcctcagaaagcttctttaaatcatatattctgtcgaaaaaggcatgtacaatatgcatgatgtttaggcttttaaaaagttgagacaaaacagaaaattagtgctaaaaatgccacgcaacttttgcatgatatgatatactatctttgattattcttccttccttgtccctaacggtagcatagaatggtattgttctgatttcaaatatctcagtccttgaacacaaaaatagtcattattcccttctgtcatctgaagcagtacttttgatttctcaagccagggacaatcttgtattcttgcaacgctggttc

SEQ ID NO: 23236 - DNA, 989 bp, Glycine max
  Intron number 2 from transcript Glyma07g09860.1 (locus Gly ma07g09860) derived from phytozome v7.0 (chr-ID Gm07; pos 8318436 to 8319424 reverse strand)
gagaagtaagttctcattataacattagtaactttctgtgtgatttttttttctttattttcttattgttacttagttgattttatatacttgcatttgttgctttgttataactcatgactattggtatggagtaacagaatcgctatttatttgctaaggcccaagagtcacttgttcagttattagatttttttttgttaatattctttacaatgctgtatgttctattataggtttttttctgtatcatactatcatttaccaagtggttgcatgcattgatggtaatttataaaagatgtaccttcgaatgcattaaggtttcaacccttaaccaccccatgatactggtgtcatgcctttatatgcatatccttcatctacctgctgtgcaggttgctgcctacagtacatggatattaaaagaattatgaaataatgcaagttgcaaggaactatattattgaaaaaaccaaatttgaaaagaaatgacttgggcttcaaaaaccagacaagaagagagaaggaaaaaattgaaaattagagaaagaaaaattaggacatatagtggagccagagaattggcagagattgaagtcaaagttaactagaaaataattgatgccaatgaattagtatatagggataaaaagtgtaattcttttagttattttcttagtgagatattggagtctatcagagacttgtgagttattttattaaaaacttgtaaacatatttgactatgtattatgttatttcttttacatttttataccttatttatttttatgttttgtttttgtaattctttgaaaatttagagttcacatcatgcattctatctcattttgggatgcatgcctttgtttacagcttaacaatttgactagtttgttcatgatgttgttgtccttgccttgaattttgattttgctttcttttttctagtggtgtatcctctttcaaccagttcatccacgaac

SEQ ID NO: 23237 - DNA, 723 bp, Glycine max
  Intron number 1 from transcript Glyma07g09860.1 (locus Gly ma07g09860) derived from phytozome v7.0 (chr-ID Gm07; pos 8319574 to 8320296 reverse strand)
ttcttgctgttactaaagagtaaggccatttgattcatctttgttaggtttgaatattttatcatggttgttggatatctatgtttcaaataaaatggggtgcctgttttttcttttttttttcttttttgtggagtttaattatattatgatggtttttgaggcaatgattcaatgataaggacgtgtttgttttctctgttgttttgacatagtttctgtttggtcctggtttttctttttactggttattatggctgtaattctgctgatcctcctggacaatgaatgtttcgtattgtttttactgttcaaatgggtatcgtttgtttgatggattgggttgagtccttttgcttctgttatgcttcaatgcaattcttatagcaatttttaagcacttttctttttctttttctttttcctttttttggggggaagctattttattgctaatctaaaagatttggctgaaacaattctgtttaattttgttgcttttctactgtcttaacgcttaaggtgttgatcaatttaaaagatcttttagtggcaaagaattttggaatcctaatacttttttggtttgttggaagtgacacaatgcattgatgttttagagccatggggtattctatctcaatgtcttaatcaattgtttacttggcaaaggatgggcatatttatctggtttttagtgcaggtcattgaaggcaattactt

SEQ ID NO: 23238 - DNA, 997 bp, Glycine max
  Intron number 1 from transcript Glyma08g18810.3 (locus Gly ma08g18810) derived from phytozome v7.0 (chr-ID Gm08; pos 14205439 to 14206435)
agggctttaatcagctctcaccaacccaatttctggtcagcactaagccctctgctaatgagaatttcctgaacagtcgaagggtaggattgttctgcttttgatctcgcatttttcggttttagtgagggttttcgcagggctgtgccatgaattttgtgtatgcaaatttgttacttaatcaaaattttcctgtgacagtgtttttggctgctaaagacagaatttaatcaatttagtgaaagatagtgtgaggtaaacccagaaaggaaaaattaaaaaaatcacaaaggaaattccaattgcaccacctaagagaaagggcaccattgtataatgtcaatattgctttgaaacagaaaatcaagtattcgaagaagtgacaatttttttttgtggctataatttctaaattgggatgaattgaattgagtctcgggtatttgattgtagttatatgcatcctatacaaatggatgttgttttttccttgttatatttgcacgttttgtgtgtattatagtcatggttgtaaattatggttggcaactacaattgtgactgcaatatggcagtttggaaggttttacaaactgcattgtgaccacaattgtggctgcatttgcctgcaaccttctacaatttctgtaatcacaacacagctggacaaatgtgtgtttttctcttcaatttacatcttagtttcggatgtttttcagatttgtgttgctacctacaaattttgtcatgtctgttatctgtcctcttgttgtatgattaactccaagttgattatatgacatgtatcatactatgatgggcatataacattttatttatgtgaagattccagtttctgttgaaatgatttggatgatatcattgatatggcattttctgtgcaaattaatcccgatgacaatcaagtttaatgaaatttacacttttgtcatctcttgcagagaagaaatagttttaaccaaggaaggagaagggt

SEQ ID NO: 23239 - DNA, 739 bp, Glycine max
  Intron number 3 from transcript Glyma07g40310.1 (locus Gly ma07g40310) derived from phytozome v7.0 (chr-ID Gm07; pos 44585826 to 44586564 reverse strand)
gtgttcctttgggaggtattgggtaggtcttcaatcttttcctaagtaagaatttctcttccgtttgctaaagccaaaagataagcacaagattgcctaaattaaccatacttgtgatatgagccatttaatggtaccttcaactgattaggttttgaattttggtttgacatactgtagttgtattataaaatgtgtgcatattgtggctggaaaatgtgttatcgttcattagtttactattagtacatgtgcaaattgtaattaagtgtaaaatgttgataggtaaaatatatttttatttctaattatatccgtcatataataagttacaatcaaattacatttgtcaaaaaaaaaaaaagaagacgagtcatgttggtaatatcaagtgtgcttctgggaaaaactattctccccattgaggcaattctcattaaatagtaattcagtaattgtacagtggagagattatagggggtgctacagaaatttacagggaaataagtcagggtaaaaaaataatacagtgataaaaagggtaaaaaacatttgattaaaatgtgactacctggcaattatgatgttaacagcatcattagtgtccaatttatatttgcttgatttgagtatgtccagaacattatttgatcttttgagcgaataatatgtattttttttgttgctgacaaactgatctccagtgcaggaagcattggaagaagtttcagaggtgaat

SEQ ID NO: 23240 - DNA, 791 bp, Glycine max
  Intron number 2 from transcript Glyma08g23980.1 (locus Gly ma08g23980) derived from phytozome v7.0 (chr-ID Gm08; pos 18258803 to 18259593)
aagtttcagcaggttggttggtatatttgtttgagagcaacagattgattatcttgtatgcatgttctattgttctttcattaactgaggtctgttgttaaattacaatgtgtgcctggtcgtaactcaacctaattaaacttctcaccgtgctgaatctttcatcattgttaatcaaaacctttgccttgactcttcatgtatggtccaatcatcctgtaaaatggtaagtggttctattttatttcacatgtagttctgctgcatatattgtactaaataacggttcgttgaatgtgagggcataaactttaatgattctgctactttagttatttgatctgtaagatggtttgcctgtagccaagaaaaatcacgaaaaaagtatgaattttggaagaacaccactgtggtcaaggtgagcaataacagcaaaaaaaacgaatgaattgttgaagcctctcacgctgaccattggatacctgaccttgataagtttcaacacctccaaacacacctagttcactttgccactgacaagaagagagattttttttgttgtcaaaaatgacaaggggcaatggtttatggcaaacttcgaatatgaaaaatagaacttacttatcataactttttcttgagtttcacttgttaactcttgtgcaaatctgatgagtgatgattgctgaactgctcggagtcacagttctgtttttgttcattttccttgatgcttttatatataatgctatttgatgtaggtggaaatacagaacaggccaaagatccta

SEQ ID NO: 23241 - DNA, 629 bp, Glycine max
  Intron number 1 from transcript Glyma06g17070.3 (locus Gly ma06g17070) derived from phytozome v7.0 (chr-ID Gm06; pos 13427301 to 13427929 reverse strand)
agatatatccaagagatatattcttcaggatagtggtatgttattactgcagcccttggggtgtttgggacagctgaaatttgtttttgagagaaaaaaagaaaattgtctgaaaaataatcatgtttgggacatcagctgaaatttggagaaaaacttatttttgaaaaaaaaaatgtttttcatgcatcagacctttgaagcttgtctttcaccctaaaaaaacgttattcccaaatttgtgaaccacttttttctctttcagtttcacacatactgatttttttttgtaatttactgtgtaaaaactacttttgtgttgtatccaaacaaacttgcctaaacaaaaactaatttaattataatcgattgtacatataatcgattattgaaataatctaatcttctaaacttgatgtttttatttgtaataacagcttcgactttttcttcttttttttttatactatagattgactcttaaatttttggtccttggagtgagaccttttactcttttttctccttcatagaacctggtcctctagtacaactaggatgtgggacaatttctggggctgttggagctacttgtgtctatccattgcaggttattcgaacaaggtaca

SEQ ID NO: 23242 - DNA, 684 bp, Glycine max
  Intron number 3 from transcript Glyma06g19020.1 (locus Gly ma06g19020) derived from phytozome v7.0 (chr-ID Gm06; pos 15250866 to 15251549 reverse strand)
aggtttgtgatttgacaaaaaaaaaattgacatttccttttacagaccaattttagatatagatttttaggtgttatctgtattttaatcaaaattagagttttactttgataatttacataatagaaatttgtattaaagattatatgaattattgaagtgaaatttcaagtctaactccatagaaaaagaaacataaaagaatttgtacctgggttttttttccttgcatttactttcaaaggaatcttttttttcttttttctcttcatgtgattttttttccatatcttatttgatagtgctttgattcatctgataggtttctttcatttcccgctattttccacctcataaagaaaaaagagagacactgcttttccgtatttatctacagtttcaacatgagttccaaaaacagcaggaacagacagtgaatggacaccactagtaaaagtttgcctcttgtttgcaccgaaaagtaaaatcaaaatcatgacattatagatgaggagtctctcctttgtatctatgttccttagttgatatcaaaacatttacaattctccagcaaaataaaataaaataaacaaattaattgccctatgttttttgcatattgaattgaagaatttctgtatttatttattgacaaattgacatgcaccttaatgttattgcagc

SEQ ID NO: 23243 - DNA, 802 bp, Glycine max
  Intron number 1 from transcript Glyma05g30040.1 (locus Gly ma05g30040) derived from phytozome v7.0 (chr-ID Gm05; pos 35460510 to 35461311)
gtcttcactgttggggataaagtaattgccaccaggtgtgctattcttgtttttaaatttttctctttctgcaagtttcttatttggagaattagatagaaggtttatagatgtggtataactttgatattagtagttggttagcatattatgttcaagagagtttattggaggtcttatactcttatttattcttggttggtttatggttgtggattttgatgagtttaacttttatgcactgttagtgtaaaactttttagaatgttactaatcacaaatcatgctaagtatgatttttataatagttatcataaaagtgaacaaacttattgtgagtttgtgattggatgacccttttcaatatgactttatttagtaacaacaacaacaaaagtctaatcccattaggtaagtgatccatgttttggtttatcaagatgttttacattggctccctagggcctaacacaaccttcttcttggtcttgggacttgttatgaaaccattagcgtcgtttcagactttcagtataactttggtccttaaaaataatttagacatgtcatagaattaaggtttctgaatggtcaataaattatcctgtatattatatttggggtggtggtgtttgggcggggggggtgtctttttatatgtatgaaatgaacttcaaaatccttttgggaagtaaacttgtatactttatgtttgattcataatgtctgagtggttgagatatgaccaatatcttcaatatctacagtgcagtttttgggaccgaaatttggccagctgctg

SEQ ID NO: 23244 - DNA, 439 bp, Glycine max
  Intron number 1 from transcript Glyma06g17500.2 (locus Gly ma06g17500) derived from phytozome v7.0 (chr-ID Gm06; pos 13847334 to 13847772 reverse strand)
ctgttttccacacatatctaatcagcaaaaaccaggtttgaacaccatttaactcacaagcccctgaacttaaatgtggctatctgggagtttctgaattctgatcaccctctccattccatatttggaaaccttaatataatgaggagtgctagtaacacttgatcacacttcttctaacacaatctttattgttgattaaaatttattgaaaactataaaatcataagtgaaattcattaaataagatgtgagactcacaaaattttatgatttccaataaatttcaaccaataacaaagtttcgtaatgtccaataaatttcagctaataacaaagaatgcttacatactttatctatgaaagagtaatgtgcatttctagtatggttttcttacacatgttaacgaccatattttgatttatgtgcagtcaacat

SEQ ID NO: 23245 - DNA, 1047 bp, Glycine max
  Intron number 1 from transcript Glyma07g06330.1 (locus Gly ma07g06330) derived from phytozome v7.0 (chr-ID Gm07; pos 5060905 to 5061951)
ccatcgccgccgcaaacgtcatcttcgtcaagaatgtaagttcctttcttccactctccaaatcccatcactccctttgagcacttaattcaaccccttattggtttgttccaaaggagcgattttgattggtttttctggatttgggtgctgattaatgatctgggtcttcagtaatttattgaaattcttagtttttttagatttacttctgtaatctcgctagtctctgatatgctatctctcattagctaatttgtgttcatttaattcattttgatttttgaatgaaaatggaatttttaagaaagtttagttggttgcctccaccggttggactatggatgttaattgcttgctcctgatcctgaagattagggattcctccgtataaaaataaaattaaaggcatattaattgggtttgtgtggagtcccctgtttgttttttttattgattaagagctagtactgggctgaagtattaatcaacttagctctatttttttgaaatggattattagatgtcataacataggaagacaagagaaccgcgtttgggtttcattcttgattttttgttgttcaaactttaaggggtccttcctcttccttatgtgtagcatgtgtgttccctggggtgttttgttggtgtatgggagtcaattgcgtagggttttccagttaatataaagaagacagaagttttctactcaaacatattatttcactttgtgataggccaaacaagggaccatcgaatttatagtaacaaccaaattatattctactaggtgaggttgctgatgaatcaaccaagtccaagactattgaatcaaaaaacaaattctaagcaaaaatcatttgtaagaattgctttctcaatggtttgtcctaatatttagaggttgagttatatcactcagatcagtttttgttgcatttttctggttgttgttttaaaaagtgaatatattattaagtgattgtaatttatttttttattgtgctttacaggatcctttcctcaaaccagaggagaggaagt

SEQ ID NO: 23246 - DNA, 642 bp, Glycine max
  Intron number 1 from transcript Glyma07g36150.1 (locus Gly ma07g36150) derived from phytozome v7.0 (chr-ID Gm07; pos 41537120 to 41537761)
tctctctgctcttctcttctcttctacctctcaaggtacttttcttctccctctaccaaatcctagattccgtggttcaatttcggatcttgcacttctggtttgctttgccttgctttttcctcaactgggtccatctaggatccatgtgaaactctactctttctttaatatctgcggaatacgcgtttgactttcagatctagtcgaaatcatttcataattgcctttctttcttttagcttatgagaaataaaatcactttttttttatttcaaaataaaccttgggccttgtgctgactgagatggggtttggtgattacagaattttagcgaattttgtaattgtacttgtttgtctgtagttttgttttgttttcttgtttctcatacattccttaggcttcaattttattcgagtataggtcacaataggaattcaaactttgagcaggggaattaatcccttccttcaaatccagtttgtttgtatatatgtttaaaaaatgaaacttttgctttaaattctattataactttttttatggctgaaatttttgcatgtgtctttgctctctgttgtaaatttactgtttaggtactaactctaggcttgttgtgcagtttttgaagtataaag

SEQ ID NO: 23247 - DNA, 601 bp, Glycine max
  Intron number 2 from transcript Glyma07g08970.1 (locus Gly ma07g08970) derived from phytozome v7.0 (chr-ID Gm07; pos 7491459 to 7492059 reverse strand)
cttctaagccctgcaatctttcttctggttccaaggtatcactcatttttctgcattatgtgcatgttcttttcatattattgtgcacatgtttctgatgttctattttgatgaatattttttataagacaagtattagtaatacccttaccaacacactttttctaacacattcaactaggtaaaaaggttctctcaggtggaaaaaacttagattctcaagtgttatgatctcatgagtggaaatgtcactagagaggattcattccccactacattattagttttaaatttattcaaaactaaaaaatcatgagttacaccattaaataggtagtgtaacctacacaattttgtgattgtcaataaagaataagtagtgagttgctaacatttctcttttaataatttcaactaaaataaactgtgttaagagatgttttgtgggtagaggataatcaatatatttgttttccatatatgacagtagtgttgattagaattgacaattaaaacatcaaattctggagcatgattgataactggcactcagctttgagtttcagctagaaggcaagcgagtaggcattgttggattggg

SEQ ID NO: 23248 - DNA, 891 bp, Glycine max
  Intron number 1 from transcript Glyma07g08970.1 (locus Gly ma07g08970) derived from phytozome v7.0 (chr-ID Gm07; pos 7492508 to 7493398 reverse strand)
cccatctcttcaggtaagcaataatttctgtttgttgtttatatgtcgttttacaccactttctgctctcatactcgttcatcgatgggtataaattagtgtgttgaaattgcaaaacagaaaatgaaaaactggtgttgtgaattgaggcatcgtaaattgactctttaagttgtcctcaatgaccaaacttaaggccactcctattcttctattctgttattaaaattgtcggagtatttctttgtggttattgtaatattctcattttatctcttaattagagagacaactccatggccatgagtttcttgtcagcatatagaatacaatggtgcttaatatcatattgctaaattttggatagctttagttttaccatgtttgctacttttgttagttttgtaaacactactatcaataactattccatcagtctgaaataaaacatccccccataacatgttttgaaaacaaaaaaaaatgtaacgttagcctttacatggtgaaaatacgttagtttgattgtgttttttggttattatagcctgttaggtttcacatctaggatgtgattttaaaagagctagcttccacattctaaatgttatttcttacttctagtttgttaggaatagttgttaattgtcataagatctgtaaagtaaatagagcctagatagtctcattgtattttttttttcaaatcaatcaattgcacaatgagttacttttgtggaactcctttgccattctctaagctccatgtctgaccacaaggtgtgatatgcatctcaaaattctgatactattagaataaaattgaaaggaagaataaatatttggagtgtttgatggtaccattttactggaactcaatcatcaaaggca

SEQ ID NO: 23249 - DNA, 868 bp, Glycine max
  Intron number 1 from transcript Glyma05g13330.1 (locus Gly ma05g13330) derived from phytozome v7.0 (chr-ID Gm05; pos 13812738 to 13813605 reverse strand)
atgttagttaacaactctctcaccttcgttgtctcctttgttggatgatgctttgtttgattgaactggtgaaatactgtaaacgtcgtcgttttggtctggagctcttctgaggccttgtttaatcactggttttgcgaaattgatttcacattatctttcttctaaggagcaaagttaggtactgaattagaatttgtaaaaagattggataatcttcattataagcactgataggaaaagaaaataaaaaggcttagtgaattgaacttctcttgtaagctaaaatcaacttatgtttgtaaggctgtaagcttttggagaagttagttgaaagaaaaagtttagtagtacataattcattttagcttgtgaaacaaaattaatttattttatcttgttattttgttttcctgtaagtacttataattatggaaaatttatccagcaggcctttgatgttaattcaggtctgatcttttagtttggttcttcgcagatgtgaatttggtgcttttagatcctgtttgggaaaactttgttccaaatattttggaagaataattatgagaaactgtcaaatttatttttactttgcttcttgatttaaaagatttatagacaaaaaagaaaagtaagattacaatttgcaagtgtgaaactgaaaatgggagcaagaaatgtttggttggactaaacagatgaacttggttgaggaattgaaaattatcagcaatgcttgtttatattagtgaacaattttggattgggtgagttttatttttctccttgaatcatttttgtctattattattgtgtagtgatctttgttattctgcgttcattctttgaattcaggaggaaatta

SEQ ID NO: 23250 - DNA, 778 bp, Glycine max
  Intron number 1 from transcript Glyma06g43580.1 (locus Gly ma06g43580) derived from phytozome v7.0 (chr-ID Gm06; pos 46587697 to 46588474)
ctaaatcattcaaccttgtttctattgcttttgtggtatgctttttattttcctatttgatcctcctttaaagttcaccaacaagggttgagtctagactagaggaatgggctggtttcttctcttaaagtagccatcagttcaaaattcaaatcctcactgggagtactaccatttagtgtctgaccatacttcatgtaggatttatacctgtcagaaaccttccaaaaaatgttttaaaaaatattctactttttctatatatattttgtcaatctagtcaacagaaactgagaatacagaggtgcctctgtgctgttgagaacaaaatattcttgatgattactggagtcaaaagcctagaaagcatatggatttttttgaagattcatataattgaaacacagaattctatctagaaactaatatttttctgtgttcttgcattaaatcaattgtggatttccaatttcatatcaccacatagttgagtaatcttttcatgatgagcatagttttatgcaaatatgtattttttttttctctaacgggagtctttggatttagatctacattccaggaaaggagtcatacaattgaaatagcaaactatggtttgtaggtgctacttgcaattcacaagtcataactaacatcttttgaatgttgttccccatgacaattaatagaagcacagatagattgctctaacaatatttttttgtagtaagatattagtggattttgatgtctggactccgtgactataagtaggttc

SEQ ID NO: 23251 - DNA, 558 bp, Glycine max
  Intron number 1 from transcript Glyma06g32480.1 (locus Gly ma06g32480) derived from phytozome v7.0 (chr-ID Gm06; pos 33288224 to 33288781)
tctttggttggagctacaagatctggcttcaaaaggtgatttcacttcttttgtattaagcaaatttatatcaaattttgattttttttaatcatgttttgagtaatgcattaataaatctgggtattttaaggattgtattaaaactaatagcatgtgtcttctaaatttacaatgtatgttacattatacgcttatataatgggatgtcaaagttttatcaattcacacgaaattgaattaacaaaatgaaaagaaactctattgtaatcgattgaagaaagaggaggagaaacaataataaaaggttgtatacttacaccttttcttcacccataaaattttagaattccttaagtagatgagcataatcttaggttataattttaaatatcaactttaatatttatcactgcatttttttaatttatcttttctcttctttttattaaacttcattacattatttatcatattttttttttcattccttaactaagtttacacactagcaaagtgttataatatttttatttttcagactatttagttatattt

SEQ ID NO: 23252 - DNA, 945 bp, Glycine max
  Intron number 2 from transcript Glyma07g09970.1 (locus Gly ma07g09970) derived from phytozome v7.0 (chr-ID Gm07; pos 8384076 to 8385020)
tgccttggcttcgactctttgatcttcaggttagtactagtatgtgtgtgttaatcaagaaacaacttcgataatcaaaactataatcaacaatctcaaaagataaatatatatatagtaattttattaagacaaaaatggttaattgaaagcaatataacaaagataaattatactattgactagtattttaatttatcatttatacaagataagtgtttacttttttatatagttaaaatttatataaaaaactgtcaaaaaaattataataagtaatttttaatatatgaattgtataatgattaaattttataattaataatttaaattgtgatatagaataagttctaactattggtatttttttaaaaaaaaagactattgaaatttattttaatgacaacgacgaaagagataaagataaaaggaagatacttttagatagttgaaaataaatatttttagagtaatgtatgaaatgatgttctaattgtgatataaaaaaatatcgagaatgtctagctaagagagcgacgagactaagagtttcactctttattatgtgtttgtttcaacatcaaacaaaagatgtggatcaatatataagaaaaaaaactagaaattgtatagagtagttcttatcttgacatgaaagagtgttttgatgagaaaccaaacatgttgtgcaagttgcacattctaatttatactaatacaagagtaaattaaaaagttgggtacaaggatgtacataaaataaatgtaaagaatatttttcaaaatttactttaaattcttttatcaatgaaatatgaagcaaaaaaatacttttaatttttaatatatccactttataatattatttcaacaactaattatgccttgtattttgttattggtggcctagggattaacacgacgctcaaagaaaatcagtaaatc

SEQ ID NO: 23253 - DNA, 491 bp, Glycine max
  Intron number 1 from transcript Glyma08g39350.1 (locus Gly ma08g39350) derived from phytozome v7.0 (chr-ID Gm08; pos 38887736 to 38888226)
tctacgagaaggccgtcggggaaggaatagccaaggttcactttctcaattctttttttttttctctttttgtcaccataatattaatattagtctgaagtatttatcaactttggcgatgactaatcttcataaaaagaatttgactgaccatcgtaattgaaacctttgggtcttggatgggaccttgaggtaataattctctgttcagaacttggtgacactttgaaccaaggtttttaaaaactggttccggaattagtcacactcaaaaaccgatgcattgtgttttgtgggggatcaaacctgatcctgtcccacaaacaaactcaacttgtgttgtcaactgagctccacccattgtctcttttttcaaccatggtttttctggttattgttagtttattttattttattgaaagtattaaagatatacttagtgtaccgtgttgtggtggtgcagataagtattaataggccagagagaagga

SEQ ID NO: 23254 - DNA, 463 bp, Glycine max
  Intron number 2 from transcript Glyma08g24420.1 (locus Gly ma08g24420) derived from phytozome v7.0 (chr-ID Gm08; pos 18608881 to 18609343 reverse strand)
ttggaacaacattcagagcaagaagggtaaacaaggtaattttgttttctgtggggtgattaaattaatgcagaaaaaaaattaaaaaaaaaggagagaaaaaaatacaagagagagaaaatcaaagagatctattaccttttgtttactatttttgctgtgtatttttttaagtggtgattattattattattattatcatttctgaccttgttttattcctggtaatctttgtgattgcaacgttcacatacactcttggggctggtttagtttatttgggtaagtccttttctcatgcacttggatctcacacaatcctagtcgacttttcaatttttcaaattaattaattgtattgcagtatcccttcttttcggattattttttaagatcaagaaagattctgatcctgatgcggttggttggacccaattctttatttttgttcatgtaggggcat

SEQ ID NO: 23255 - DNA, 618 bp, Glycine max
  Intron number 3 from transcript Glyma07g39180.3 (locus Gly ma07g39180) derived from phytozome v7.0 (chr-ID Gm07; pos 43734641 to 43735258 reverse strand)
aagcttaaaatctaagataatctcagaggaggtcagttctagtttggttttaaaccagctaattctaagtcatgaatcatgattatcacgataacttctttaaagaatcagccttaagaagattgtaaattgttagagcttgtttgtgtaaaggatgggagttgattttctcccttctgtccaccagattcataaaggcaggcttgcctctatataaagaggctcgtgtctcaaggaacgtttgaatccttagcattatagaagcaaacagtaacagtagttataccactgatagttgttagttagcttattagtttgtttactcactttagttgtaattgaatggtaccatcttagctgtcagctctagttcctgttaattagatgtttccatgcttcctaaaatacacgttccccttttattattgatcatattaatcaatcaataacaatgagactttccacttctgtggaacagcctctctcctctatgaacagtatgatgtgtgatcacaccaagttagtatcacctgcatcatcatcaataacgtttactttattttgttggtcaattctgctagatgtcagttgctttgttctatgctgtcatgcaggttg

SEQ ID NO: 23256 - DNA, 779 bp, Glycine max
  Intron number 2 from transcript Glyma05g30990.1 (locus Gly ma05g30990) derived from phytozome v7.0 (chr-ID Gm05; pos 36226946 to 36227724)
gaagacgcgaggactttgtttcaagagatcgcgtttcttggaatataatcataacgggtacgccgagctttaagatttcaagctttcaacctccacgccaatatgtgttagttagcttataactgaaaagtgtttgtgatttattttattttttgttgagaaaagtgttttttgtttttcaataagatgtgtttttaaaaaaatgttatagaactagtgactctaacgaaataagcttggtagttaggcttctagttattgtctttggtgtttggttccttgtatatgattctccagagtctgaattgaaattgaatgacatttttgagtttgtgggtatccttacatatgatctagaccttcgggatgacaatgaagattgtgatttatcaaatgggcatttttgaagatcctttgggccatttcccacctatcaaagtcccagccttcattgtttcattcacaggaaaccagtggttttaactcattaaaggtccggagaatagtaaccatcagcatgctgccatgattgagccgattaaatcttggttagctaaagattggcaagttaatctttcccatgtttggcgtgaatgtaatcatgttgctgatagattagcagctaagggtcatgagcttcccttgggtcttcatatttttaactcctcctccggactgtcataatgtttggtggagtgattttgtagggattcatttcccacgttttattctctcttaggttaggggcttctgccccccctctgtatcaaaaaaagaaa

SEQ ID NO: 23257 - DNA, 548 bp, Glycine max
  Intron number 3 from transcript Glyma05g26300.1 (locus Gly ma05g26300) derived from phytozome v7.0 (chr-ID Gm05; pos 32290672 to 32291219)
catcttctatttcactgcggcttggtgtggaccttgtaagttcctgtgacttttctttttgtgttgttgactcacataattgataaagtcatcgtataattttaattgaaaggaatatttggtgtatgataccaaacactaaattacgctgaactcaaaagaagcatgctttgtgatgtactaaaaactggagattctgatagtaggttttgtctaataagattatgttcctaaccccctcatcttcatgaatgctcaaattgaaaaatccccatgagatctctttattgaaaacttcaaatttgcaaacaagatttctgcctgttctggtcgtaatcagtcttttgtttaatctgtcattatgcttgtgttaaaattatgtggatgacacatgtaatgcccattgacaatctgctgagaggtggtgttcgtgcttcatcatttgtattttattttttctctagctgttgtattctaaagagaattctcacaatttttctggtttctgtttaggcaggtttatttctcctatagttggggagctcagt

SEQ ID NO: 23258 - DNA, 585 bp, Glycine max
  Intron number 1 from transcript Glyma07g16800.1 (locus Gly ma07g16800) derived from phytozome v7.0 (chr-ID Gm07; pos 16480153 to 16480737)
acaaggtgtataactcttcttttctttgtttgtgctaatttatcactaaaacatcatctttcatgacatctaaatatgagatgttgttatatgttagagaactcaatagttaactgccaattatcatgaatttctttaatatttttcattcactattaattgtataccaattttgtctaaaattatattaatgattcatttaacaactacctccatttatttttgggacgtttatttcatgcaatttttttttcatttctgagaatatcattcatgactattttttaaaaatatgtttgatcacgtttttaatatttctaaaaataactttaaaattcaaaataatttaaataaaaatagataaaaaaaagaattgaatggtattttaggaaataaacgtgtggaaaactatgataaaaaaatggaagttattatatttcctagaatcaacaataggtgtgaataattttttaaaatttataacaaacgtcagtatgtaatattttcatgctaattcgtgaaacaaacgcactttatgaatactaataaataatgtgatttgtgaaattagattgggggtgctgt

SEQ ID NO: 23259 - DNA, 746 bp, Glycine max
  Intron number 2 from transcript Glyma08g18740.1 (locus Gly ma08g18740) derived from phytozome v7.0 (chr-ID Gm08; pos 14103029 to 14103774 reverse strand)
caggtgcctccaatcattttattcttgtgcaaatttacttgcacagtttactaatataaatattgagtttatgtttatgtattatgtcttcaacatgcaagcaagggcttctacttcacatttggttttatgaaagtagggtagcataattgtaccttttattcattatttgtttctattgatgctatacatgattaatcatttctgctgaacatattggtctgcttgtaattatgaatccttgaataacaacaaataatgaataaaaggtacaattattttgaatcctttatcccgagcatattggtttgctcttaattatgaatatgcaaatagtgtttctttaaaagcttggcaatctcataaagataaagtttagttacttgtatactacttgagttaatttatatactactattgatgaaatgaaaatatgttgtctacgagttatttatttatttttatatttttttatgcataaacatgagtgacttacatctcatttagaggggaaaaaaatcctaaatttgacaatttggttaaagaactagagtctagagacttcttgtgtatggggacatagcagtctttgattgttaattaacttaatgcacagcagtctcacttgccgtctctcttgtctgtcatgctccacatcgttatcccacttgcttatcaagaagtaaaatgttgacaacacattgcctttttaataggtgtcccctgatcaggcacagctgctcgca

SEQ ID NO: 23260 - DNA, 757 bp, Glycine max
  Intron number 1 from transcript Glyma05g29090.1 (locus Gly ma05g29090) derived from phytozome v7.0 (chr-ID Gm05; pos 34761356 to 34762112 reverse strand)
agctcaggtggtcaacgtcaaccttgttaagccttcacttctttcattcctttctctccccccccccctttttcttgtattgacatagatctccctttgaggttttttaagtaattcttcttaaaaacttaggtatcaattatcattttaaatgtagttttgttgttgtttctcaataaataaaaaaacacaaggtataacagataattgatcaaaatataacacttgtaataattgttacacatgttgtatatttaatttattgaaagaaaaaagcaccatttttttttatattcataatattacatgcatctatttttatccttctatttgctagtctcttctttttcacatatatattctcaaaaaacttgagtgaaataagtaatcctttaataaactcatctcattcacacatctatagggatttcaaaagaaaaatatgttcccatgtaccaagcatttgtttgatattttgcttattaagcatggagaggacattgtgtgagtaattttttatttgaaaagagagaaaaaaaaaaaaaaaacttctacatgcatggagctccgaaatttcccaacttcatgacccaagtaaagtgataatgatccaattatttgattgcgttccagcaaaataagctagcttttttgtatagttaacattttggcattacatatcccctctatctgtatattatacatataaaaaatgggccaaaatatcttatagaattgcttgttactgcagctcagc

SEQ ID NO: 23261 - DNA, 1044 bp, Glycine max
  Intron number 2 from transcript Glyma08g37430.1 (locus Gly ma08g37430) derived from phytozome v7.0 (chr-ID Gm08; pos 36050493 to 36051536)
gggcatttccacttatcctctagtacccgggtatgcttcgtattattatgttagagcatttccaattcatagttacatagatggattactcatcttaattttatgggcttataattatataaatttaaatattttatgcaaaaatttacttcaatgttatcatatttgttaaagtaagtgactaattttattttgtgggtcttataatacttaaaaaaatgttatttataatataaatattataaatattagttgtttatataaatagtgatatttatataaacaactttcatgtcatctatttcaataaaatatataaaaaaagtaaagcaattttccttaaagttaatcaacttatgttggagatgctttttttttttttcagtcaacacaagttgtagatgctcttaccatatttaaaggttaatatacatattgtttttatttaattttgacttttaaaaaaaatactctacaatgcatattaatctttgaatatggtaatttcaaaactaatttattaaaatttaaacatgtacttaatgatcttgtgcaaattaattttaatctaataattaatttagtgaaacttttaatatataacctaaccaatgatgttcgatgattttgaaaaatgacatctagctaatttctaaaggtttaataaactaacattcactttttgtttttctaattttttgttttgtttatgattttggtgaaattctgaatttactttagaacgaagccaaacagggttttggtgttttgaatttttcaagcatcacaagcattgcattgttcttttcaagtttgaatccacaatttttcagcagggctagtccaataaaattataaagaaattaagatatgtgatccaaattatggtcgtgttaacattacaaataattaaaaaatcttgatgttatagttcaaacggttacaaaccgttttttaaaaccttggtcacattgtatatttgtattctaatttgagtaccaaaacataggcacgagattgcaggtgaagtaacagaggtaggaa

SEQ ID NO: 23262 - DNA, 618 bp, Glycine max
  Intron number 1 from transcript Glyma08g02290.1 (locus Gly ma08g02290) derived from phytozome v7.0 (chr-ID Gm08; pos 1598036 to 1598653 reverse strand)
aatgtgtgatattctaattattgaataagcaccacttttgtcttaaaaagagaatgtgcgaagtgaaaatgagatccgttgtctcaaatttgatcgtaaatgtaattatgtaaacgtggatcactggcatggaggcgatcacatacagcatataatgtatttggcatcagaaaccgagaaagaaatgctagttattgtgtggagagtgtggtgaaaatatgccatgttggtggaagcttagaaaattaagctggaactgttcctgaacataaacatctatagtctattattatcatatgttatatactggtagaagctttttatgccataatatttgtgttcttctgcacctcttttgtcttttattatcaaatggcaaatgagcaactcacgggagtagtatgcctgtgcagaagaaaaggaaataggaaaaaaaacattgaatacctacataatctattgttttgttcattactttgttttttaatctgaactttattttattgaactcaaagaccttatttacgtgtataatatatgttttttctttattaacaggtggaactgaaatttcaatatagagcacttctgtttttggcataccagagtttaggcttt

SEQ ID NO: 23263 - DNA, 590 bp, Glycine max
  Intron number 2 from transcript Glyma05g24710.1 (locus Gly ma05g24710) derived from phytozome v7.0 (chr-ID Gm05; pos 30856486 to 30857075 reverse strand)
ggattctcgaaataggtaaataaaattaagcctgaatagttttcttggaagaaaaaattgagaaagataatgtactagtattgttttaaattgagttgaccaaatttgtttctaaatccaacaaaaagatacgaatgataaattttgagtttttgacacaaatcatgtgatacaattatgacaccaatcgtatgatacataatcgcatattcattacaccctgacttttaaaaaatagtattctatcagtatccattacattccctgtatgtttacttgctaacttacatgcatgtgagtatactttcgtagtataaccactttcatagtattttgcttaataagttcactgtatagagaaaacagaggcattgattatcttttatgggtcattggatttttattacccaattacttttttttttgtttttctctattacactaccacattggtccttgattatgtaataattgatagtttttaaaaaaaaaattgagtttattagacatacaacacattatttatctcatttgttaccctttgtcatatgctaggaccgaatctgaactccttaaggacattgttggag

SEQ ID NO: 23264 - DNA, 736 bp, Glycine max
  Intron number 3 from transcript Glyma06g47250.1 (locus Gly ma06g47250) derived from phytozome v7.0 (chr-ID Gm06; pos 49769008 to 49769743 reverse strand)
tacagattcagtagtagcaagggtaagactcagtttcgatatgcaagttttgatatggtcttttatttacttatatatctagctttctggattatactatccttagtaacctaagatattgtgtactgctcgtgtttaactatgtctgagtgttgcatccgattacactgcttttgctcaaaatattaaatcatatccttgaattacaattgtttatgtgtaagccataaaaatattttgcaccttcacttttgttttgaaaattgaaatattagtttgggagttgcagttgggatagctagattgaagtattttcttattttatccactgtggaaatataatctatgattctattgtaccaattggtgattataaaccactaaattttttattgatttgtgagcctcaagagttttctattcaatgaatattggatctttgcaatgtagtttggctacttcttatatccttttatatatgaaaaaaatataatctatgattctattgtaccaattggagattataaaccactaaattttttattgatttgtgagcctcaagagttttctattcaatgaatatattggttctttgcaatgtagtttggctacttcttatatccttatatatatgaaaaaaattcaaagtatgaatactctctttggctgacattacttatatgatggtttgtttatggcaggattctttgtcatcttttctttcctcagattcaga

SEQ ID NO: 23265 - DNA, 769 bp, Glycine max
  Intron number 2 from transcript Glyma08g07890.1 (locus Gly ma08g07890) derived from phytozome v7.0 (chr-ID Gm08; pos 5656106 to 5656874)
caaagtttctgctccttctgccaccaactgtggatgtcagtctattactattactactaaactttcctcctttgttttcaatgtttttatgatgctgttgtcaccaagtattcgttgtttttcgttgatgattaatcttcgttcttcgtcagaaaatctgattaattttagtggggttctcctacttttttttatccttgaatcaagatcttgtttaaggaaactgaatcttgaatcaagtatcagccgttccttccaacgacttgttggtgcctgcgagaacgtttatggatcaagtttgttgttttagactgttgtgttggtggaagttttctttttaatgttttttcatgttcctgtgagaacatttatgcataaagtttggttttttactctgttgtgttatgaaaattttcattttttatgcatgatgtatgagatggatggatcacacgttgtctttcattttcatgcgatttctgtgttactagtgagaaatatactgaaataataattattaataataggattcatcattatttttttatgtctattatttttatttgtcttatttttttgaaacatcacactctactaatggtggtacatggggtgccctgaatttttatgtgtgtatgtgtacatttgattttggatattggtcttaattttcacacatcagccttctccctttgttttaggtcagtaactgtattcttttttcttttttttttttgcagtgtctgaaacgcctgctgctgctcctggt

SEQ ID NO: 23266 - DNA, 887 bp, Glycine max
  Intron number 1 from transcript Glyma06g18580.1 (locus Gly ma06g18580) derived from phytozome v7.0 (chr-ID Gm06; pos 14874498 to 14875384 reverse strand)
gcggaagatccgaactgtgagtgctacaatggtcctttccttgctctgcatgcatccatcacattgcatctcatagttattttttgtaatcataatgattattcagaaactattacaattcaatggatgccactctgtttagtggcaggggtttgaatggtttgcatgctgccctagattcaatttccattacttctattgtataccaattttttttataattaaatagatgttcaaaatgcaactaaatatttacagcaaaattatgcatcggcttctatggggaaatggctggaaaaatggtccttgggttggttctgtgtccccacgtgtgatgggattggtggcatggcaaattggcttctacaaacaattgactgaataatgcatggcatcaaggttttgaattacagttttgttgtaaaacttgatattgcagaaaattgcggacaaatgcggccgcgattatagttgcagagaccttaaaaacttcaataatacagagaattgcagacaaatgtggctgcaattacagttgcagagatcctaaatcattaatgtagcagctgaaattgcagtgatgaactgtttcctaaaaccttgcatgatagtgaaaaatgatgggcgttttagacaggaatgaaagttttttgcctgctttcttattatgcttcagctgctcatttatgaatggaaactagttaaatggtccgtgtgtggtcctctttgcccaaagtgatttgttgcctgattttcttaccctgttatatttatttaaccaggggcatttattcttcttttctgccgaatttaccttatgttggtgtgttttgatgtcagttgtgtattcagtggagaagtcccctgtatcatactttttggaggaa

SEQ ID NO: 23267 - DNA, 828 bp, Glycine max
  Intron number 1 from transcript Glyma07g34730.1 (locus Gly ma07g34730) derived from phytozome v7.0 (chr-ID Gm07; pos 39749856 to 39750683 reverse strand)
gaccaagctttggtcgcgttacgatccttccaccggtaggacctagttttcgttttacgaaattaaataaagcacgttgaaagctgaaactcgtgctattttgttgttcgttgatgctgtcaatgttctgaagatgttttcggattgaagaaaaataaaattgatatcgaattaagtgaaattgtaggtttacatggtaaaaagttaaaattacaaattgttcgttgcatttttttccttgctttgcaacaacttattaaataactaatgattgaagttaggcagggagcaaaccttgtgataatagctaattaatagtttattacattgaaagcttatttcttttgataagcttcgccgatcaccatggaagttattaactgcatgtttggtttactgtttatcagtatttgatgcacgtggagcaaaagctacaaatagtagtttctgtgttttagttttacgctattggcatgaaaatgccacttgactcacaaatttgatgtgcaaacaaacaccagctaagtaaaagagcttataggagccactttcttaaagcttaaaagtaaataccttcaaattttaacttaagtgcttgtatgataagtccaaacaagctctgtagaagctattccaaatggccctggatttgtattcttatgtctttaatgctcgtgctgtatccaagcttatgtgcctgcctagtttatttctttctttactgaaataatttgtgttttgtgctgaagagtgtgctgtaagaaactttgaatttggtgatcataacatacccaataatctattttgaaaccaggaaaaaccgagtcc

SEQ ID NO: 23268 - DNA, 651 bp, Glycine max
  Intron number 1 from transcript Glyma08g19420.2 (locus Gly ma08g19420) derived from phytozome v7.0 (chr-ID Gm08; pos 14683615 to 14684265)
cacttcccctgtaaatcacgtttagttcgcacaaggtgtgttttgttcaccgattctgcgatttgcgttttcgtctgatgaatttttgtgtttacatggcgtttttggttactggatccgtaaacttttgttgtgctttatggatcgaaattcttttgacttcgtttggtcttgctgatgtggatctacttcgtacctgcatcttgtgtgtgtaggttttggttttagcttaattttgtgatgagatgttttctgatgcatcggtttttattttcggcttgtttttatccgatcaagttggaagatgatattcttgcttagcttattaattttatgtgtgtgcctttttttttacgagtcttgtggatatgttctgctatgcatgctttcaggatctttcgagtgtgttaaaagattttcattgcaattgcatggaaatgatggtattacttgtttcttttcttgattgaacgaaaagtgaaatcattgtgagtagtagttgatgaatttttgcataattgagtgatagtgaaaaaaggcctctctagtagtttcaaacttttgatcgttgcttcatcttttctttggttttgttttttatttcctttcctgaacaacttatctcccgttctctgctacaggttttaaaaa

SEQ ID NO: 23269 - DNA, 937 bp, Glycine max
  Intron number 2 from transcript Glyma05g21800.1 (locus Gly ma05g21800) derived from phytozome v7.0 (chr-ID Gm05; pos 26684604 to 26685540)
tggcaggcaccaggtaatgatgctgcattctgtttttttttttttttttttgcttatgtaataatgtttcgtatttggatgatgtgtgattgccttaactatgttaatttggattgctaaatgtggaaaatgggtaacgaaaattaaattatgtgaaggaactgttgttgtgttgtggatatgatggtgacttgtgatgattgggaaaatgggtgcctagggtgttataggataggacgtttgggtttgtggtctaggcttttgttaagtattgaagcggtaccagccagttcttagtgacagtgaaaatggaaaggtgtaaattgggggagtgaagatttatgggatatttggattatgataaaaaataggtttcattcttccattttcaacttttccgtttatagaaagcacaccctcagggtagtagataggggtggggaataagccagcaacatatttggctttgagcttcttttgcctgccttggtatgtttcttacctgagttattcagttggttaagattaggccttcgaaaagacctagttaggttaacatgatggcatttgtgtgtgcacgtgtgtgcaatagttttttaatatgcttgttttgtttatgatggatatatttattaattttataaacattacaataattttgatttgatatctatgtttatttgagaccttgaagttgtaggcctattaacctatttgaaggctgtcattcaatatcagttcagaataaaataggttgttatattttcatagaaagctaatccaggcctacaaagagatgtcaaagaataattttgtttaaaacttcttgtatatgttatgtgtgtgtaagtccatccactttatctcaagtagattggatttcttcaattttatgttaacaggatccaaagtttcagccagaatcttcaagcaccta

SEQ ID NO: 23270 - DNA, 668 bp, Glycine max
  Intron number 5 from transcript Glyma07g31100.1 (locus Gly ma07g31100) derived from phytozome v7.0 (chr-ID Gm07; pos 36040085 to 36040752 reverse strand)
gccatacacataactgctcaaaaccaaacaaagtggtacacatctagactaaccatataggttctttttttctgtgtgaagagcctatattgtttattgtatgttaaatgaagggagtttggtttaaatcttctctgaaaactaggaatatatggagcatgtcatgtctttatcactgaaaggatttattgaaaatcaaaatgtcttacggactctattttcaattaggctatatgtaaacatcattaaaagttgggagaaaatttgggtttctcactgtcaatgtattgaaatcaaggtttttatttagtttccttttactttttgggaacagccactcaaattgaaaaaaagaaaacattacagaaaaacataacacctcattaaaaccatgtgaatcttctagttgtagatgagttgggtaatgtgccactgcatgaccatgactctgttattattgcttggttatgtatcccttttttgtctgtagtgtttctgtgcataccagactgctggttttcttactttttgtttctaacatatatgctttttgatttaaatatactatgaatgtatatatttcaatggtttatttttcccaatttatatattaattcctgggttctttctcaggtggtttgcaaaaagatttctacatccagatatag

SEQ ID NO: 23271 - DNA, 933 bp, Glycine max
  Intron number 1 from transcript Glyma08g20490.1 (locus Gly ma08g20490) derived from phytozome v7.0 (chr-ID Gm08; pos 15514125 to 15515057 reverse strand)
ttatcacttccaacctcccaataattggataagtatatataacatatttccttcaactcatcttatagtttctcatgtaccctttattcctttctttctattcttttcatttgtttttgttaatttatgtctctaattaatctcttgtttttttcaattgatatgttatcctgaaatggacatgtggatgtatttggacttgaagatcccaatggttagttcagttcacttatatgaagaatctccctcagtgcatcttttttactttctctttgtagtttctttcgattcatgtcgtaatatcatcatccctattctcatattcatctaaacaacaatcatttccgaaattctggaaattcaaaatggttgaaataatgttgaaatgcaatttatataagaaaactaggaagaatgcagaaaattacaatgtttcccaaagtttgtttaacagcacctacaatgccgtagaaatcaaatataacgtaaaatattgagctagatctctatagactagggccagagtaaaagaaaataaatgaacacatcattgattaacaagtttcttccatttggttggctttgttctataatataataaactgatgcatgtagataatagtgaagtcaaaactacttatctttctttatgtttctctctaattgaaatataacatgctaacaaaaataattaggagagaaagtgtcattatgtgttattttttaaattaaaatataaaaagacgcgtagaaactagaaaggactcatgatatgaatccacagaaaagactcatgatagtcttaaagaattcacaaatcacaagttgatacgtgccattaatttttctatctcttattattttgtgctgaaaaataaaaaaataaaaaattgtccttacttggggctttataattgtcaggaccattgagat

SEQ ID NO: 23272 - DNA, 630 bp, Glycine max
  Intron number 1 from transcript Glyma07g32380.1 (locus Gly ma07g32380) derived from phytozome v7.0 (chr-ID Gm07; pos 37284233 to 37284862)
tgatttcgtggaaagttattatcacagaatctgaggtaaccttcgatcctctgttcttagtcctatgcaaattaaaaaaaaatcacctttcaatcgatccacaacatctttctttgctgttttgcgattttttcatccaattcgcgttttgggttttcgatcatttaccgagtattgacttgggtcggttctgctgcctcgaactggttttatcatttttttcggaatcgggcttattatgacgcttaactttgtctgtttgttctttgatttgtttttgaggttttgggtttattttaaataatttgattgtttcgatctatgtttagggtttgtttatttttcatcaggaaatggtttcattggggggttaattagttgaaaatggggcgaatcttttcatgcaatttgaatttgacctaattctcacgtggggttgtcggattctttgtgtttgaatatatggtctttagggtgtgatgctggaatatgctttctgatcatgataacgttgcctgcaagttgtgttcgttttttttggggtttctctctctattttgtggtggactgaaactctgtttgtgatatttgtgagtgtagggttttgtagacagaacttcaggtttaaca

SEQ ID NO: 23273 - DNA, 953 bp, Glycine max
  Intron number 3 from transcript Glyma07g30460.1 (locus Gly ma07g30460) derived from phytozome v7.0 (chr-ID Gm07; pos 35462804 to 35463756 reverse strand)
tggggaaacttcaagctggctatctctttcctgaggtatgcaatgcttacttgatctttctgtttttggtcttgttcttctccttttattttgttcagaaaccaagctcttagtttgattatcagtcagtgcatagttcatttggcatgccagttgagttttgactgtgttgttttcattcatcatacatgcttttcctccaaatgggatgctatgtttttgaaaatattcttgaactgttcataaatattttgtgttactgtacgtgtctaatcccactctgtgaaaagcttttagttttcggaatagttgtccatgtcccggtccagccattcatatgtagaagtaggttggaattgtattaagcaggtgcctcataatacaagatgaaggattccatgtctttttccagtgaaataacaagttattgaataaagaaggaaaaacttttgaacattttaaccactgcattttgtgatcaatctcctcttttaatctttactctgggtaagtcaagtcatttctacttcatcagaattgatgttcttttggagccatacatgtaaccttaacaaatgatgcctttggtcaacaactaatcatatgatttttaaaagtaaaaactgattaatttttttgaaatgagatgttgtatcattgttttacccttgaaatttgcttttcttttctacctcaaaaaaggataaataagggagaattagaaaaatatgtactattttactgattcattctactgttttatttatatacaattgtaataatcaatgaatgcgtatatctttgtctctctttcacacactccaactttgagattaattctttatatgatatgtaattactttcctgcctttcatgtcactgaccttttctttttgcaattttattttaaaaaaatagattgctagaagaaggtctgcacacttgctgaagta

SEQ ID NO: 23274 - DNA, 497 bp, Glycine max
  Intron number 2 from transcript Glyma07g30460.1 (locus Gly ma07g30460) derived from phytozome v7.0 (chr-ID Gm07; pos 35463758 to 35464254 reverse strand)
cgttgccacacccgaagctgagaccggtaccttgaaatcttcccttttctattttagaaatggaaaatgatgcatggataccaccatgctaagtggcacctagtgtgagaagagagatagagagaaataatgtgctaatggagtgttcattatgtggaagtgtcctcatataattaccctttaaaatctttgttttttcttgtgattaggcaatgtttataatagggtgcgtagctctggtcagtggttgcttttttacaatttgtagttgacaagtttatgaaatcatatttttagtggccatttcctggctgttttagttgtatagtagattgtatgttggaaaggttgctgaattggtatagttttgaaaaggagcatgcaagttggcctgtttgactaaacattagagatatgatttttgagtgagataattattttttgtcctcctttttcactttgaagcctacaagacaggggtcactcgcaatccaaat

SEQ ID NO: 23275 - DNA, 734 bp, Glycine max
  Intron number 1 from transcript Glyma05g27960.1 (locus Gly ma05g27960) derived from phytozome v7.0 (chr-ID Gm05; pos 33816980 to 33817713)
aaggtaattaaattaaacccatttgattaattcatttatttatatactccaaagtccagcacttattttcttgaaaaaaagtacagcaattcttacatcataatttaatcaaactatacagtacatttgttttctatttttttttaaatacttttagttaggaaaagtggaaataaacactcaccaaattcatatataccttgggcatgcaacaccccaatgactcatatccttaaactaagagcacaaaacataacagaaaaagttaaatgaactatttgattttttttaatattattttatttatttattttgattttttatctattaaaaagtttattttgatctttcattttttttaaatattcaaaatgattcttccattaatttgaagttaacacggctaataataatcaaataccaactactaaaagtcatcataaaacaaaaaataagaaagaaacaacaatgtatcaatatcagtttcatccttcacaagccataatttccttttttccatatcaaaattcacaaacctcacacaatttaattaatgattaagctttagtataacatcatccacataaatttgatgcgcaacctacctttcttaaaatcacttgcataacatcctctttggtttctcatctcaactcacaaaatcattaatccacaactatttttgtacccaaactcgaggaggttgttggatacaacaggaactctgattctct

SEQ ID NO: 23276 - DNA, 886 bp, Glycine max
  Intron number 2 from transcript Glyma08g07520.1 (locus Gly ma08g07520) derived from phytozome v7.0 (chr-ID Gm08; pos 5369443 to 5370328 reverse strand)
tgccaatttactctgttgcatttgttcctctcactgtgagaatctgaactttttatgttgagcatgagtaggtagctacttgctaggtttctgcgatgcattagtatgattagataagatgtcacactgtgtgtacactaaataatattgtgtgcagtgttcaaagacttcttcttggtaagcccattagatgccataacaatgcggtggagtccataggaactaacaatgtgtgcagtgttcttgtgtatgcgaattatgcagtaaatcattatttctcaaatcaataatatatcagctcaaatctcatttatattgtcccacgtagttagtgctaagtcattttttttttcctctagtaacatagtaacttgaagagggcaagccttggcatgaatataaggttgtagccttgtgacctggaggttataggttctaattttgtaagctgactctctgcttgtgggggaatactttgcacctaggtggggataaggtaggaagctctgtccactcggttaccctattttagcatagtaaccttagctttttttattacctctggaagaaggctaacattagttatatagacagaaggctctatattttgaagcatattaagtttctagagaagatttttctctagtggtcatgcctccttttcctgtcttactatcgaactcatttccatagcttataatatttgaattagaacttatcgtattttttcattggaaatccatgtcattttagcaatgcaccaatcttacagttttgtttcatatcattatcctacatgtgtgagattgtgtgagagcatctctaatttatttcttggtttccatggataggtaggcagtgcagcagtttattttcagacagggat

SEQ ID NO: 23277 - DNA, 963 bp, Glycine max
  Intron number 1 from transcript Glyma06g44270.1 (locus Gly ma06g44270) derived from phytozome v7.0 (chr-ID Gm06; pos 47205551 to 47206513)
ccccatacatatcctaacccacttcgttgattacggtaagtcctaattgatctgaagctattaacaattaaacatgtattagttgaatagttaagttcatcttcgttggttgccatcgaaacccaacactgaatcaaggtcttaatattaataataattgtttttgtgaatgccatgacccgtaaatgctactattatataattcgactcacattctacgtggcaaggtttgttcttagcaattcctctgtgttctcaaaggccgttttttttagtgtgtgtgtttcacttttatttccttttcggttccaatctatgtttgagtcgtattgtaatcatgttgagtcttggtcgatgccttgtataatgtgtatggtgggttgtatcttccttggattttattgaacatgcctgcctgcccgccacctgtttgatgaaatgcttgaacttttcagaaatgaactagtgtgtgatatattggcgcttgaatttgtgatgctacacctgttggctttcttgtttgcatctgaagtaatttaacaaaaacatgagttttttttttgttattattgtattgatgttgatgttacggctgagttttggatacatgactgtttatgtgttcttaaagtgcaaggttaccgtaatactatctttgtttttagacctgaacctgaaatcaaaccaataaggcctcaaggttgttgttggattggtttaaccataggttacccaaggctttttggcttcgaatttggttcttataacattaataataatgtaatacatggaattgcacatcacaagaagatctgttgctattcttaatttcttattcttaagaagcttaaccacagtgtttattttttaaaataaaatgaaatttgttggtttgatattgatggtaatttgttctgactcttaacagttacaaaagaagtgactgtgaatccgaatccaaat

SEQ ID NO: 23278 - DNA, 323 bp, Glycine max
  Intron number 2 from transcript Glyma08g19340.1 (locus Gly ma08g19340) derived from phytozome v7.0 (chr-ID Gm08; pos 14639037 to 14639359 reverse strand)
tagtggctttggcagccagagacgctgtagtcgtccttacctaactaacttcattattagttaattcatgctttttctcttcttgctcatatttctatacatctttaaaacaaaaaaagagttatgtaagatgcctacacaaatatatatatgtttatatgtttgaaaaagtgttgaatgcatggttttaaatatcaaaatatgtgcatcagaaaatatcaaaatatcttgatgttgtgatcataattatgattgcatgcgaactgccttttaaaaccatggttggatgatatattttattttatgtacatgcatgcaggcaa

SEQ ID NO: 23279 - DNA, 823 bp, Glycine max
  Intron number 1 from transcript Glyma07g05550.1 (locus Gly ma07g05550) derived from phytozome v7.0 (chr-ID Gm07; pos 4178124 to 4178946 reverse strand)
ctgctgctgttcttctcgaacgaacctccaatctggtgaccctttgtccttgtctcttcgtttttgcttgaaaaatctctgctttctgtggatggatatagattctctcaaatgggtttggttcaaaaagttaattttttccactcaattcagctcatttgaggtggacacatttggatttttgagctgcgtgattcaaatgtggatgctttttattaatttgttatttgggttgatgtttattctctttcagatgtgtagttacttaacagttcaattgggttaaaaaattaaaatttcactcaattaagctcattggaattggacccgattgggtttatgagagatgaatgattcaaatgtcgatgcttttatttatttattatttgggttactgtttattctctttcagatgtctagttacttcacactatgatgatgtatatttataggacaaaacttagatgttctgtaagtgttttcggtgctgtttttcaatcagaattggagttttgcattggtaatctattctcacctttaatggaaaattttattgcacaaattagcgatgtgaaattccatttctgattggaaaacaacaccaaaagcaccgtatttaagttgtcttattttatatgggtttagttttgtgtgttatttgcccaattggattcagaagttcagattattaaaaatagtggtgttttgctactgataatatatgtaagtttggaattttttgtttgggtataagtgttttgagattttttttgtctggatttatgaatgcagcttgtcacaaaagaggaagggttggaactct

SEQ ID NO: 23280 - DNA, 415 bp, Glycine max
  Intron number 2 from transcript Glyma08g22580.1 (locus Gly ma08g22580) derived from phytozome v7.0 (chr-ID Gm08; pos 17141735 to 17142149 reverse strand)
gtcaaaaacgaagagctcctagttgcttgccacaagtcagttatagcatactattctctcattccatgacttgaaattttatgtatctgtttgtgtgcttatatgaattgtctcatctaaaagcagaaagattaacaaactgaatagcattagttactgcttactagtttattagaatagacccgatatttggcaaaacagcattgttagatgtatagcagttttgggaaactagaatcgtcattcatcacaatctgaagtttgacttgaaacaagattctcttttactaccaactattcctcattcatatttcttggtgtagaaagttgcttgtctggttcttatatgattctaaagtacttgtacattttctttgcatcagatcggtttatattgtatacacagtgcttggcg

SEQ ID NO: 23281 - DNA, 432 bp, Glycine max
  Intron number 1 from transcript Glyma08g09680.1 (locus Gly ma08g09680) derived from phytozome v7.0 (chr-ID Gm08; pos 6882734 to 6883165)
aattatcgctcgctgaagaggctcttcttcaggtcaccctcttcccctacctttttcattaaccatgtctatttatttattattcatttcttttttggtttctgtattgaatttgaatcagcgagctcctaagagcacgctgacttggcctaggttctctagttttgtagtaacttattattaacggaagtttaattcaaaattcacatgtacttcgtgtttgttttcagccggaaattgagtttaatgactcgtttatttcttaatgcttgggaatgtgaaattagttaaacataaaatgttgatcttcaagatttatattttgggactacgaaacatttcatatctcttccctgtttgaacttttacaaaataaaaaagatgttttgttctattatgatggatgaacaattggctgctttgtactgaagg

SEQ ID NO: 23282 - DNA, 686 bp, Glycine max
  Intron number 3 from transcript Glyma08g09680.1 (locus Gly ma08g09680) derived from phytozome v7.0 (chr-ID Gm08; pos 6883536 to 6884221)
ggacaattgccattttctccaccatttatttcatagtaattactaacaaagatggctttttttctctttctaaacacatcattttccacacacatccctcttatgatatacttctggaaatgtcctacataatttcatagacagtcaagcaaaatatatgcttgtaatctgccaaggatttatctatgcataagatttgtggggacagtcaaggaatattcattgtacagtaaattgtaatggtgataggatgttatttctagttcttgtttgtatgtggaatatgaattattttatagatttcacgtcataaaaaacaattagaaaatgcttaaggatatggaagaacagcaaatattatgctgtcaaaaaatttggtaaagggagattcataagactagttttgagtgtgctgtgattcaaacttatttcttccattgcactgcttctacctgatatccaagtttcttagtgtggaagtaaggaacttttacagatttctcttgagcactgaatataattttcaaatgcatcatcacatttatcaggaacacttgctgtttgtatcagcatgttggtattctttgtcaccattttgttttctgtgcatcttttgcttctatatgctttgttgtgcagtggtctatacttgttttaacatgtaaagtggctgtttcattcaggga

SEQ ID NO: 23283 - DNA, 727 bp, Glycine max
  Intron number 3 from transcript Glyma05g36450.1 (locus Gly ma05g36450) derived from phytozome v7.0 (chr-ID Gm05; pos 40282790 to 40283516)
gaatcaactttattgggcccaacgtgagtagattatgcagtttgtagaatacacagtttgtttgcttcttgtctggtgaccgcactgattagagctttacaattggctcgcctggattgaataagacttatttaaactgtcccattaaatcgtactattggcttcgctaattaagaggtctacaattgcttctgtctaaagtatcttgaagccctggaatttgatttccagttactataaatacactaagtcatcaaaatatcttaggtattagtatatagacacatcgaaaaggtacgaggatttctgtttagtgtttaaccatgctgaccagcttgaaagattgtaactaaagtaaagtaacaatattgttaacctgtacacaaaatgttcttgcagagttgtgtttgatattctgttgtttgtctgtttaatattgaaattttttgttgaaatttttctgtatacaggtgaggttcagtttttaagcttttttatagcataggcctagtcaaaggtggcctgcagttgcaagttaccatctgttatcacatttttaatttgattttaatggattagtcttaatttttaatgttttccctgttgaatatatatagcttctttactttataaagctgtaactgtaaatcgattattctaatatttccctttcaaatgctaatactgaatatttagttaaaactttcagcctgacagtattcgggtt

SEQ ID NO: 23284 - DNA, 869 bp, Glycine max
  Intron number 2 from transcript Glyma08g44810.1 (locus Gly ma08g44810) derived from phytozome v7.0 (chr-ID Gm08; pos 44308668 to 44309536)
gacgcgccgtcacggttggtttccctctcacccaggttcgtgcgtttctttttttcttcttttattttccaaaataatacccaatctgaaactcaggtgtgttttgtaatttctgtttgttctaaattcaattatctggaattgattcgttcataatctctatctgcacatatatcagcattcttaataactgcaatggcttcttttaagttttcaatttttcacagtaaagacgctaattctgatgagagtgttagttaactaagtgtatctgggtaatgagcttaatgtcaatgtttgttagttgactatggtgcattttgggtaatcaatcaacttaactaagtgcttattcagtaacttcattataagattgagtgattaacttcagtaacttcattattaattagcttaactaagtgcatttgggtaatgagcattcagtgtaattatcaagataacttttaccgtaattttgtattaggctttgtaattgccatttgaatggctggctacttaaatattacaatgctattaacaacatatataaggccattatgccactttttgctcaactcaactgagccaggttggctcactttgacacatctaaaagttacacactcgtgaaaagcccggttctgctgcgagttatgatcttacgcttcaaaacagtttgaaccataaaccaaactcaaacttgtaaacatgtttgctttaaagcacgattgtgaacactttgaaccataaaccaaacgcaatcttgtaaacatgttacgcttcaaagcacgattttgaactgtaactaaagatttactttttcctctgtgaaaggcttattgctggctcatcactggtcagttcaggat

SEQ ID NO: 23285 - DNA, 513 bp, Glycine max
  Intron number 1 from transcript Glyma10g35030.1 (locus Gly ma10g35030) derived from phytozome v7.0 (chr-ID Gm10; pos 43184517 to 43185029)
gcctgttcctctgcttcaggcacatactcctgcaggttcttacctcttctaacccttttttctttctttcttttcaaaaatatcccaactttaaaaacattatgccgtgtttgccttctcataattactgggtattgtttatttcctttcctttttccacggtcctgaataaaatttttgcttttccccaaatcttagtggatgcatccgtctcctgattgttggatcttaacttgtattcgattatgaggtttctcttgatgctgattttgtttgtatggaaaattcttgctacggatttagcataggtctcaattttcagacatgttgaaaatttcaacctttatgacttggggttttgtttttgtttgatgttttgaagttagtgacaagatttggatgatatagatattgctgattgtttctttgtggttgtcatcatatttaataacctttgattttgttttattacctggaaatttatggtaccctttaaactggagattaggttaa

SEQ ID NO: 23286 - DNA, 856 bp, Glycine max
  Intron number 1 from transcript Glyma09g41560.1 (locus Gly ma09g41560) derived from phytozome v7.0 (chr-ID Gm09; pos 46228980 to 46229835 reverse strand)
ccgccggcaaccccctcgtcacccttcgccggaaggtttgttatctgcgttctatttctctctcacacgtgttagttaattttgggtatagttaaattgcatgatccacgctgcatacacgtgtagctagatgaataagtatgaaaaatataaatttgttattttttaaagataaatagttattttttcgctaaacgtagaaagtgtctacaaattcgtcttcaaaatatatacattttagtcccaaaaatggttatttgtcggcctatctatacatttaggcacgcatgctatcatagaagatcaaaattaaattatattttaagtaaataactatttttttatagtaataaccaacagaagttaacaatagataaatttgtcacatctttaaaactaaaatttgaattttagaggaataaggacaaatttgttaactttttgcgggtgaaaataattatttatccgtttttttaaacttaacttttaaagccttccttttagggacaaattgtaggacactaattaagaaactaatattagaatttttttattgagatttttgtattcttttacactatcctataattgttttctactttatttcataattatgatctttattcttttatagtttaacttatttctgaactaataaaaaaagtcacctgctttaattggtaaaattttatgactaacgctactctttctagaaaccctgctaagctttttatgacggactactataactgttcttgtaacttttgaagtgtaaattgcttttatggccccataattcacaatctatagttattgagtctgatattagatgtaaattgtcttattgatgcagata

SEQ ID NO: 23287 - DNA, 291 bp, Glycine max
  Intron number 1 from transcript Glyma12g37020.1 (locus Gly ma12g37020) derived from phytozome v7.0 (chr-ID Gm12; pos 39994717 to 39995007)
ctctaattcattacgggaatatataaggtttttcgatctcttccttttttcatcagattctcttgtttgcttttcgtttttttcaacccctagagtagaggcctcatcgattctcttctttgccttttactacacagactatttattgttggtgtaatttcaccaaattatttataaaagatttttgtgtttgattgatgattttgtttttcaacaaatcgatgatctgtcgtgtccaaacttgtcttttatgcaggatcaagtgaaaactgattattttccattgagttt

SEQ ID NO: 23288 - DNA, 721 bp, Glycine max
  Intron number 1 from transcript Glyma12g03280.3 (locus Gly ma12g03280) derived from phytozome v7.0 (chr-ID Gm12; pos 2163396 to 2164116 reverse strand)
ccgtttctgtttctgtcttccaggaacactgtcaggtttgctctctacatgtactgaacatgttcattaatacagttactgataatttaccgcatgtatgtatggttttgttttatgtttacacagaacagcttattagcgaaataatatttctgcatgattttgatcataaagagtataaatatctattttgtggcattctgttatgtagttactttagtttgcactatagttctattatcttcctttgtaatttaataaccagctttttaagctggtagctagtttttccgctatttttttttaaaacatagtcttggtcttaaagtagaatttgggaaaagcatatgatgatctctttgatgtactccttgcatggagttaggaaggttagttaactaaattcatgcttctaagcttatctatttgaaaattgtaaatgatcaggcatcagagtaataattgtctcaatctatttattatccgtggcctttttgtttccataattgttaattggtcttatcaaattatgttattgcttgatgattcttgtggcctacttttcaaatgcccattttgtcttttatcaacaaaaaagaagaaaaaacaagtccgtgttgggctgagatttgagaacaatatgtctatttttgttttttggctgctaacagtgttttccactttccgtgcatattttgaatgacagtgagtgaaggatacg

SEQ ID NO: 23289 - DNA, 1047 bp, Glycine max
  Intron number 4 from transcript Glyma09g00410.2 (locus Gly ma09g00410) derived from phytozome v7.0 (chr-ID Gm09; pos 145315 to 146361 reverse strand)
caaagtggttacaagcaaaatccacctctggcttggtttgtcgtctactgctttctttttacttggataagtagaatagtaatagaagcttgctgatattgactgggaaatccttaaattgttaaatgagttataaaattagaatctagaatgtgccaaagtaggtctctgtcagtagtgcattgcccttatgtctttttctgtcaggatgcaccttctaacgaagcattccgacactttggagcctcctcagcttgttagatgtgtaacctcttagcatgttagatatgtaatccaaggcactatggtaaagaaataagtttgacaacatttttctgttgtagatttgtttcatgaattggaatggagatagaaggttggaccagagtagtacccttaattccatatgcaaatattaattggaagtttatataacaatctgtattatccaaatttatgaccatgagaaaagattgaatagaaaaatggggatttgacattctaaattttcctgtcttacaagctttttttaaagtttttagtgaatgaattgcttttggaaggttatagctgctgaaatcaactcaaggaatgattctcaattcgggatgtttcttataatgttgtctttctaatgtatttaaggttgatgatgcgttggaaatttttgagactattaatgtaattaaagtatgggggagggatattgtacgcagccttacccttgcatatgcaaagaggctgttttcggaaaacgaagtttttttattaatgtaattaaagtttatccatgtattcttgtgaaataagctgcatcatgggacaaacacaatattaaattatgcatgatagttacttatatgtccattttatgtatacatcatgaacaaaatgcattgatgttttttatttttactgtgtgtggtccttttgatcatttgtcttctactagtaaagctttctgcaatgctgtttctggattctttcttcacgcatattcacatttgtacagatatcagtgaaagaagataaacacaaaaaggaagt

SEQ ID NO: 23290 - DNA, 950 bp, Glycine max
  Intron number 1 from transcript Glyma09g38490.1 (locus Gly ma09g38490) derived from phytozome v7.0 (chr-ID Gm09; pos 43841436 to 43842385 reverse strand)
atcaccactaccactctttcttattgcgaggtttcattacttctcttcatatttctatacacaacaacaattcaacgtcatcataaacataactagttacaaaacatgccatgttttttcttcttatctagttaacttggagtgtaaaatatattaaactatagttgatcattcatataaatttattaaaaaggttgtgttgatgatactttttagattattagatcatgtatatagtgagaattgttattttgggaatggataaaacttaaatgcagtttcattggtacttttagcgtggttcatcgattaaaattagagttttacctcagtaacctatgctcatcgaggtgaaattctaattttgattagagaacaacctcaaaagtgctgatgaaataacatctaagttttgtcatgtaagaattgttcttatttattattacaagactaataaatatttattatacaaaggtacgtggacgatggaaattagtttcattcaattacaatattgattattcatacacgattttatgatgaatgcttggtaagtgcgtgagaattttattaaattttatagtgcagtgaaggcatattccccttaaaaactggtttataagggggtggtctacccagctatataagcacttatcatattcatgaattacccgatgtgggattattcttaacaaatttaacagttaatttatgaattaggtgctgtttggataaatttatccacaattacttataaaaagccaaaacaagaaggtatgatgaattgaatttctgaataagctaaaatcaacttatgcatttaagaagctcttttcatttaacttctcgaaaagttaagatacataaattgaatttagttcatgaagaagtttatccaagtagagtctttgtatatatatgttatgtattaagatgttttgcagttgcca

SEQ ID NO: 23291 - DNA, 524 bp, Glycine max
  Intron number 2 from transcript Glyma12g11110.1 (locus Gly ma12g11110) derived from phytozome v7.0 (chr-ID Gm12; pos 9117247 to 9117770 reverse strand)
atttttaatataattcttgtaaaaatcaacaaacttatcatatatgacaatttgtattgtgattagatgacagtgtaaaaatactttatattgtgagtgcatacactattttctctttataatgtatgaaacctgaagagtgaagagccaactcttaaattgccacatcaatttcttgaaaacttgaatttatatcttttagcccccccccaaaaaaaagaatcaacattcttacttcttgattaaatgtgttttcaacttttgtttttttaacatatcatttttaatcaagagactacaaaaaccattattctgtcattcctccttttgcaattaacttaaggaataatcaatgaattcttgggctaccacaacaagttttaacacattcttctatataacgaaccaatgaataatcaaatatttttttgaggtattaaattctaggatcttaaaaagtttaaattctgtgtgtgggttatcatctagttacatacaattgtgaaacattacacttggtcctt

SEQ ID NO: 23292 - DNA, 680 bp, Glycine max
  Intron number 3 from transcript Glyma11g07200.1 (locus Gly ma11g07200) derived from phytozome v7.0 (chr-ID Gm11; pos 5029368 to 5030047)
aatacgctccacctgtcccagaaactgagactcctgtaatctttagttcatttttgtcaccaataactgagtttttgtgtatatgttttatttactttgtgcgagcgctttctgattctgttgaatgttgattattgttgaaactacctatttgaattgtgaagctttgctttctttctactctgaaactgagtgaaggagggagtgtgaatgttgagctttcttctgaatggtgtccctccgtaatttgtctatttgcttcgacgtgagtttattgagatgaaaatttactatgatgattagtatgtgggtatgtgacaaatattaatgcggaactgatataatcaaatgttaagagtccttggttgtgagtaaatttgatctattcgttgcctatgatgtatagtttaaggttttacatgcatgatggctttgtggacaaaacgttttgtattccctgcctttatgatcttttgtgtggtaaattaaatttctgtcttctgtggtcatcctttgaaatgtcattttagattagttgttacatggtttaaaagttggttcccatctccctagcggcctagccctgcaaaatgaaaatgagagtacactggttattatggttttcatccattttgatgaatgtaggcacaaaaaagagccagaatacacaagctaaggct

SEQ ID NO: 23293 - DNA, 405 bp, Glycine max
  Intron number 1 from transcript Glyma09g37200.1 (locus Gly ma09g37200) derived from phytozome v7.0 (chr-ID Gm09; pos 42719061 to 42719465)
gatcgacatctttgagatttaccgaagatactgtggtaatctccctcacttacccttttcaatcacaggcagcaaacaccaattcgattcttgattatgcagcaagttctgttttttgtttcatttgtcgaagattttgttcttttgggtcgcggaatttgaattttttcatttctgggtcttgttgtttggcttagtttgagcaccatggtattggtttagtttttctctctctaaggaaaaagaaaagaactagaagaagaattctttaattttaattttaaatttgttttttttttgttaattatgttgtggtgatatatgtatgcgattctgttctttattatttattattattttttatttatttatttgagtttggttgtgcagacataaaatcaggac

SEQ ID NO: 23294 - DNA, 414 bp, Glycine max
  Intron number 3 from transcript Glyma11g20000.2 (locus Gly ma11g20000) derived from phytozome v7.0 (chr-ID Gm11; pos 16812351 to 16812764 reverse strand)
tcgtaagtttttttttttttcttcttttagatacaatacaacatttttcttttgtgttggttatttatttatttatttgttagtgcttgaaaatggacttgatcacttgaccttctataaaagtaatggaatttaattagaatatgacactatcatcccatctaggattggcatgtatagttgtaagtttttaatttttataataattttataataactattttagaagtcatatttggatatgttaaaatatctacactggcagtctattaaaattaaatttgaactaatatatttatgtctagctacaaattcttttttatttttgaatttcttcctcgctgtggatgctatgaatgctgatggcagtttgttggttggtttagtttgcttaagagattggattttccggag

SEQ ID NO: 23295 - DNA, 921 bp, Glycine max
  Intron number 3 from transcript Glyma11g30090.1 (locus Gly ma11g30090) derived from phytozome v7.0 (chr-ID Gm11; pos 30965832 to 30966752 reverse strand)
gcattggtgttagtaggtggtttatcttcctctctttgcacaagcataggttctgtttgataattcttctttatttgtttttatgcaatcatacttgtgattggaagaactttgctaatgattataattattatgttttaataaatggtaattaatatatgttttagttctgaataataaaatactcttagtaatcgtgcacccatatctatgatgtttaagatgtgcaaaggatggttgctgtgagctgagttttagagctgtcctgagataatggcttgcgtttatttaatgaaataattaataaaagcaattatattactttgattttgtaagcatgatcttctcatgcttacaaatagtaagattagaattcctctggagcccttcacctttttctgtagtgtggattttaccctcctgtgcacatatataatctagcatttctctgttgcaaaaatatcagtattaagtattttatatattcaactgaattatatttgcatacttacaaaaaaaaaaaaaaactacaatactacttcttaagggacttgcaggtttctgtggagacaaattattggatgaggttgaaggttgaggccacatgcttaacatctgctttgtgttttgtctgtattttcaatttggaatttaataaaaaaggatacacgagaggagctattcatttaggatagactcaatggatgattgtcctcagctgaacatttaagcttcgtttaaagtttgaatgaatgctgactgactgtctttctgtactgtctgtgatacatcaaatgcttgtggtttatcttgaatgtgatgctttttactgtttacatgagtatcttcagaacttcttccctttgattccctaagttaatttcaggaagtaaagaggagaaggagaaagaaaaggagtct

SEQ ID NO: 23296 - DNA, 187 bp, Glycine max
  Intron number 2 from transcript Glyma12g07020.1 (locus Gly ma12g07020) derived from phytozome v7.0 (chr-ID Gm12; pos 4790769 to 4790955)
gcgtcatcattcatcaaccaagttgtttgtcacaggtcttctccagcttctttcttttctcctttattttttaaaaaaatactaataataattgcactttgcaccttttgagttttgataattcatcttgaatgttcaattttaactgttagttttttcattttgttttgcaatacagggctttcct

SEQ ID NO: 23297 - DNA, 522 bp, Glycine max
  Intron number 3 from transcript Glyma12g07570.1 (locus Gly ma12g07570) derived from phytozome v7.0 (chr-ID Gm12; pos 5207549 to 5208070 reverse strand)
gggagaatttaatctccttgggattactgcaccaggtagtttgtttttcttgcttcactgcttccattttctgatttgtcgaaaaaatttcctttttagatttgtaagctgttggtgttatctgttaccgtgacttccatttgacagttgttattctccctgtatatcttgtgatacaattgtgaagataataaatgctaacaaagcacaattctttctgcacataacatccaatcactgaaaaaggtgtctgatatacctccccaaagaaagggtaggtaccagatactatttcattttgcaggctgagtagaaattaatcaaattattcatatattctcaaatcatcattcttcggtattattttataaatggagtcatatggacaatcattttttatgaaattcttcttctttgggtgttcttaaagattggtagtatacttggaatctttacaatatggccatgtcttgtatgtcaacaagcttttccaattctatttctgcttatttgcagaggaat

SEQ ID NO: 23298 - DNA, 978 bp, Glycine max
  Intron number 1 from transcript Glyma12g07570.1 (locus Gly ma12g07570) derived from phytozome v7.0 (chr-ID Gm12; pos 5208230 to 5209207 reverse strand)
ccacctccttgctcttcgacgaaactcagatacaggttccttcatattcagtgtttgtttgaaaagcttagtcaaaatgtatgaccttttcatctgggttgtcttgaaaccactgttattataaactggtgcgtgaaaaatggagtcttgattgaaattattatatgatcaataaaatgagataaatgaactattttactggataggaagttttttttttttgggggggatggtcttacttaggtgtatcttctgtaggagacaattctgctggatacatggttgagcactaaatgtggatagctctggctaattattcattttctctttaactcatttcacttggtctgtcaaggatgtagaaaaggaaaatccaatgacttttagcatgatgtttgaccttggtatctgctatttggttggaatgtatgtcattgccataagttactgtactttggcaacctacagaagctagcttgagaattttggttggctgaagcatatccctttagttcacactatgttcaactgcgttgaaaatattgacaagccccccacacctaaagccctatctgcatcaaattgtttattttgtaataacaacaaattagagtgtgtgtgtgtgcacgtgcccacatgtgttttccgtcaatagagactaagtgatgtttggcccattggatttattttcctttgatgttttctcacttgtaatgcatgcaacagcttcccaatgggtagccaaacacaactttaattgtttggttttggaattttagtgagagaaaaatcttaagatcctctttcattttaaaggttgttttctgcatcaagacgctttacagaatgtgtttattgcttaagatggtattgtgtactagcttctaaaaagttgagctatgtcatgcttgtaatgattggaaggttttattgcatggtgcagtttaaggaaagtgttgctcaatttgcaacagaaaa

SEQ ID NO: 23299 - DNA, 470 bp, Glycine max
  Intron number 5 from transcript Glyma09g12230.1 (locus Gly ma09g12230) derived from phytozome v7.0 (chr-ID Gm09; pos 12817397 to 12817866 reverse strand)
ctacaatttttatctcaaaaactccgtgagtacaggttcgtaaacacaaaaacttaaattttttttgggtgttctgcctttattttgttttctgacttctcgcaatacaaaagtttaaatttttttgtgttcctgagctttcttcaacgtgctcattgcttcatatgcccagctttttgtgctttcgtccttttttggtggtgtaatggttcaatatattttttggcatgttgtacgcagagaaggtggaagaacacattaaagctgtcatttttatctcaaaaactccatgactacaggttcataaacacaaaagcttaaatttttttgggtgttctgcctttattttattttctgacttcttgcaatacaaaagtttaaatttttttgtgttactaaaccttctccaacgtgcacattgcttcctatgcccagctttttgtgttttcgtccttttttggtggtgtaat

SEQ ID NO: 23300 - DNA, 972 bp, Glycine max
  Intron number 2 from transcript Glyma11g06550.1 (locus Gly ma11g06550) derived from phytozome v7.0 (chr-ID Gm11; pos 4593627 to 4594598)
gagagagaggttagggcaattaattaactcttcctcttttgctatttatttctattaatcttagttaattaacaatttgttgttggtgatttttgtatttttcatgttttttttaacataactggtatagtttagtttaggctaaaatacactcttggtcctttatcttattttttcttttttgttaatctcactaagtttaagatgtctcgcttaatttaagtgtcttggtgagactaaattgggtcattcacgcaactgacaagacatctctgacactttgtcactcgttgtgaccaagttggggtgtgtatttggaaaccgtttgatttgcgttaagttgtacattttttgatgcgtaaatggagaagcaaggtgagtgtgtgtttgattgacgtcaagcatgggtttagttgaacccaactaatattgaagcgcaaacttagtgtgtgtttggattacaattgaaaaattggagtttggttgaacttaactttgtaaaattaagtttagttaaaagtaggtataatgtaacttgatttatgtttggaactttccacgttcaacaataaagcaatagaggagtagctttgggctaaacctcagtttgggtgaaagtcatgttcaactcaatttgaaaaacaatttgccaaacaaacaggtgcaactttgtttgggtggccaaacgccaaatcaaacacacccttagtgtggtaaacagacagaaagaccaactcggtcttaacacagcttaagggaccaaagtgaaattttttaatcttaatggatttaagtttaaaaaaacaagatgagaaaccaagagtgtattttcgcctttagtttatgttgtgaaactttacttgtgcatgaacttatacatctccaaccctgttgcacttaagtaacgaacttaaatgattattttttgtttttatttttttccctgttgtagtgaatctccgaagggtgcaa

SEQ ID NO: 23301 - DNA, 728 bp, Glycine max
  Intron number 3 from transcript Glyma12g03250.1 (locus Gly ma12g03250) derived from phytozome v7.0 (chr-ID Gm12; pos 2138709 to 2139436 reverse strand)
ttgatctaggtaatgttatcctcccctttcacatgcctttttctcatcaggttgtgctaatgttgaacattgtgtttttagaagacaacagttgtcagataagataacctcataagtcatgaccagtaagtagacttgactcaactaaggtagtcaaaggctacaatagaactcaagtggcagaagatatgatggaagtttgtttatagccaaagactggtaaccctagacttgtgtacaagtgagaatgtgttactaccagtgacaatgaattagtcccatgtcttcccttcagtgcaaatatccacataatgtatttcagtagttcctcttctaactttcccaatgcttttctatgctgattgtgttacagggtctggtactaatgctactgtatcccagtgattaacttataaaagcagggtttagaagttgctaaagcaaataatagtaaattcaaactttggattcaattttaataagaaattgtgatcatatatatgatattgtgctgaatatcttgttcattctgcttttatggtctgttctatgtgagtttacctccccaaacattctgtaggtagggactttttgtgctcctcgcatgttacctaaagttgtctttttgcaaaatggtctttattctctgtgattaatggtggttaacttatctgccattcatgattgttgcagaagatcagactaggcgcaacaaacgccgaagagaa

SEQ ID NO: 23302 - DNA, 675 bp, Glycine max
  Intron number 1 from transcript Glyma12g03250.1 (locus Gly ma12g03250) derived from phytozome v7.0 (chr-ID Gm12; pos 2139825 to 2140499 reverse strand)
ctttccccccccctcttcgcgtcttttcgcaaccggtaagtctcttagggtttcaatttctttctcagatcgctcactactgttccgtttctctgtatcgctattcttttctgtgttttcttttcaattcctctacaccctagttttccagaaggtttctcctctgcttcaatcggtgttgttctgttctgtttcggtttttcttttttctttttagttcgatcaatttatttatttttatatatattccgctgataaattgatgattatgtgtgatatgattggaatcgggttacttcaagaagctttatcgtgcaccagagtaaacacgctttagtttttttatgtaatctagcactgtgctgtttgttgtaggtacgtagaaagttagtcacgtgacttgagaaatagtgatggaagatggtagtgattctttaattttctattcagttgcagggaatcgctgtatgcttgcacagattgtagtgctggcgttgtgtgtgtgtttaggttgtttaagtttttgaatttttctgttttgtgattgtcttctaaccttaaaagtttgccacttcacctattattttatgcctagacattctcctaagcgcaacgtttgtatgatattggattttttcagactgcatcttggatactggaatagtgtgccaatat

SEQ ID NO: 23303 - DNA, 693 bp, Glycine max
  Intron number 2 from transcript Glyma12g14420.1 (locus Gly ma12g14420) derived from phytozome v7.0 (chr-ID Gm12; pos 13388108 to 13388800)
gggttcgcaggtaaaaaaaaaatgaaaaagtttaataagtttgttcgttcatgtggcaaggttttggttttaatttttctaaatttgttcttttggttttggacttcttaaattgaatagataatatatagtaggattgatgagttttttaatgattagtttttaaaagtgatgacaaatatgatttctgacagtgtaggtatattattaaattcaaatatttttttgagaggaaattcaaataaattttaaaaaatatattaatttgggaaatgatttttatgtgacatacctaaatatatcatctcatgtagtatgactttagatgcatgtgacttcattcattatgaaacgaggctcgaaattatttttttaaaaaaattaaatctatgaaaattaaaatcaatattctttttcccacgctggtatcttctttttgaggcaattctgttcaaggttatgtgagacacttttcagattccaattgtggtttgtcatgttgtggggactatagccccaacaattttttttggaagactgaaattaaaatttattatatttgtagggactaaaaactaacaaaaattgatttgttatactcgtttcagcactgaatgtaacttctttttaacgagattttttgaactgccttcaccagggacctgctcaggcacagaatttgcgggactcgct

SEQ ID NO: 23304 - DNA, 439 bp, Glycine max
  Intron number 1 from transcript Glyma10g10180.1 (locus Gly ma10g10180) derived from phytozome v7.0 (chr-ID Gm10; pos 9796278 to 9796716 reverse strand)
ggcgcgccgagcgcctgaggcaacaacaagcggaggtaaattcaaatgcaaagttcaaaacaaaataaataatttaaattttgtcaatgtacatagcttattattagtagtagtagtagaagtagtaatttcttttggcaaaaaaacttagatatagttctttagttgcttctggatgtgttgttcttcaattagaattgaagtttcacttgtataatcctttaacgcgaacttttattatgtggattatcgagatgaaactctaattctgataggagaatgacacaaggaaactatttaagtttttttctttctttcgtgtgtttgataatgtgcactgccactgcatgttctgtggtgactttggttaatattttgattctttttgttactatattttgaataattttataaatttttttgcagaaggaggtgttgg

SEQ ID NO: 23305 - DNA, 546 bp, Glycine max
  Intron number 1 from transcript Glyma10g07680.1 (locus Gly ma10g07680) derived from phytozome v7.0 (chr-ID Gm10; pos 6432311 to 6432856 reverse strand)
gttctcaagtacgtattcatggcactttcttcttcttccatcaactctttttgtaggatctgtgattcctaagctcatctaaactcgaaaatcgatttgccttatgctgtttgttctgtggaatggttatgttatttatgtttcccgttttgtaaattggtatattgttgtgtgattgtagttgcgttctatagcataatgatatctaaattgaattgcattcaacattttccgatgcgcaggaaagtaattccaaagatttacatatgctgcttaataacgtgatttcatttccgcatcaacgcagtttctgaaattttgacctaatttggagacatagagacataattaggtttttaaaacgcgttggagaacgtgtttttcgttttaatcagcttttttgagaaatgtatcagacgcaaatacttgtggattgctgaaaaattagatttgctaaaccaaatcagtgtcttcagcattatgtttgataaaatgaataatcatttttcttattaatatttgatattcctgtatcagaaccgaact

SEQ ID NO: 23306 - DNA, 761 bp, Glycine max
  Intron number 3 from transcript Glyma09g28950.1 (locus Gly ma09g28950) derived from phytozome v7.0 (chr-ID Gm09; pos 35928108 to 35928868)
gtggagtcttttgtgaacaagtatttctttgtttctttttaagttgaatgctcacatcacagaatacctaaccttttctgactatttttcacatgcagttagaattaaaatagtttggcaaactgtattgtattgtatttttttctccctttgtttttgtcttttttagtaactagtatatgatttgtattgagtattcagaagatatatgtgaaatccaaatttgtattggaaacctaatctttgggccaagaagacattgcacaaggatttcaaaagtaaacaatccagcttcgtgtttaaaacaagaaaatgtcaacaatattattgcatcctaacaagttataaggggtaatagaacaaattatggctagcaggaattagtaaaaggaagatgtatttaacttttcttgtggctatgcttgaactacatacttgtttctattgatctgtcctgcttattgctaatcttttgtctatggttgacaatagaataatgtgtttacgaaaattctttgagatatcctatcttagttcatactggagtaacctatatctctacttatctcacatttgtgttaatttgattccttgatatgcaacaagggttctttaagacagaaaggaaaatacatacaaccttcatatttttatggatctggttaactattcaatgatatggactcctgttactatagaactgtgtcttattacttgttagtgaataaatattgtttctctctgtagttatagagcagaga

SEQ ID NO: 23307 - DNA, 832 bp, Glycine max
  Intron number 1 from transcript Glyma11g27900.1 (locus Gly ma11g27900) derived from phytozome v7.0 (chr-ID Gm11; pos 27880799 to 27881630 reverse strand)
agcatccctggaaggactttcccttcgctggcctggtaattttacacatctaacttaaggcagagaaatattagctattcactctcaaaacgttttttagatacaccaggcatgctttcctattaaatgaaatttatgtgttttattaaatatgtgagtcttgtttcaaatttagaaggtctcgtttctaaactagtaaaaaattccaactaattaaaaaagtatacattaaaatacctcttaaagaatgcgttactatttaagtgtgatatatagttgagtttgtgctagaaaatttaagtttaatcttttctcataatacagtattgatgaaggaagaaaagttcaaaaaaatgtgactagatcttagattgagggttggtcatatagtttaatccaattaaagagtttgatacatagaaatatttttaagactaattgaggagtcaaatgttttaattatatatattattaaatgttgagaaaagagattatatattaacaatgtaaaaaatgttacacactcatccaattataatttgttatgtatgataagtttattatttttttaaataattatcttaaaataagtaaaacaatgatttatgataggataacaatataaaactattttactttccagatgcataggcattaaacttttaaaaatgtttcttatatatatgtttttctaaagttagtaaaattaatgtttagtattctaatagtttaataagtatgcacgagttgaaaaaaaatgactcttaaatagttatttttagttgaatttctgttattgttccaatgacaggtgaccctcattggggtgcta

SEQ ID NO: 23308 - DNA, 866 bp, Glycine max
  Intron number 2 from transcript Glyma09g03470.1 (locus Gly ma09g03470) derived from phytozome v7.0 (chr-ID Gm09; pos 2468996 to 2469861 reverse strand)
cagcataggaacattgttaggtttatcatccatttcccttctcctttcatttgaatgcaatgtgttgttgtcgatgatgaaattaatgttttatccgtgcgctatttgtcgtgaatttgtgtttctgctttaaccttgggatttttagctattgaaatatataatgttgttgccgatgatgaaattggagggctaatagtgttgtggccgcgtgctatttgtcgtgaatttttgtttcttctttaaccttggaattttttgctactgaattataatgaatggaggtggcttcgtgttgttgttgttcatagggtttggatgtgtggaaaaattgatgacctgattttgatactttaattccattcggctgttgtttctggtgtttggtgttctgtgaactggttgtggtatttgtctatttgatagactgtacggctgtgaattgttcttgtaggtgaggtgggtgtgggatgcgtacacgatatgccaacactttcatttttgagtcatgctttttgtcttactgaattctatcaatgtttgtatagatttatttgttgaggaaatagtgtatgcattgatagtatatatagggtttttgccctgttattcaatcataaatcgttatgtatgatagacttgttgacttttgcaataactaagtcataccaaatgatggtttctgattggttgactgaataatttttttttacattggcagtgtataaactttaaactctttatatgccttggcatattagccatgaaaatgttactttgctatgtgctgttcttcgtcttattctgcctttttagtcaattcattattgagttgctttgtggttgtgtggatgacaggttgcagg

SEQ ID NO: 23309 - DNA, 533 bp, Glycine max
  Intron number 3 from transcript Glyma11g20880.1 (locus Gly ma11g20880) derived from phytozome v7.0 (chr-ID Gm11; pos 17716138 to 17716670 reverse strand)
ccatcaaaattcaaacagcatatagaggttacctagtgagtttgtccaatgtctctcattactcatctctcatttacatatatgaagcttaaatcctttttccaccttgttcacttttcttagctcaaactgaagctcaactaagtttcagaactaaaacttagttataaaataaataaatactaattcactagaattctttaaccaattagtgatttcccaaacaagaataaggtgacttgggaacagaaactagatttttatgtcacatatttcacaaatttaacaaagtagtgatttcccaaaatcaaaagtatggtaacttctgaacagaaactagattttaattttttatatcatatttcacaaatttaacaccaatgagaggaaatgaaataagaaaagattaagggaaaagaaagataagttagagtgggtataaataactgaagccaccttactcttttacaccattcactaactggtaagattttgcaggcaaggaaagctttgagagcattgaagggaatagt

SEQ ID NO: 23310 - DNA, 1054 bp, Glycine max
  Intron number 1 from transcript Glyma12g20570.1 (locus Gly ma12g20570) derived from phytozome v7.0 (chr-ID Gm12; pos 22149740 to 22150793 reverse strand)
tacaataattttcgctcttgcccttttcttcacaggtttagtaatttctcacaatttcttacaatctatctattttctttttatttatctctactggggttgtttgtttttatgtggcattgatgcaattagctaaatattctgtcaaggtgtggtattgcatggaagatcatttattgagagaaatcaaactacaataaatctcactatctcaagatattaatctctagcttttgcgtagagaataactcatgctgacccataaatgaaatagatattcctaattaaattatttaatttcgttcaaattttagtttgggtgaatcgttcattttgcaaatatcaaaataaattactattggtttaattattagattcctgattttccaagatggtatcttaacccctaattcaatcgtcctatcaaatttttatttatttctttatttgtatgttttcaaagttatgtattggtctactatattttaataattagatctctgtttctcacccttcttattttatctcttccatttttttacactccaaaccccctgccaaaattcttatcaagcatctttgcatggttacattcattatccaattttgttatcattttttttaggtaaaacccttattggaaatacaaaagtgtcgaaactaaaactaagcgctaaattaattttagtgaaatataaatcagtatttcaaattcctttgattatattatcttgcaataatcacagaagattaagaagaaatgttaaaaagacgattacataggtaaggataaaatcttaaaaaatataaccatttttgtcattatataatctcggcgatcagattgagtgaataagattttagctagtctaaagggttttgttccacttgctacaaaactagttcacaaatcaaaataaaactacataattgaatttaatttgtatagttttatagacatctcaaactaaactgatatatgattttaatgagaaattgttttttctaatgttgttttggcaattatgtagttatttcaaagacgagtgaaaca

SEQ ID NO: 23311 - DNA, 560 bp, Glycine max
  Intron number 1 from transcript Glyma09g28500.1 (locus Gly ma09g28500) derived from phytozome v7.0 (chr-ID Gm09; pos 35456714 to 35457273 reverse strand)
taccaggtttccctatttactcctctcctcctttgttgtttttttgccttttatttatttttgtttaagaaaaatacttttagataccattcgctagaaatgaaaaaataaataaataataagttttaaattaaaatagagtgtaaaaataaagatattatcttattttactgtaattttttttttcgttcacactttttttttctactcaaaccaatagagtttaacgtaatataagtgaggtgaaatcttatatcgaatagaaataaaaaaagaagaaaatttataaatttaaacctaaaaattttaaattaaagtgtgatttcaagttgattcacccaatgatttttttggaatttcaaaatatttttaagaaataaatgtatattccataagtccacatgtaggaatgaattcctagcaattgcccgtgaacacgattatgccttgatgttcaatttttggcactcccaaatgatgctcttgtttttttatttgacctttcaatattgttaatgttgttaggtacatttatatccaaatctcttacatagttacat

SEQ ID NO: 23312 - DNA, 1056 bp, Glycine max
  Intron number 2 from transcript Glyma10g42700.1 (locus Gly ma10g42700) derived from phytozome v7.0 (chr-ID Gm10; pos 49580222 to 49581277 reverse strand)
tgcttggtcctcctcggagacgttgattcgcaccggttcctatccagcttccattcctcttattctctgtctggctttactcgcatttttccgtccgtgtataacgatcccgtcgcggtcagtttcctagctcctcttctctctcgcgttacgcaacattttcctgctaccgttacagcgcaattgagttagttcaccgttttcgtatgtttaattactgcattgtcttattatctgttgagcacatattaatttgctatacataattagtgcgctgtcttatctatttgcattgtcttatgtatagtgtgttttgcacgtttcggatgtaattttccacatcttagatgagactttaagaagttagcagttatagaaggtgatttccttcttttcaacgagtttctaaagacgcttgtagttgctctagctttatcgtgtttgtttgcttttgctgtgttattttactgattgaaatgcaatggaagctctaatttcttttgagaatttgaatactctggacatttttttgagactgtgttttatgcataaaatcgagagacgccagaaacctgaggaattaataatgttgtaccaattacaataattgccgaccgaaattatgtgttataagtttctttaatcgatatctttgcaagtttaattggatctttttgaaaccattactcgggaaagatccaggataaataattactgtattattttgctttttatttgtttttggaatttctgcatgttgaatagtctatagaggaagacgagctacttaattatgggcaaaatttggactatcacctgatatgcatgattagctaaatggataatctgatttgttcaagtttactaagcactattttaagtattcacaatcacaagtgttgcttaaccttctgaatgtatacggtattggtatctaaaaaatgggcaaacaggtttattaactactaatttaattgattagaaacaatagctggtgatttcccaatataaattcttgtagcctctgttgatctggattgttggtcattacaaaat

SEQ ID NO: 23313 - DNA, 690 bp, Glycine max
  Intron number 1 from transcript Glyma10g37540.1 (locus Gly ma10g37540) derived from phytozome v7.0 (chr-ID Gm10; pos 45507209 to 45507898 reverse strand)
ctgttattcttgcatctcaggtatatcctattgcagtataattgccactatattttccccttccttttgtaatgattttttcacagtatatgtgatagttcttacgttgtagcatttggactatatatcattatttatgaaagatgatgttacacaagacagaaaatcaaatctacttagaatacactcaattagacattctctcttctcttttgtatgtgcattttacatactaccccaagatctagccaaaaaaatgatcttaaaaccatttcaaactattattttttaaaaaagttatttatatctcttaattgaatttcaatagttttattttaatttcaattattcattgtaaaactatttattataactctaaactgtaattatatttaaatatattaatttattatggattttaattataatataattaatatataaaaatgtttatttattataaatttcaattatataaaaataaacatttaacttatacaatactgatactaaaatattattaatatataagtatgattctactatatttccattttatttctatccttcccttgtttcttttgctccatatttgtcttcaccctatttaacttcaaatacaaacaaagataacatttagttaagcatcgattaacatcatacttttacattaccacattcattgacagg

SEQ ID NO: 23314 - DNA, 1033 bp, Glycine max
  Intron number 1 from transcript Glyma09g13180.1 (locus Gly ma09g13180) derived from phytozome v7.0 (chr-ID Gm09; pos 14489665 to 14490697 reverse strand)
caaccaacaacatcagtgttcaaaattcctttcctgtaagtattgcttctctctgagatcttctatctcaattttctcccttatgttcttctttttgtggtgtgtgtggtagttttgtggaaactcttttagtcaagctcaattgtgttttagatgtcttgaaaagtgtttttcatctctctcttttttcgtcctttttgtaaagacatggattttctgaatttgacattggtttgtatctattgcttttcatcgatgattttaatgtttccttggtggaagagaatttcctagcaaatgaaacatgactatgatatatggtgtgtgtctaatctagtaatatttgtttggatggtagaaaaatattggccagtaaatgcataaacttttttcctaacaaccaattttctcttgtgatggaatcttggagcaatgattttttttattcctgagaattgaagatagagtcatggagttttcaaccattcacacaccctttttcaaccaactgaactagacccgctagatgagcaatgatcggatctcgaggttttgtaattatggattttctcttcacatgattttttgaaggctagatggtgttggttagaagtagttgtgacagaaattagttagtttagtcggcattgatacactgtagcttactttgtgaaataattgattgtgttgccgactgaatcagcttgcatagctggcaattaaattgtcttcctttgttgttgcattcattttgtacttgattgttgtccacagaatttgttggtgttctccgtgagtttacctttttttgagatgaatggaaataaaaacttaaggaataagctttaaaaacaaccccaattttggctctgttatactattgtgttttgtgtatgatctcatagtaatttcttttacctattattgctttcttgagtttgcttagcagattcaatttcctaacttcttcactgtttctgctatagcatcttaattgcctttttcttctgtgctgcatttagctagaaagcat

SEQ ID NO: 23315 - DNA, 778 bp, Glycine max
  Intron number 1 from transcript Glyma12g01590.2 (locus Gly ma12g01590) derived from phytozome v7.0 (chr-ID Gm12; pos 950920 to 951697)
cataagccattacttagctccactttgcttgtggggtaggatttctcctttttctcttttttcctgtgcagaggcaatttttcttcattgcacttttcaactctgtgtccttgttttttaatttctggggtgcgtttttttttggtgtttggaaatccattcattccatgttggagtaaccgttgagaggataatagttgggttgtttgtctcgacttttttgttttccgaggtggcttaaattttatgaagaaaatctttgctgtagattttcttaggattttatttcagattcactttggatgttgtcgatactctatattgcaccccccttcccactgttattaatttatcactcattttaaaaaaatattttgttgagtcaaatcaaatggaactctatttttccgaccttacttcttgcttttgacgattatgctttgtggagaacataagaaaaaatatatggtttctcttaaaatttttttacctggaattaagaaaaatatcgtctctataaactgttttgagatcgtgggggattgggacctttctattttgtatgggatatagattattttatgtgttacttgataaagtttttgtgattcatatcaatttcttactgtgcaatcggtgccaaatctattgttcggtgaagaaacggtagcatagtcagtcttgcttatttattcatttcattttttgcagttatattctatataaggggaagctcaagttcttcctctttgttgcagctgttataatacatacgtag

SEQ ID NO: 23316 - DNA, 738 bp, Glycine max
  Intron number 1 from transcript Glyma12g14610.1 (locus Gly ma12g14610) derived from phytozome v7.0 (chr-ID Gm12; pos 13616855 to 13617592 reverse strand)
atcctttgtcgtcctctctttctcgtaaacacaccttctctttttcattcattttcttcttcgtccatctaagtaggaatgcgagttgaaacggaatgatcttttgtcatcttctttctccttggatcaggaccccactaatctcgttcattttcttgccacattgattgattcgggtggcataaaaaaataattgctaaataaatatttttacagatatttttaatatatttttattcaaagatattttcaataaatatttttaaagatattttcaatatagcagttactactatttgaaattttatgtctattgtataagaataatgtatcaattttttttactgtgttttttaatttattttaatacaactaactaattttcttattcttttaattaacaaacataacaaaaaaaaatatcaacaacacataaatttaactacaaaagtacatacaaagtaactaaaaaattatactctaattttatccaattttttaattttttttatctatatattttttctttaaaaaaataaaaacaaaattataaaattaatttaataaataagtaatttaaaaccaattaaaaaaattaaataatataatatttatattttataatatttttaattaaaaaaaacaagaaagagagagaaagtcctgaaaattaaattgcaaagtagtggagattggaaaaaagtagaagaggaaaggtgtatttacaaaaaaaaaaaa

SEQ ID NO: 23317 - DNA, 862 bp, Glycine max
  Intron number 3 from transcript Glyma12g28830.1 (locus Gly ma12g28830) derived from phytozome v7.0 (chr-ID Gm12; pos 32200287 to 32201148 reverse strand)
caatcaagtggtaccaagcaaggtactctcgtcaaacttaccaaaaaccttactctcaactcctctggatttagatagcaagatggcgagaggagaacaagagagcccgatatttatttctacacgtaggcatttaagagttgcagacttgcagtttggtttgtttagagcttctgaagcacacgcttcctttatgatttgtgtgataagatgaccacgacacattttaagtttgaccaattatttttatattacttgatgagttgatgtttgcgtactatggttcgatgtctccaatgtttctgtataatttattggcaagactgtttattaattgtttcacgtggatgagcgcccagtttcaaagttgtgttttgtttgattatgcaattgcattattcttttagtagataggtttagtttaccaatggtaaatactacacgtttatttttctctaaagaatttgcaaaaataataaaatttattgattttattgtttttaattttttaaaaataaaaacataatattttaaagacaaatgttaatcagtgtcctggtttaagaaattaaaaggaaaagaaaaaaattatttaatgtaaaaatcataaaaaaacataaaaaaaattaggaaaaaagggaagcaaggttggaaattagtctctaatgttatggtttcacgagttacacacgaaaccatataagatgaccacgacacattttaagcaaggtgggaaaacatttgcaagccaatcaacatttccctacaacatgattttcaacatttgcaagccaatcacaccaacatcctggttcaacatcgtgggaaaaaacctcctcaaacttcatgaaatgtaatgtag

SEQ ID NO: 23318 - DNA, 727 bp, Glycine max
  Intron number 1 from transcript Glyma10g23560.1 (locus Gly ma10g23560) derived from phytozome v7.0 (chr-ID Gm10; pos 29780803 to 29781529 reverse strand)
tctattacttcatctctgagtccgcgggcattcaggttcttatcttttttttttttttaactacataattagaagattagaagatataatatattgagttctcatctcaaatcaaattttgcactttcacttttggaaagttctcatcttttcttttcttttgaactacataattacattattttttcatgaatacttattgaagaagaaaattagaagatcaaatatattgagttttttcagctgaaatcaattcatgcactttaaacttttgaaaaacttgattaaaaataattaatataaaagttagaacaaagaattttgaacacttcacttttcccgaacatcttgtgttaaaactcatactttctctctatttctcgttctattaaataatactacctacaatatctataattttctttattttatctggctctcagtaggtgttaaatagaatttatggcgtgtaaaactcatttttgtgaaaattaatgtatagtttaaatcattttatctttttattttcttcttcgatctataagtgtttgttaatttattccaacaggatttcagagtctttggctttccaattggacactaaattatctcaacaaactttaatgcttcggactgattataagattaaatttttattcgagatttagttacgtccttccatcttgactaatcttttttgggcattcaggttctcatctttgcctca

SEQ ID NO: 23319 - DNA, 495 bp, Glycine max
  Intron number 2 from transcript Glyma12g28790.1 (locus Gly ma12g28790) derived from phytozome v7.0 (chr-ID Gm12; pos 32152047 to 32152541 reverse strand)
cacaatcagtaagtctcttcataatttgttaccttgcttttattcactgtttcaagaacctgctgacatctctctctgcatggggaaaaaaatgttttgataattaacccgtgttggttaagaagtagaaaataattattcactttcacgaaggcttacgattgaattgagataaataatgttatttaaatcttcaaaatttgagcatttgatttaaaataaaggagaataacctgcaggccacccagaaaacaaaacatgtttgtttgactataaaaagttggtgattagttcaatacaaaaagtgagcacattatagtagtagtattttggaaagttatggtggttgaatgaataataggtgactttccctagctatttatgcgattgatgtttgttttaacatgactaataaaattgaatttgaagggtgatgttatttactttttgttgtgattgtgacaggttccagcagcatctaatttctcagtctta

SEQ ID NO: 23320 - DNA, 924 bp, Glycine max
  Intron number 1 from transcript Glyma12g28790.1 (locus Gly ma12g28790) derived from phytozome v7.0 (chr-ID Gm12; pos 32152946 to 32153869 reverse strand)
acaaagacaaattgaaaggtgagttcccttcagttaatttgaattatttctgtttacctactgcacaatgacacttagtctatagacatggattggagccccactgagccaatcttcctcttactgtctcaatggcatttctaaatgctttaatattacaacctgttctgttgcatttttggggtaatttcaactctttgcatcgttcctatatgtttttgaagagctgctgtttgaatttatcatgtcctttgaaactaatcaatttgtctggcctggcctttatgcaatttgttttcatatggtaaaatttcttttcaatatcactattactgggccatacatgtgcttgtagcatttaatataattacctcaggctagccatttttttttcattaaacttgtttacttgaagtattcatcttatcatgccttttaaaacttctcatggttacttctattagtccagtgtcaatgacttgctataaatgcctttaaaattgaccggttggtagctttacatatgtggttttcatttctctccactcttgttttgagtcatctcatatctgtagatgctaaataatgcattaactgttgcaaaggttggatgccagattcatacatataattgggatctcctgatgttgtacgttgttttggcatttagtcttagccgtagacctagccacttgatgatttatttactgaagcactgtggttatactgtgcttggtgatgtttgtatcttccctttgatgattttaaccgtggcatagaatgttttgatgctactgtgcatgttaaaaaaaggaaaaaccatttctacaatgaacttctctatttagtggactactgatgctttctattttcccttgtttcaggatagaatttctcttgagattatctttagatacggcgaca

SEQ ID NO: 23321 - DNA, 954 bp, Glycine max
  Intron number 1 from transcript Glyma09g01630.4 (locus Gly ma09g01630) derived from phytozome v7.0 (chr-ID Gm09; pos 1043351 to 1044304)
atatcacatttcaggtgtgtgtgtaaagttgtttataatctatctctttcaagacagtttaatggaaatgtgttgatgtaattgtgacatgctctttgcaatattttttttttacctctgttaatgatactaggagtttgttgggaatttcccatctttcttgaccctgatggaatgtaatagatacagttcctggtgccaaggaaatagggacatgacaagcaccttgccttgtgtaaatcttgtattggttcttaccagtgagtgatatcttgtttgacaagagacctagctagtggtgttggcatctgagagttgaggcctttatagtcttaaatgatgtccagtcatatgtatagcttctaggatccttgttgcttattgactatgacttaggtttctttaattttttcctccaacagtaagctgtgtttctctgaaatttattttaccatgtatttacgttttgtctgatgggccatacgatttagttttgtacaatgcttatactgtcagtgtgtgtttgagtgaggttctgtaaaattgattttgaagtgaagtgctttatgctgagttatagtaaaattcattattattttttttatctaatacaagagttacctaacgttgctttgacttaatcaatttttgaggcagaatcaatttcttaacataaaaccaaacatgtgaacatttaactaaagttacatttgctgatatttcattgtaaactttggatgtttcaacgtgaatctaaacacacacttgtacacttcagagttttctcagttgtgaggaagtattagcttactgttttgagtgagagaaagggggaaaagtcttttattatccttactttcacagatacactctttgatgacacctcttctatgttctgaaactaacaccttggataactttgaagtagtgcctggatcatttgctgacttgaat

SEQ ID NO: 23322 - DNA, 825 bp, Glycine max
  Intron number 1 from transcript Glyma10g26990.1 (locus Gly ma10g26990) derived from phytozome v7.0 (chr-ID Gm10; pos 35505601 to 35506425)
caattcagagggtgtttaaccccccagatcttcaggtatgtgcaatttttcaagctaattagcatttaataggcatgtattgttagtgtaaatttttttacatattgtcaatcaattaaaaattattattgataaaacttttaaaataattattattaaaattaacgaactatcatacataacaattgtgattcagtactaatgtaaaaatctttacatgtcaatgagtatattttatttattctttttgtcaactgtcaagggactaaatgagaattttcaattccaatgttccatgtgttcagaaataaggaaaaagaggtacaatggtcaaagaagtttattaatgctgcaaatgttactataccttgcagcagtgaagtgtttttttataaattagaagaggctttatcagaggtggacttttgggggaaagctcagggtccacaaatctctaaactataaactcataggtgccccatgaccatcaaatagtaggtagcaaaagatatgagtccctttataaagtcaaatgcattaaaaaatactaaaatttggcctagcaagtaggaataaccactttcagccaaaagaaaaacagaaaaaaaggatcacaaacagtagcatcattagatagaaagacccacgtcaagggtggctgtgttatatctctttctaaagtctctataaagttaatgtgcagtttttaatagtgtgtgggccaacatctttccactttgtgttgaataagaagtaagaaatttatctttgattataatgtctctctcaggcacttggtactgagactcagaaacttgtagctgg

SEQ ID NO: 23323 - DNA, 281 bp, Glycine max
  Intron number 1 from transcript Glyma09g30830.1 (locus Gly ma09g30830) derived from phytozome v7.0 (chr-ID Gm09; pos 37647353 to 37647633 reverse strand)
ctgaacctccagagaagaaagatttaggtgacatgcatgcatcatgacacaccctcatgatgccattcataattaattaactaatccataatcattttattcaaaccattcagttttgtttgttagagatctgtaattagttatatgttatgtgtagctttttcttctttttttttttttacttattctgattgttgcttgagatatcaattaagtgtgttgttttgtttttctttctgtctacagctgcaagtaggacagtgtttgaagttgaacggacc

SEQ ID NO: 23324 - DNA, 927 bp, Glycine max
  Intron number 2 from transcript Glyma11g05250.1 (locus Gly ma11g05250) derived from phytozome v7.0 (chr-ID Gm11; pos 3679431 to 3680357)
tgtgttggacgctttaaatttttgcttctggcctggtacgctgcttttttctctcatgtatatacattgttttcttgcattcttaatgccatgtgaaaacttattcagacagggttaattaattaattacaggccttcaataccttagagacggtcctaatggttccctgttttgtttttgttttttttttctgtaattttctttttaattgctatttttttgaaatatatttcaatttatctgtctatctctatcatgtacctattttatcggtcacactgaaatgggttcatatataacgagaaggtaaacgagacatggtttctgatgagtggagttgtgtctctgattattgatatatgtatgtggattaagaagctctcggtgctacagaataaacttgtgaatatacccgcagaacgagctgtcgacccttgatagatatgaaagtgttatgtgaatatgcatgaggtggcaaatttggatttccatttctgtaacgttgtatgtcacatttttaaaagcattttgatttggtcagcggcattttggttcgcgtgtattagcctattatataatacggcagcttacaaacatatccctcatcctagctttcttaattatctatcattattgaagttatattacatttcttcacctttgtatgatatatttgaataagaaaccatactaaatttctttttagttgtaaattataaggaacgaaaaaacattttgataaagtgcctctgtcagtttgtttttaatatacaggggaataagatcagctggtcagttgacattctaattgacaaagacatgaattagtgattagtaaacatgtatttatcccttgttaaatttgccgtccttctattttttttcaacggtcacttctcatttgctaacagataaggatttgaatt

SEQ ID NO: 23325 - DNA, 743 bp, Glycine max
  Intron number 2 from transcript Glyma09g27200.1 (locus Gly ma09g27200) derived from phytozome v7.0 (chr-ID Gm09; pos 33973047 to 33973789 reverse strand)
gctgtggagtgctgttttccatagtaggtaagttgtttgcatgattactgtttatggtttgttctttatatataaaattatgattcattattgaagtaataaccctcaaagcacagttgtttctttgtggtgccttaatattgattttcatgcacttttgcgtctgtattttgagtagtgacataaaaattggatttttaccctacaatgatcaaaacccttaaaatatgagtaaacccctattttagtccttgaaatttttagccttggtcacttgactttgcaaaaagtctttcactttaatcctttttggccacattttcactgacattaaggcctaacgcaaatggacttttatagagttagagactaaagtgaccgatgtttacaatctaagttattaatttggaggtttattcaaaatatgtttacagcatcacaaggtttttatataaagcaaatatgtattaaatatgactggcctattctaaatataatgcacaaccacggtgtccagaatcattaatttatttcattcaacagataaaaaaaatatactctgatatcttcggtattaatacaaccattactgcttattttgttcagatgttagtttataatgaagaggagagaatgttcagtaattatattataaagttttattttttggttgattttttacatgtattccaaccttcattactgtagagccgtggaattaacagagaagctggatttttctt

SEQ ID NO: 23326 - DNA, 995 bp, Glycine max
  Intron number 1 from transcript Glyma12g36270.1 (locus Gly ma12g36270) derived from phytozome v7.0 (chr-ID Gm12; pos 39354692 to 39355686 reverse strand)
ctgtattttcaccaccttcccacaccaaccctcaggtaatgccttcttcgcaacattggatgcatcatccactatgttcccttttcgtttcatcgcccctttcgcattcttagttacccacttcccgtgatgggtttgtttgcgtttttgagtcttcttataggagaccatggttgaagcctgtgaagggtttgttctgcacttccactttcccatgtgcacacatcttgcttgatgaaatgccaatgtggggggttggttttgctgtgcttgttggaatgtcaaatgggtcggtgggaaatcaaaagatcaaacattttttatgtgcctttccagatacattgatgtttccctcctgcccaactgcatctctaccgagaaaagctttagttaaatgctcaatgcttgtttatatgtgtttgtttgtattgataaaacatggggtagtaatttcttgcatatgaactagaatcatgaaaataactgtgtttgtgtgtgtggtcatgcgtgtgaaggatataaggtgatagtgttttattttatttttttatcggcaaatgttagtttttgttagtagggggaaattcgaagccatgacttctttctccctcccttctcccttcactacaaagccaaccttatatttcctatcaggtgatagtgtgctctcatcaaaagagctaatattgactatataagtagccatacatgaatagtcaagatgaactcctctaaattgtcatgtgtgtgtatgaagaaaagtataagaatatatgatactactaaactgatttttatgctttgattcctaaggaagtatccgggaacttggtccttgatgtcttacttaataaggggtacttccagggttttgggcttgcatttttacttggatgttgggcttagttgtagttctttctagtgtaatttgaaatttgaatgatgttggaaaatttgcagatcttacagttcttggagaataggagaaaggtgca

SEQ ID NO: 23327 - DNA, 465 bp, Glycine max
  Intron number 1 from transcript Glyma08g46630.1 (locus Gly ma08g46630) derived from phytozome v7.0 (chr-ID Gm08; pos 45663043 to 45663507 reverse strand)
ccacccaaaccagagaatttacctacagtatttaggtaatcagttaatattgtacttacattttacagttgttaataattttgatatattagtttccctttttctttgtattctatattatgtatctaggtgctttcctattatatgctggaaggagaacattttttcaagtagcttaagttattatcgaaccataaatttcatgttttaaatacagtttttcgaagaattggtcacttgtgcatgtcagtttcagaaattgttggagatataaagtttgttgggtggtaaagagagaagggaagtgggggaaagatggcgtgttcgattcctctattaacaaaaactaataattaacattttcccataaaaaaaaaagtttaaaaagttgttaaactattcgaattcttgatgaattgtttatgtacttgcagagacataattattgaatactccaaggaaatt

SEQ ID NO: 23328 - DNA, 559 bp, Glycine max
  Intron number 3 from transcript Glyma09g35920.1 (locus Gly ma09g35920) derived from phytozome v7.0 (chr-ID Gm09; pos 41796392 to 41796950)
ccatcaaaattcaaactgcatttcggggttacctggtgagtttgtccaagccattttcttttgtttgtgtcaccttaagacctctttgcataatctttacattcactgctaaattcctcactcgtggattcatattaatatatttatgcacctcagatttaggagaagttagacgagagaatttctactaaaatcaagtgtatcaattgattttaatttatggaaattcgcctcttttctataagtgctcatgcaaaattttatccaaacatgactttaatgacagacacactaaatgtgaatcaagtatatgctgaaatttgttagaaattaaaagatttctcacaacatttagtgatttcaaaaattcaactcaaagagaataaaagaaataacgaaaattggcaacaaagaaaaaaaaatcaagtactagtagtcatagaaattaataaatggaagaagaaaccaaggtcagctactttgtcattgttttctcttgttcactgactgataagacattacaggcaaagaaggctttgagggcattgaagggaatagt

SEQ ID NO: 23329 - DNA, 385 bp, Glycine max
  Intron number 1 from transcript Glyma10g27570.3 (locus Gly ma10g27570) derived from phytozome v7.0 (chr-ID Gm10; pos 36246436 to 36246820)
gtctacaccttcgacaccgttgaagagttctggtggtatagaatttctcttcctcctcctttttcttctcccaaatattcatttttttagatgaagggaatctaagcatgcaatctcaaatcttatattttatgaattcttatcatgggtttcaatgattgatgcactgatttatttatttaaaaaaatataattgatttttatggatcttaggatagaaaatcttaatgtgtcttaatctttcttattttttattttgccttacatggggatttatggttttttgtttttttaattgttattattattattatttggagattgggagtgttggtaaattattggaagaaatgaatttgatgtgggaaatgctggtttagtttgt

SEQ ID NO: 23330 - DNA, 293 bp, Glycine max
  Intron number 1 from transcript Glyma12g07770.1 (locus Gly ma12g07770) derived from phytozome v7.0 (chr-ID Gm12; pos 5382558 to 5382850 reverse strand)
cctatcggacgcggcgcgtacggaatcgtttggtactgattcgttcgttttcttcgatttattttgtttttttttttttgaaaacgcgattgatttaattaagaagttgtgtgtttctctgattcggtttttcgttcctcgatgaattggatttgattgtggatatgttaatctgttagctagtgcttgagtgtttattgtttaacgtttacttttttttttttgagaaatctgaatatgttgatgtgctttttgaagctcactgttgaataccgagacgaacgagctggtgg

SEQ ID NO: 23331 - DNA, 941 bp, Glycine max
  Intron number 2 from transcript Glyma09g34190.1 (locus Gly ma09g34190) derived from phytozome v7.0 (chr-ID Gm09; pos 40633822 to 40634762)
tatcaaggccgaaatatttggttagtaaacctctcataccttcatttctgcttaacctagcttcttagggctgtgcactgtcggttttcatttttttaataaacccaaccaaatctaaccactttataaaaccattttttatattattaaacggaaaatagaacaaacagaaaagaaaaaaccaactagactaactaatcctagtgtcagtcacaccaatataatcagcaaagtagagacaatgaagatcatttgggcactcgttaaaaagaaacagggtatgatgaagtagatgaactccttggccaaaccatatgctacagaatttccttgtctcaaagtgtgctgaagagagagatgccaatccttgctcatgtagcttctaatcatgtccacctgagcagcagatcggatcattttttttttaatggttcaatttttttatttgactcaatttagttcggttttgtttgatttttttttttatacacctactttgattcatttattgggaatcactcaaactaagttaagaaatgtcagcaatatattttttattttttattgagtgaaatatattaaaagaatacaaaatattctcaacatttttaataataataattattattattattattataacaacagcatgtgtaactgcttaattataaatttattaatttctttgagaatatatatatatatatatatatatatatatatatatatatatatatatatatatatatataatttgtatactgaaaaggactaaccccgaaaaattaattcttagcactccccaccttataaattagagtttagaagtttcactaacgtacagtaaagcaataatattcgtggaaaaggtttattcaaatatattctgaatactacttattttagaagttcctttatttggaagaaagttaataatcaaa

SEQ ID NO: 23332 - DNA, 842 bp, Glycine max
  Intron number 1 from transcript Glyma08g45130.1 (locus Gly ma08g45130) derived from phytozome v7.0 (chr-ID Gm08; pos 44566366 to 44567207)
tcttgtgcagcgctttcgccgcgtgtttcgccgaggtaaccttccgtttcgattcatcatttggatctcggaataaagctactcccatactcgattgttttggatagaaactgaatcgtacatttagaatccaaaggaaatcctaattaaggactcgcttgtgtgagttgagttgtgtgtgtaagagtgtagaagttgtgaaaagtcaaattgtgcctgttattcgctttccaatatgtttattatttaatttaatgttccttgttgtatttagttttgagtaaatagtgtcaatgtaaagggtttttacaccgtcctacatggttacaaattaagagtttacaaattagttccagttttaaatgaatctgagttgagatcgtactaaggtgtattcacttataactatcattgttgatccttgatgctcttaccatacagatagattggcatgactggttggtttctatcagtagctttgtactaagcttttcttccttaatcaagtttgttgacttttaaaacaaccaatttaaaattcatattaaggatgatttctaattggctaatagtgtaaaaaaaaaaaaaatgttacactggcagtgtatttcaactctaaagaaaaactagttatcatgcttcaaacttctttatatgtttcttttatgctcttttgaagttacactattgataaataaatgtctttatgacaatattctatcccaagtctgccgtagaaatttaatcaagaaacttccctgccagaaagtaattctaataattcctttgtgcttgtgttttgtgtagttttgtactattcctctggacacagctaaggtcag

SEQ ID NO: 23333 - DNA, 723 bp, Glycine max
  Intron number 1 from transcript Glyma09g01910.1 (locus Gly ma09g01910) derived from phytozome v7.0 (chr-ID Gm09; pos 1242717 to 1243439 reverse strand)
tggggagagggggtgctgatatcaggttcctcctatcatctcctttcctgttttcaaaatctcaactttttttgtttttattggtttcctaatgcctgagatttactttggaataattgtagtttgaacaggaatagttcaatattttattttcatatacaaatacaaataaggaatgttttctatatggtattatattatatgttgcaacttgctaagaaatagtgtctgtattaagtatcaacttctttataatatacgttcacccttgaattttttagttagtcttattaagagaaataatttaattggaatacaggcacagcgtatagatttttatactgtaatctaatcttgttgatttttgtaataattattttaaaagtaacttgtagagtgatttttaattggttgacagtgtcattgtatcaaaattaaactcttaatgaaaaaactttgttgtccattgagggtggtaacatacacaccattttggagtgaatgagagtggaaggaagacaattatagaaaggaaaaaaaaaaaggtggaaaagtaaagtaatagatgtgttgtgataggaaaggaaaagagattagaagaaaatattgtgaaaaaagagatggaagcgaaagtgagtgtgtttatcattactttggtcactgcctccatgctaatacatagatttctactagcttttaacctttgtaccttgtattacaggt

SEQ ID NO: 23334 - DNA, 651 bp, Glycine max
  Intron number 1 from transcript Glyma08g42920.1 (locus Gly ma08g42920) derived from phytozome v7.0 (chr-ID Gm08; pos 42864913 to 42865563 reverse strand)
gctgctttggtatgcatttccagaaagcaatttttttaatcaatatatagtatctacaaatatatctaaattaatcaaaaactcgagatacaacaaaaaaaattatgaattatttattgacatgttatgttaaaagtttaacatgtttgttagtgcctgggaacctggtgaactttaatattagtctttcagaagaagaaaaaaactttgttaattttgattctggtaatttaatcgccagttactaataatgtgacatctatttagatatgtcatgttaaagtgatggctggtgtaacatgtttaatgttagacatgtcatattaaagtgatggctggtaataacatgtttaaatattagacctgtcatattaaagtgatccttaatgtaacatgattatggtgaaattatgtttctgtttctttcatttggtttaacatctgttgagaaaaaagatatgcatataagttgaaaatttgtaacacatcaagttaaaagttagcatgagaaatcatatttgaatttagattttgaactgtggtttgttttgttgttgtttgtgacatagttgcctgggagaacagacaatgaaatcaagaactattggaacacaaggatcaaacgccgccaaaggcagggtctcccttcaa

SEQ ID NO: 23335 - DNA, 434 bp, Glycine max
  Intron number 1 from transcript Glyma12g32270.1 (locus Gly ma12g32270) derived from phytozome v7.0 (chr-ID Gm12; pos 35784015 to 35784448)
atcttcccaaatattttcagtgggagacagtcttggtaagtcactattagcatgcatcaaaacattacctttatgttgatcatactaaaatactccctccgttcctttttaattgttgaaattttgaaaaaaaaaatgttttgtatttcttgtcatttacaaagttcaaaatcacattaattactcttttatcaattatatccttacttttcacctaatttataattaatttacacattgagtgaagtggaaatgaaagcgggtaatatgagaaatcacacaacaattttattagaatcaagaaaatttattgtatttcttgatttttctgttgaaatcttaaaagacaaataaaaaaaaaacggagtataatgcaaaatattatgtgaagttaatgacattgatgcatgcagttttccagtacccgccaaacc

SEQ ID NO: 23336 - DNA, 972 bp, Glycine max
  Intron number 3 from transcript Glyma08g43510.1 (locus Gly ma08g43510) derived from phytozome v7.0 (chr-ID Gm08; pos 43313196 to 43314167)
agaatttgctgcaacagaggaccttctgccaatctgtacgctccttccgattctctttcgttttttcctattttgtgttctcaatgtatcgattttgatgccctagctatgagagtggtgcgcgtgtgaggaattggggtactctgcactcaatttgagtatagaacagcgttcgtgaatagttttttgtaatatggttggttatatgaatggattatctcatcattgattttggtttagttctattattgcaattagcaggatttttatagttagggattgtttgtataaaaatgtgttttgttgttttctgttaatgtgaatccagctgctgatttgaagttttgagaagatttagggtgatgaaatttgattaacatgttaattttaaggtatttatagtcagacatgactgatggcacttgggaagaatatgaaattggtcagtattttgaagaaaaaaatccctagatgttaattgtttgtctggcatttctttgcttgtaaagatataagatggtataggattcgttccttcagccatgtggtgttgccttggttatgactgtctgcttgttcaacaccttaactgttattggtcatagtgtgtgtttgtttttctgttagaagccgttgaatgccaatccaactttttggccttttcatgttgacgcaatggaaagtgtgagaacttataaatgcacactttatcaactatttaaaagcaacctatttgttttataatgcaacatattcagatttatttagtgacttgagctggctctgaagaatatatatatgcagactcgcatggactccaatgcttgcaaattccatgaatattcattgttgtgtcaccaatctttattgctgttctctgtctatgtgtgtgttattcttatagacctttttctgatctcttcttattctggtgcagatttcaccttactttggtaattactgcaacaattt

SEQ ID NO: 23337 - DNA, 621 bp, Glycine max
  Intron number 3 from transcript Glyma09g26150.1 (locus Gly ma09g26150) derived from phytozome v7.0 (chr-ID Gm09; pos 32445210 to 32445830 reverse strand)
ttctactccaaaccttagttctctcacagtcacgggtcataataatcacacaatctcctccgcatgcaatctttctttccttgaagaagtaaccattgacacccttggttatacactttttccgaatacagacttactcatcataagctggctgcaagttctcaccaatgtaaagatactgaggctctattcgggtacccttctgacaatactacgggttagttactatgctttctcctctttacatcttttatttttttcataatgctcataagatgggtgttcttgtgtcaaatttttagccgatactcaatcttgcaattaagaatgtcaattataatatgcctcctattcactctaattgtgtaggatatatcaaatcctgtttcggtgagtactcagcctccctgctttgttcaattgaagtcattgattttggcgaaccaaccatctgcagatatatcttttgagcaactaaagagagcagtggagtacctacttcaaaactctccacaacgtagaattgattaaatcttcaggtagagttttttccatattattcagttttacttattttatgcttctgttttttccatgatacagtgagactctcttccatcc

SEQ ID NO: 23338 - DNA, 184 bp, Glycine max
  Intron number 1 from transcript Glyma11g04910.1 (locus Gly ma11g04910) derived from phytozome v7.0 (chr-ID Gm11; pos 3408444 to 3408627 reverse strand)
tggaatagaagctctgagtagatcacaagcacaaggttagttcaaactcaaatttctgtttatgttatgttatttttttcttctgttttggtaagtatttattatgtgactgtactaaatattcaacttcttgaatactttgttttgattaatgtattgtgaagcaacgataactacttcagca

SEQ ID NO: 23339 - DNA, 481 bp, Glycine max
  Intron number 3 from transcript Glyma12g08470.1 (locus Gly ma12g08470) derived from phytozome v7.0 (chr-ID Gm12; pos 6213293 to 6213773)
tcgtaagtttttttttcttcttcttttagacacgatacaacattttttgtgttggttatttatttgtttatttgttagtgcatgaaaatggactttaccttctacaaaagtagtgaaatttaattagaatgaaccctatcatcccatctaggattgacatctatagtaagtctttaacttgtactactatataatataatagtcattttaaaagtttttcactttataataagtattttaaaagtcatacctggaatagtatgttaaaatctctacagtggcagtggcagtggcagtatattaaaattaaaattgaactaatatattctgttctgtcaagtgcaacacattgcattggtctggtttcctagctacaaattcttttttatttttgaatttcttcctcagctgtcaatgccatgaatgctgatggcagtttgttggttggtttagtttgcttaagagattggattttccggag

SEQ ID NO: 23340 - DNA, 1016 bp, Glycine max
  Intron number 1 from transcript Glyma09g26610.2 (locus Gly ma09g26610) derived from phytozome v7.0 (chr-ID Gm09; pos 33151893 to 33152908)
agggaaaatccgttatttgggccctcttcatccacgtaagagctcaattcactgacttttttttttgtgtttttgaattagttgttttgttgattttgagttgttgggtgttgaaattcggttaatttgatgagtcgggtgtcggttttttgtaatctgcttatatgactgaccttgtttttcttccgtggcatcaattttgaactattctcttctttggtcgagtgaattttggtttttcacgtgtctccgtgaacattgagttattgagtgtactaagtgaagtcaatttttaatttttgattaatgaacatacatagttagagtgtgtttaggtctctcaattcccggctaaaattgatcttggttcttataataggtaaaaaatcattgtatttttttttttactattggtgattttgtctttctttaagaaacttaggattctagtatgagctatgaggggcgaaattcacccattatcggagataggaggataaaaattaaggccaatttgacacacaaaattaataaaatggaaacctaacacacacttgaccctaaattaaatgaatagctggatttgttgtcttctattatgcaatcgacaatgtttttatttagttttttccatttttggatgcttgctttgctggtgatagtttaaaatcacccttttccttctaccctatagcacacaataaatgtggtaattgattttgtctttggtgtttatgagaagaataaatgattgacccactaaggaaaataatttttttttttgaaaggcaaatgaaagataacactattgataagaaaacgtggctttagcacagatgtgcactcaaaaccaccactaaggaaaataagaacacctattttctagccttgatggctggttttttcctttgtttaacttgaagttctttggccgaactgcttgctagtatcgcagtatggagatttcgtacagatttattgatttaattttggttcattttttaagcttaacaaag

SEQ ID NO: 23341 - DNA, 449 bp, Glycine max
  Intron number 3 from transcript Glyma09g26610.2 (locus Gly ma09g26610) derived from phytozome v7.0 (chr-ID Gm09; pos 33153404 to 33153852)
aacttatcacaaactggagtatttataccaataaggtgagtataaagtcattggttcccatcctatttttgttttctgtgtgtttgttagttcttttgaaaaggaaaatgattaatgttatgaaaagattgacaaattcttgaatgcatcatcataaactgttgatttttttcttgtccaattactaaaactgaatttacaaaacatcctggttagttaattataatattcttatcaatttgcatgaactaattgtgctgatttgaaaaaacacttttggtcttttgagtcttttcttttctttttttattctttccatcaactaggttaaatgacttgcatatggatgatacttatatagtatatttgacattcatttctaagtttctaacactcttcatctgcattttgcaggcagctgctttgttcacacttctgtttattattgt

SEQ ID NO: 23342 - DNA, 272 bp, Glycine max
  Intron number 1 from transcript Glyma09g30040.3 (locus Gly ma09g30040) derived from phytozome v7.0 (chr-ID Gm09; pos 36951338 to 36951609)
cattttccattcgtagacgccaagaaccctaacaggtactgccccttctcgctcagctcaaacattctcgtaccctcttattttttcttcaaatcattacatgggttcacatcaaaatctctttttttttttcgcccccattttcacactttcattttaatcttagatgttgttgttctgtttagtttttggctcaaagatctgatttttttgctcttttttatgctaaaatggatcttagatcaaaacccagaagctgaaatctttggggt

SEQ ID NO: 23343 - DNA, 900 bp, Glycine max
  Intron number 1 from transcript Glyma11g13500.1 (locus Gly ma11g13500) derived from phytozome v7.0 (chr-ID Gm11; pos 9589569 to 9590468)
tcgatcatctcggaaaccctctctcttccttcaaggttggaacctcttctgtttttggattccaattaggtgggaaaaataaaataaaaaccctctttgtcattggttggttcctttttcgggtcaataaataaacttgtcttgtcgagtttgttttgttcgtgcgtctttcagttttttgcgcacgatggggtcggcttttagatgcccttgttttccctcgtgtgctgaaaaaaatgactttgttttgtttgacttggtccaattatgaaacattgccctggttaattaaaactatacataacttgttgtagataggttatgtttgaatatccaatgttgtgtataatggaatagatagagatgggatagaatggaattaaagtccctccatttcattatttgggaacttggaagtgaatagaatagtaagaattgtgattttatttggattgtttcgtttcgtaacccctatttttgggctagaaaaaaatgagagagtattggatggaatggaggtgaatagactccatcatgttccattccatgctttccacttttttaagaaatcgaaacaatgtatacaatgatgttccatttgatttccctccattttttttcatccaatccaatgcaattgtagatttagtgtacttactagtagctagcatgttttttggcactacttgtgaaattaactactggctttccagaatgctggttgatgaacatgctaaatttatggttataatgcggtaatcattttctttcattcttattgaggatgtgatggatgtcctgtagcaaaagactcttgatgatagacacattgtgtatgctaaagttcaaatgatgtttttggtacagctagaaatcagactctctctgtattatgcagga

SEQ ID NO: 23344 - DNA, 851 bp, Glycine max
  Intron number 1 from transcript Glyma12g29800.1 (locus Gly ma12g29800) derived from phytozome v7.0 (chr-ID Gm12; pos 33264300 to 33265150 reverse strand)
cgagcttcaaccctagcgtttgcacaatctattctgtaagcttaatgaaactcttttttcgctcttcgtgatggacgagttgttcaatctgtatttcgcggtagtgtttctggaagctcttgcattcgctttctgtgttttcgctatcgttttacgaagaaagtagtgtacgacgtgaatgaatatcaaatatgttactcgtttttgtttcgtgagattcagtaacgcagatcgacgatgcaattctgaaattgcgcatttgttctcttcggtggttatttgatgtcacgtcagtttcgttttgttcttttaggttgttatgatacggtttgagtccgcatttgatagcgtgaattcaaaaatagaaatgcttactaatcggtactgtgtgtactgaagtattattaacgctaaaaccacatcaggtttctatttgttcttgaaaatgcttgatccatttatctttgatatagtaacaatgaggtttgaacttgtggcatcatgtacaacacctaatcactagcacaatccttgtggcttaataaatgctcgatactgtcgattggtatcaatatcaatgtcttcaatatgttactgaaaatctacaattatctttgcattctttatcctctctttctttttctctctctctctctcacacacacacactcactcactcattctgagaatgtaatttcgattgacatgaatgccttcacttggatggaaagacagacagatagatttatagcacataaatacttaaatagcaaatgtacattcaacctgactactaccattctacttctgtgatgtgtcttatgcttggtctcattttttgttgttgaagg

SEQ ID NO: 23345 - DNA, 535 bp, Glycine max
  Intron number 1 from transcript Glyma12g00270.2 (locus Gly ma12g00270) derived from phytozome v7.0 (chr-ID Gm12; pos 50888 to 51422 reverse strand)
tgcgttgcttggaagaggctctccctacactacaggttagaaagtctaattctaccttgtgttctggacatccatggcgattactgtatttaattatctttctttttccttgactgagcatggtttctatagttcaattttgttttaaacctatactatttcatcatttacatggtatccctgcttggccgaataaatttaaactgttgcctctaagatgatctatccttttgttttaaaatattaatcaaacacgactttcacaacaagggaaagaaactcctgccagggtctgccataacccgtgttttcctcacgcgtttgattgaagggaagaaggaagaattttttaattttttctctttgtttaaaaaatttagaattgagaagaggaaaaaaattttatgggactaaaattccttcctccattttttgtcccccttttaatatgggaggattttaattttttggactgtactgattaaattactctaaaatctttagtctcatctttataagggtaggaagatttgtg

SEQ ID NO: 23346 - DNA, 652 bp, Glycine max
  Intron number 1 from transcript Glyma09g05970.1 (locus Gly ma09g05970) derived from phytozome v7.0 (chr-ID Gm09; pos 4749595 to 4750246 reverse strand)
agtgtttctcatttgtgtaaactctcgactttgtaagcatattacgcacctaacatcttagtttaagttttagaaattttcaaccttctctcatttgagtggttttgaaagattttaggactaaatccatgtttggtttcaacatgttattttggtccctctaaaaacttattgaacatagtttttatgtttttcaaatttagtaattttgttccaatcatgagtctaacatgtatgctgagtaatgtgttaaccttgtatgctagtattttttttttttatctatgtacaatacatcaataagattttttaaggaaccataattacgtaatcataaaaataataggaaacaaaagtggattaagccgtgatttcaacaaggaaaagaaacttatactcgagttgctgatgaaagtccaaattgtttaatgtttgattaattgacttcagaagaatagttttagtttaattctttaaacggctgattccttctcttataattgcgaaccacaaatatatcaccgtatcaagtacgtaaaacataactaaattaagcagtgtaatcttggtagaacaacagaacatgggtgaacaccctcattaatggtgttgtcaccagagtttggatctttttgcagaactggccctggaa

SEQ ID NO: 23347 - DNA, 448 bp, Glycine max
  Intron number 3 from transcript Glyma11g37410.1 (locus Gly ma11g37410) derived from phytozome v7.0 (chr-ID Gm11; pos 38528995 to 38529442)
ttttgctcgttatctaattttgcaattggatcaaggtgaagctgcgtcaattttttttagtaggccaccgttttagtccctgaaagtatataacactggcattagtcctgaaactaagtaaattacaaataagtgtaatatgtcaatcatgttagtccaatttttttttaaaaaagtgtgatttaggtaataatattaatacatgtttagggatccaaatagcagttggtaacaaccggaaattttcttaatttcaaggactattgtgacagtgcgttatatttttaggcactaaatggcggcttactctttttttttttttcaaatcatattttgatatgctatgtatttactgttgcttgtgtttgattatttgatatgtattttcctttgatgtactgtttttttgagatgattgtcttctgttgacaataagtgcaggttacgc

SEQ ID NO: 23348 - DNA, 115 bp, Glycine max
  Intron number 1 from transcript Glyma10g04720.1 (locus Gly ma10g04720) derived from phytozome v7.0 (chr-ID Gm10; pos 3644284 to 3644398)
ttgtaagtaacgctccctcgcattctcctcttcactaatgatttattcctaattttctgttttttgtttgatttacttagtttgggtcaaggagaacgagacctcggtgcagggt

SEQ ID NO: 23349 - DNA, 671 bp, Glycine max
  Intron number 1 from transcript Glyma09g42040.1 (locus Gly ma09g42040) derived from phytozome v7.0 (chr-ID Gm09; pos 46698458 to 46699128)
aggcttctaaatgtatttgataactggttaaggatttttttcttcttttaattacatgtagttcatcagtgtgttgatgaggtaagggcttcatctgtcattaaacagtttacaccaagaattccctttgtataagaaattgatgcagaatattagtatggtttgtaaataagttggcattttttgccatataatgtccaattgctataatgacttgattattcagatgctgatcagtatgatcacttttatcttgcaaatacaaatgccaggattcttttagaagtgaaggagggggaaaatgagggaaattagatggataaagaattgaagctctcatgcatgtctgagtttccttcaaaattgaaaggaaaaccccctatctcctctcaaaattaaacttatttacccctaaatttgatcttcttacatccattttgtttgtcctcctaagcatactagggatgctacttagtgactcttgcaattcttcatgtactttccttaggccttctttctaaaagtgtcctagtcacaaattaaaaagatttattttaaaccagaatattttattcaaacaggacagaattatctacgatctaacatttactgcatttttatgtattttttttatatgtatgcttatagtttgatcctcatatttcaggtat

SEQ ID NO: 23350 - DNA, 632 bp, Glycine max
  Intron number 1 from transcript Glyma13g00790.1 (locus Gly ma13g00790) derived from phytozome v7.0 (chr-ID Gm13; pos 508646 to 509277)
attgctttgtgagggtgtgtacactcttcttcatcactttcatggttttcttatatgcataataacattacttagcatgttttgagttcacatgtttctttatcattattttgttaattaaaacgaaagttatgtgtacgtagttttgcattcaggaacatgcacaaaactatataggtgctatatacaattatattactctataatatcagcttaaaaaaaaattagtgaaatcagactatatataattggtcaatattatcagctcaaagtcgatcctagtggttgctgttggatttatcggtcagtgttatcggaccacgtacagatatccaatcttatataattcatatcctatgatgttcaatcttgggacaaggagtgtgtatttgaagatctcataatattagtgaccaaaacagtatatataaataagacacaagtctattctcatgagttaccttttggagttaaactcaaagtataagaaccctaatgaaattttagcatgcttatcatttagactagagtgtaaacagtaggcttttaaaattactattgactttttattttattgttgattattttgtatgtaagatgataacaaatttgtttgtgcacacagggttgtg

SEQ ID NO: 23351 - DNA, 739 bp, Glycine max
  Intron number 4 from transcript Glyma11g00630.1 (locus Gly ma11g00630) derived from phytozome v7.0 (chr-ID Gm11; pos 291902 to 292640)
atatcataacacttggaacaacatcaaaagtagtgagtattaggactgaatctcccttaaaaccactgccactttttttctgtttggcatctgattatcctaaatgcaaagcatatatcggtatgcatgatattagcaatgaaaagactgtctgcaggttgaataaatttttgttggtaattcatcattcagagttttctactcccccttataatccaagagtgcttttacattgaaatgtattgtttaggaattcatttgaacgctaactcctgtcctgtttttcatgcatgcagatataagttaataatttttttgatattaagtagaatgtgactgattctgtcgagctagattgactagaagttacatattcaaaattagattttaactagattgaatcaagattgtagtttttgttctttcaatgattaatctcctctctcgtcttctataagggtgaatgtgattattctgtgttcacttagaaaacaagtactctacatgctttttacaaagtctctgatgtaattatatttttaagtggtaaagttatttttgtctggtttgcactatatcttttactttaaaacggtatacttgaagtgagtatgcagctattgctttttttttaatgctattgttggttttttttctctaaaaaaaattctatataattttctacatgatttaataaatttcaggttcatattacctcacaaactcagcatcacattcc

SEQ ID NO: 23352 - DNA, 302 bp, Glycine max
  Intron number 3 from transcript Glyma12g06200.1 (locus Gly ma12g06200) derived from phytozome v7.0 (chr-ID Gm12; pos 4227509 to 4227810 reverse strand)
aaactctctcaaaacacctttttcattgtgagttttttctccatttgtttgtttatctgttttacttttcttcagcaatcaacaggagagaagatctaattttgatgtcattttgttaaaccccctattgtattttgaatgatttgcttgaaaagctacattaagagtccagtttgagttatttgctctttcaattttgtccccatgtttattgatgtagtttgtgaaatattggttctgtttaatcccctcctgattttgtgatttgaatgaactgccctctgataggggaagcccagcct

SEQ ID NO: 23353 - DNA, 464 bp, Glycine max
  Intron number 1 from transcript Glyma08g43900.1 (locus Gly ma08g43900) derived from phytozome v7.0 (chr-ID Gm08; pos 43689721 to 43690184 reverse strand)
ccttaactagaaacaagatcaaggccataattctggtatggatatatcataacctcttggatatacattttatgaacataatcttttcagacactgtctgctagttatttctgtttgttggttttaaacacttgttttggaaacaatcttccaaacttaatagattttggatgaggaattgattgctgaataacataaaattatttttaaaaaaatagttttaaaataaaaaagtgagaagagaatcaaacggagatcctaaatgttcaacaattgccccctttatatcttatttcccactagtgagatctttgaagtagtgaaatatttgccacatattccttgcagcaagtaggttttctttctgttttaactatctctttggacatccttgcactatcttaatcttatcggttaattatttttcaggacatttttgctgctggaggtgagacaacagcaac

SEQ ID NO: 23354 - DNA, 645 bp, Glycine max
  Intron number 1 from transcript Glyma11g02480.1 (locus Gly ma11g02480) derived from phytozome v7.0 (chr-ID Gm11; pos 1612365 to 1613009 reverse strand)
tgatctctttagtaccattcaagctgacaccccttgtaagttcattctaacttgcagttgcaaacacacacatattcagtgtctaacattgtttctcaatcttttcatttatatgcagattgttgcttttctctgtggtggtaagtcttctccgccttcctgcttgcaatttttcagtcattgatcaacgttgacttgcattgacttatcctcactatccaaatttttctgcatctttttctaaattctatttgatattttgaggtaacaaattatggttgacttctaaccaattttcgtaaatgatcgcctgagaagggaatttggtcctccacaggatttattttacacatcgagccttttgaccaacatttaatattggaaaataatcttatcccatgcgaaaaatatgttattatgttcttttgaggtgcttttttgcccatctttttttaataaggatgtattctttatacaaaattagatttctgtatatataatgatcggcctgtgtcaatcatctcagttttttacttgtcaattcattgaccttacattttggtgttttgcttctccattccaatgccttgttagttgaatcacaattttaatggactttatccatggcataaaagtaattatttc

SEQ ID NO: 23355 - DNA, 984 bp, Glycine max
  Intron number 3 from transcript Glyma11g06650.1 (locus Gly ma11g06650) derived from phytozome v7.0 (chr-ID Gm11; pos 4714348 to 4715331)
tttgcaagaactttgtaagtatcttcaccagttgtttttcactcacagttgtctattagccttggtttggttgtggggaaggaagtactattcaacagcaaattttcaaaaaatagtgtgggtcctacaccattttttttttctctactttaattcaaatatttcttctcaattcttttctcttccacacaaccaaacatactcttagtcaatactgtgtgcttgttttctttcaaaggtttctatcaattttgatgtgctttagaagctttacaagatgcatatacaaggaagactgttgatattgagttgttcttgcttctcagatagatcagaattccaaactatacttgagaaagttctgctgaactcagcagttgtttaatctttataacaaatcatgggctattgatcttactgaaataacatcatgggagctcttcatgaagctaatatttgtttatttttatattttgggccagacagtctgtttgggcccagcccaatgtggttatacctcttggggtttatacatgcatagactcaaatcttaatattttgaatgtaatgttaggatttgagctattgtatcctgcacctcccattacattctggaaagcccattccggaatgcaaatttacattccggaatgggatttccggaatgcagtgaggtgtaggatgcaatagtgggagtgcctatgctgtgtaatgtgcataaaccccaatgtggctatccctcttgggatttcataatttttttaaagacttggatacttcatcgatacgtattggtgaagtatccaatagtattggtatcggatacgtgaaaaaaattgaagtattcgctcttcatgaacagaccttaagtttgcgttttttttttaaaaaaaaatggcagtaagatatattgttcagtaaactagaattattggttctttccttgtagatcccaactaattcatctggcctcattgagtatag

SEQ ID NO: 23356 - DNA, 696 bp, Glycine max
  Intron number 1 from transcript Glyma11g10650.1 (locus Gly ma11g10650) derived from phytozome v7.0 (chr-ID Gm11; pos 7585151 to 7585846)
actccaaacccagtcaaacaccttcaaagtcacgggtatgtatatatgttcaaaattagaatcacttgggacacaaaaattactaagagacatgttttgatcaccgtttgaacatttctaacttacttttgtttcattaagtttagtttgttatgctactgtacatgtttagttgtctctaaagtattttgctcacttaagtttgctaacaaaatttcaactcaaagcaatattaaagttgttttaaaaaagttcagctttccattaacatttttcatttgtatttttgcacgtacaacatcaaataaaagtacttttagtaaatattattcaaacaaaatttaatttatcaccatacttaaaaaaataaaaatagcgtagagttatttcaagttaattaatgtctcagatttaattattgaatatgtaatttcattaaatatttaaagaaatttttttattgttcataatatattatataacttaaacatgattactttttcttaaaatacatgtaacatatactttaaaaaaactaaaattttaacaaacttgaattacaagagttttggttattatgtttacaaatcttaatataaaaatgtaatagaagattctgtttcaatttagtgaaaattctccttttctttcatgatttcagcaaaacagaggaaacaacatagagggtgacaggcg

SEQ ID NO: 23357 - DNA, 774 bp, Glycine max
  Intron number 1 from transcript Glyma08g43130.1 (locus Gly ma08g43130) derived from phytozome v7.0 (chr-ID Gm08; pos 42992100 to 42992873 reverse strand)
tttgtggcctctgtttttgtctgcagttcacaacggtatctttcaatttcacctgcttcacacactgaccatgtcatcataaaaaaaaaaaaaatcattcttttatgtgtttttttcaattttctcaaattattgaaactacccatttttttttctagtgaggattttgctgaattcaatcatgggctgtttggattgtgtgaatttggattttgattatttttggcatagagtggaaatccaagtatttgaggatttttggttcattgtctgcacaaatcagtaggttattgtgtgatttttctacttgaggaatattgcatgctgtatttctttttctcattatgtggttacctcctttttcttccctgaaagtttcattttgttgccatgggctgttatgattgcttgaatttggattgccatagaatggaattgtgaatgtgtaaggacttggttcattttctggagcaatcaatagcttaatttgtgaatttttctattttagaaatatgaggagaagttcttattatctagctacctcctttttcgatgttaatattgatctgtatgatttttcaatgaaaaaccacagagctagtaactctttaaattagttttgtgtgctttttttatttattttggaattatcttctgctacaaggttaggtccttgctttgtttgtttttggttcgaaacttctgcacctatttttttctaattttcatgacagtataaaattaaaccttcagttgtttatttgttacagggtc

SEQ ID NO: 23358 - DNA, 893 bp, Glycine max
  Intron number 1 from transcript Glyma11g18060.1 (locus Gly ma11g18060) derived from phytozome v7.0 (chr-ID Gm11; pos 14526451 to 14527343 reverse strand)
ctcgccaactaattctattctctgttttatttgaggtaactacatcaattttatcttttttattttatttttttgttcttctattgaaaatgagttgttttgcttttcactcctcacttgccgctgcggatggatgtaaggttttaaattgcggtcgcagtcgcagtcgcggagtctctgaaaatcttgacattgtgaaaaattgtgaatgcgatgtggttttggagaattaaaaaatcctgatgttgtggaaaattttggctgcaagtgtggtctcttaaaagactggtgaatttgagaaattgtggtttttaaagactggagaattttagaaccttagatatttgaaggaattaagcagaggcggacaattttatgtatttggttttttgaaagattattgtcttgggtttagtcccctgaggattttaagggttgttgccttgttggtgttttagatttgttttatattttggatcttgtgaggactcggtttttgaaaggattggttttttggaggattggggttaaaaaaagttatttgtgtttgggaatgaatgatttgtttttctttctttgccattctaggaatgacgttttaaaagttagtttaggagaactgattttgtttggacgggaaagtataaccacttttggaatgtaaatgtagatgtggtttcaattatttcagtagggtctttgaaaaaaatgaaaataaatcttttgaggagtgtgcagtaatgtttcccttttattgagtgacaatggagggtttacttgaattttaaatttcttctctgacaaattaatatattcttattgattattgagggtgtttttataaatggattttgcttaaaatggtttcaactttcaggtcattgctgtaggtt

SEQ ID NO: 23359 - DNA, 388 bp, Glycine max
  Intron number 1 from transcript Glyma11g36840.2 (locus Gly ma11g36840) derived from phytozome v7.0 (chr-ID Gm11; pos 38154563 to 38154950 reverse strand)
atcacctcctccaaagtatgtctattcttctactttctatgtatttggttcaatgtccaattcgattcagttctttagaaaatctgattcatatatagttaaaaaatggataactcaattcaatcaaatcgtaccaaaccaaacctaaaaaaactaaacttttttgaagaaaaaaaaaaactactttatttagtgtttcggttaatcaaaccactttttaaagtagattgaaataaagtgtttcggatttttaaaaactccaatttttgcacagacctagtatagggttactagctagaatactatcggaagatgacaagttttaattatgagtttgttcctttgcgtgtttgctacacatgccatgcatgtaggttctgcagagcgc

SEQ ID NO: 23360 - DNA, 196 bp, Glycine max
  Intron number 3 from transcript Glyma11g10620.1 (locus Gly ma11g10620) derived from phytozome v7.0 (chr-ID Gm11; pos 7570613 to 7570808 reverse strand)
agataccgttatagccctgatactgtccctgtgaggtataaattctgaatcttttggttgagtaattgttggattttgagtttattttgtttgctgaggtttggtggtttgctgttattagctgctaatttttaatcctgtgctgcaattttcttttcttttttttttttttattgtttcaggctgttggaagtcc

SEQ ID NO: 23361 - DNA, 802 bp, Glycine max
  Intron number 3 from transcript Glyma09g02150.1 (locus Gly ma09g02150) derived from phytozome v7.0 (chr-ID Gm09; pos 1431561 to 1432362)
gggagtgccatttacttttgaaaaggtacttcctcttactttgcaattgttctggtaccagagtttattttcttgatgcatgtttactgggaatttgggcttcgcaaatcctattcagaaattaatcaatactgtgttgtttggctgttgtggatttatttgatattcataaaattatgtcattcctgtcctgtgtcactttcaggctcctaattgttttaactgaaacattttatatgactatgatgtttgaagtttggcattttccttggcatcacatctctatgtatttggttattatttcctattagatcaatagaaccactagttctgtgctatctcccacttcatataattatatggcatcagtgtgcagtttgctatgtttttatccaatgtgatgaaaaattattaggggagttcaattgatgtatgatctcatgctgtcaatgctaatgtggcataatttagattatgagaaagaacaaagactctttccctgcttgctggtaggaatttctgcttcctcattcctctgtttgttttttctctttaaccctagtttgctgacattttatagtttagtccttgtgagtatcatatcacgaaatgacttttggtaataaacttgaagaggtttgggaattgcataaatattgatattttctgctattgcctttgaacaagcttagactcaatattttatttcttgtggaatagcttacactccacatggttgctgtcaattcatgttttgagcttggtctttctaaattttttattgtaggttctttacccaatc

SEQ ID NO: 23362 - DNA, 293 bp, Glycine max
  Intron number 1 from transcript Glyma10g05590.1 (locus Gly ma10g05590) derived from phytozome v7.0 (chr-ID Gm10; pos 4369881 to 4370173 reverse strand)
aggttcaaacttatatatggatttattgtcatgagaatcttcctttgttactcttgtttctaattttttttgttaaacaccctgattttgatcgttgtttagtatttgtgctttatccatcatccattctgtgaaaatggaaagttgagattaaagctgaatagtatggcatttcactaaaggcaatagtgagtttgaacatatatattgctcatcctgataaatcatgtttgttcattttctctcttcctctaccctttccacagatttgtgtctggtgttggcatcatata

SEQ ID NO: 23363 - DNA, 678 bp, Glycine max
  Intron number 2 from transcript Glyma09g17040.1 (locus Gly ma09g17040) derived from phytozome v7.0 (chr-ID Gm09; pos 20772798 to 20773475)
ctagtggccgtacaactggtaaagattcttcaatgtctgtttttccttttcttggtttctggtaatttggggcatggtgcatggtacttgtatctttagtgttgtcaattgtcatgacacttgtattttattagaatctcaagatgattttcaaataatatagtttaaatgtccatatgaaattgtgcgtgctaatcaattgagtttcagtcttttattttaaacattttgtgggaattaataatgtcatacatttgaatggtaggtgttgggataccaacattgtttggatgtcaattacctattgtgatgcctttgcatgccatatcttcataaacaaaattgcgatacattctaagggagtttcaatacatattaaaattgatttttcggcatggtgcatggtatttggttagaatttcaagatgattttttaatgagtatattttaaatggccattatgaaattgtatatactaatcaatcaagtttgatttttttatttataaacattttgtgggaattaatagagtcatacattctgtttatttcaatactagtgcagattttcaagaatgttaagtgagaatgagatctgagggacaatgaaatgggttgaaaacgtagtttttaactgtttgaacatgctttcatgtaggtattgttctggattctggtg

SEQ ID NO: 23364 - DNA, 543 bp, Glycine max
  Intron number 1 from transcript Glyma09g38750.2 (locus Gly ma09g38750) derived from phytozome v7.0 (chr-ID Gm09; pos 44040666 to 44041208)
cttggattgagtttgaaaagggtctaattgacgaggtaaaaagaatgaactttgagtatgaaccctctttcgtggtatgtgtaaaggtcaaagcaattagcagaaattgaattgggatttggtttttgaattgaattgcacatgggggtgtttgaggggttgacaaagcgttatgtcaaatgtaatatatgcttatcttctcctcaacatgttatgtagtcatatctgggtaaagggccattttgaatcttctaatcgcatgatatgtgattcaaatgagggaagggttggtgagggattttaatggagaggaggggagatgagggaaggataggtttcacttgttggtttggttcaagaaaaaaggagacaaaggtcactatgtaaaaaaaaaaaaacttccattttcatccaaccaaccacattgcttgtattgctccggtcttcattcattactttctaatttcttagaacttagaatagtttgacagtctctacttcaacaacagttttcttatcaatatttgtctcattttcttccag

SEQ ID NO: 23365 - DNA, 605 bp, Glycine max
  Intron number 1 from transcript Glyma10g34950.1 (locus Gly ma10g34950) derived from phytozome v7.0 (chr-ID Gm10; pos 43102983 to 43103587)
tctatccagatccttgtggttggactccaattcaggtaccttttactgcaacttgtctaagcaactactttatactgtgctagagacaaggtctggacagttcaagtttgtttaaggccatcgtttcttgatgagatatagctacaaggttatagttcctgtttggttaatgacttgcacatacttttttcacaatcaacagtgacactctgaacacaaaactttgtttttactcttgaagattttggctaattgttaataggtccatataaataagactttgcactcaatttcataaatgaactctgaggagaacctaagctttttaaattctgctggatgccagaaaagtaaaagtataatcccttggcttagttctacagttgagcatcccatgtgtacaattgtttttcagcagctgtcctcctccctctttttattttttttctaacaagaaattttattgccccttcaaccatgtaatcagaactctttgcaatttaatacaaaaattataaattaactagaacatgttgataaattatttgctacattgtgatttctttgttgttttcttctgcagggggtctcttgtgatctgtttg

SEQ ID NO: 23366 - DNA, 491 bp, Glycine max; identical to SEQ ID NO: 17235
  Intron number 3 from transcript Glyma09g37290.1 (locus Gly ma09g37290) derived from phytozome v7.0 (chr-ID Gm09; pos 42843737 to 42844227 reverse strand)

SEQ ID NO: 23367 - DNA, 919 bp, Glycine max
  Intron number 4 from transcript Glyma08g47760.1 (locus Gly ma08g47760) derived from phytozome v7.0 (chr-ID Gm08; pos 46556357 to 46557275)
cgtgggcactcttcacatatagagcaaactttaaggcactcttctctccctccctcttcattgcaaaaattgtttgcattaaatcagagagcagaattttcattccttaaattgaatgctgatcgtggatcggctatactagatagattgctttgcctgtcatgtaacagataaccaatccaattatctgtttgatagctgacaccctagtaaaattgctgtacaaacactgcataatggaaagtatctgtcatcaaattttaaattatgttcagaataatcagaactttccttccagcactccaagaaaatgcatgtgctagttttgatatatggagtatctcaaatttatttttgacatacataacccttaaaatttccaattttcctgatgcctcattgattgagaggcttgttcacagtttatttgcaacgtattattttctgcttgtttcaatgatagtttggagcagagaaattggattttgtcccagtcagttcctgcttgtctacttgtctgtatgagattttccccagtgccaattgtctttagaaaccaataattcttactaaaatcaggattctgttaggtttaggtcactaatctgtcttactctaagtactaaccctgatgaattaaggaattatttgctttggatttccagcatctctttctgcgatgaacattaagccccgcaaatgttctatttgaatggatgccagtctgttgtatctttcgtcctttgttcttctactactacatcatatcttaaccttagttctttggtgtctttatccacctatatagaatttcgaaatactttatgaatcaataatgaaacattctatatggagataactagcttgctttgccttttttgcagggttctgcatcatttctactaggtctctttttcat

SEQ ID NO: 23368 - DNA, 496 bp, Glycine max
  Intron number 1 from transcript Glyma11g07010.1 (locus Gly ma11g07010) derived from phytozome v7.0 (chr-ID Gm11; pos 4944178 to 4944673 reverse strand)
taaacttcttccgaggtcaatcatcgtgcgactcggtaagatatttcttacactctctcattttgctgccattatttcgcttttgaatttctacttgcactccttatttcgtgttagttagggtgagataaaacgctaccgcaaatgaattttacatttctacactctgcaattttactttacttttgttttatttctagcatttaaattggtttggttttctttctctttgattgttgcttctattggatgatttaatactattttttcattcaatttaggtggctggtggattttgagagtggctttgatttaatcccagcacttgtggatggtaaattaccgggactttatgatgataatttctcttcattgagtcccccattataatctgattgatttgttactttattatttaacatttggttatctcagtatccatcatgtctttccttttgctctgtttattctttgatttgggggtgttgttgattat

SEQ ID NO: 23369 - DNA, 628 bp, Glycine max
  Intron number 1 from transcript Glyma10g28230.2 (locus Gly ma10g28230) derived from phytozome v7.0 (chr-ID Gm10; pos 37032029 to 37032656)
cacagttattcaaagtgctgctggcaaaggagcaggtacagtataactccaccctctttgttttttcatctcatgaatgcgagtttgtgaagcagatttgattagttgttctgatttttgttttagtaagatccattgctatttagaaagtagttcatctaattaaaaattgcttgaaagtcttgttgcatgtcaattaatttttaaaaaatgactaaaaatatgaaggcatgtactcagaaactaaagcatttacagagcctatgcgggctgatattagttgttaaggatctggtacaaattcccaccttttccatcagtgtgggtttgaatccgtgatgtcactttctccacttggtggacaaccttctctgggagatcccttaacacctaggggctagttgagtagctgcagcatggcagaattgcttatggagttacggtttgaacttgtgcagtaatcttctaagtgaatctgtcattggcgtcctgtctagtagttttccaacacttttatcaactaaagaaagcatatatagagccttatttttgggtgatagataagaatttgtagccctttaatttagctaaatatatttcttttctttcgttgtcgcagtttgcttgg

SEQ ID NO: 23370 - DNA, 692 bp, Glycine max
  Intron number 2 from transcript Glyma11g01220.4 (locus Gly ma11g01220) derived from phytozome v7.0 (chr-ID Gm11; pos 708458 to 709149)
ctttgcaggtatgtatgagtttaaccacatcatcttcttcttccctagtctctccagtaatgagagttttctttccccccattggccattataatgcaatgataggtattgcttatctgaaattctgaatcactgagaggatgagaatcaagatgtgctatttactatttagggtgcatttagaagagttaatttatagcttatttgaatacgctccctaggatagcttgttatgatcataagctatctttagctcatttcatatatcaaaaacacaatttaaaccttagccaatcgagctaaacaagtttttggcatgtggaatttctttttatttgttttctcttcaattgtaggaacaacttattataaaccatttactctatttacctaaactggctctcacccaccctattatgacataagcacttcatctccatttacctaactagtcaacacccaaccaagaacttatcctaatatgtttaattgtgaagagatttttcatacaaaccaacattgaaacactagtcaatatggtcttgtgtcatttgtgtacaatctcctgcccatgggaaaaggaaactaataagaaagccatgtgatgttccttgcgagaggagaagcatagtgtactaggcattggtgaactaccaaaatacaaatgtaatcatttctttgatctatgcagg

SEQ ID NO: 23371 - DNA, 911 bp, Glycine max
  Intron number 3 from transcript Glyma11g13220.2 (locus Gly ma11g13220) derived from phytozome v7.0 (chr-ID Gm11; pos 9413463 to 9414373 reverse strand)
aatcgaactcttacaaaaaaggtaaatatgttttctcaaacatatacatacaagttaccaatgaatatagcctaattgacaatgcactttgagtttgtaggaaagaacttaagttcaattcctgccgaatatattcttagagagaaatgaggagtcttaagtgtgactaagtcttgaattgaataattatgattcttgttaataaaaaaatacatacaaatggtaattccagcctcaaagtgacaaattcgatttgacaaaaatgttttgaaaggaagaacatgtaaacagaattacagattggcctttatatttccccctctcccctaaaaacctatttcataaattttggttttatgtatgtaaatagatctgccttccagcaacaaaggcacactttctaaaggatgtgagataaagaaaacaagacaagaacaagctgccaccccaagttttttgaggccaaataagattaaacaaagaaaaacttctgccagatcatcaaacctcaatgaatccaaatcttgtcaagaaggtaaatatgatgtctcaaacatacacagaaatgtggttacaagagatgaatgattagggttttattcaatttaactgtggatgtacaagagatattaaaagatacacaggactagcaaacttctaagctatctataacttgaattaaagatgaatttaaattgatacaaaaactttaatttgaattgctccgaatctccaatataacagagatattgatggcaatagtccaatataaacaacattgcagatatctcatttcttaaatttttgttttatgaatataaatagatatgcctttcaacaacgaacttgctaatgggtgtgtcttaaaaaaaacaggacaagaacgagttgccaccctaagttgggcgagg

SEQ ID NO: 23372 - DNA, 1001 bp, Glycine max
  Intron number 1 from transcript Glyma12g12770.1 (locus Gly ma12g12770) derived from phytozome v7.0 (chr-ID Gm12; pos 11064521 to 11065521 reverse strand)
aacaagctttcaaggtagtgttttgtagattctgaattttgtgcttttattcatgtttttgttgtttgtttttcatccttggatttttttttttgtcttggtgtaattttttttttggtttttttgtgcttgactatggatgctgacataactagattttgatgagtgtccagtagtggggtgttggatattttggttttcttttgctttgctttgttttttgttttatgtattgtcttctcgctcacttttattctttttccctgaaattgagcttgtggctggaggcttccaaaaattaggtttgtaactttgtgtgtatgattggtgtccaccatttacgcattaattgctgagattcattgggggctgggattaaactttgcataatttgcgggaggcacttttgaattgtgacatgagtcgtgacatgcttgttgtagctgagctgaatggccacggttaccattgttcttgaaaatgatataatatcgtatgtggtaggatgctgacaaaaattgagaaacatatatatatatgatttcagtcttagtagagtaaagttgaagattgtatttgctcatgattgaaagtatggtgtgcaagactcacgttagttctcttcttgcttactccatccttgatcaatctatcacacgtgaaaaattctcccaaaaatggtgtgtggttatggttgaacttgaaatccgtttatgattcacatgccaaatttaaaagttttatgtctgcttattttgaaaattttcaatacatgctttctcaatatagtcatttagaagtccctgatgattgtcttgggtatttgtgtcttgcttaatctaccctataagtcatgcttgatagaaatgaaaaaaattctttatgttgcattgccgttaatacttttggtccattgattaagcaagctgtttactgtttaacgttactgtatgatgaatgaaaaccacattgaactttggttgggtaacaggccttggact

SEQ ID NO: 23373 - DNA, 1061 bp, Glycine max
  Intron number 2 from transcript Glyma10g32490.1 (locus Gly ma10g32490) derived from phytozome v7.0 (chr-ID Gm10; pos 40959837 to 40960897)
tgcaaagtggggaggaagtggctgtcaagctggtgagttcaatcattgagttctattgggtgtttgggattgttaaatgcttggaagtctttataatgtttttgtttttcatagtgcatagatggatttttttgttgtggaagtgaagtgattggtatgcttttgtttactggttgcttgaccttcagctgacctaggggaatatttgcgatattgtgcatgcttcttttgccatgtgttactgagaagaaagggggttttaggataactgttgaattggaaatgttgctggtgaaaaatttaaaagggtattggtagattcctttgtgacatctgacagcagtgaaatcccatagagatatactaataaattgaaaagtcatgctttttagtaggtgtgataactcatcagagactatttctgtatttatataattatatataatgtactcagcgcccctgcctaaaatatgccttagatgatcatatgattatcagactgtatttgtgtatatgttggcaaatgaggaaaagataaattattgtagtctaagatttgaactgcatacattatttgacatgctgtttcatgtttcaataataatgcacacttatttggccagaatcttttttttttattagcttgaccttttaaacaactgttgctgtgatgttgtctcaactcaatatttggttgctttaaatcattagtgcaagtcttggctttgtactttgtgacttttatttttcttgattattttctgtaacgtatctcataatacagatatttggatctgttgtattttactgcctgagtattggttgctttaaatcattagtgcaagtcttggctttgtactttgtgacttttatttttcttgattattttctgtaaagtatctcataatacagatatttggatctgttgtattttactgcctgagtattgtgacaatttgtaagatagctttttcaaatttcaaagtttaactattacctttcttcccaattgtctttgttaatcaggaatctgtgaaaaccaagcacccacagcttcacta

SEQ ID NO: 23374 - DNA, 841 bp, Glycine max
  Intron number 1 from transcript Glyma09g34810.1 (locus Gly ma09g34810) derived from phytozome v7.0 (chr-ID Gm09; pos 41093464 to 41094304 reverse strand)
tcactctcaccccacacttcacgtaagtgaaaacggtaggtgtcacccaacagatatgtgctcagcatcttgatttgctaatgctatttttcttagagggaggataaggatacaaattgggattcatttccctgtgtgttgtaggaaaaattaaaaaattaattttattgaattttgattttgttctcatatgtggctagatcagttaaactaaactaatttgtgctggtctattagtttgtttccctatggccttctatgtctaatttgcacctggcaatcagaataattggccattgagattgagtgagtaagtggtgccgatcaacttggtggtaacagtgatatcaatctggatgcctttttttactagaaatgtagttcaatgtctatgccataagaatgcacctccatcgattaaaattttatggttattgtggaatatcttcactatttcttgtgtgattcttacttgcttattgtaaggtgcatgttatcattcttgatttgagtacaatgacagttttgaatttaccagtgtttggttctggatctgcgtatctgttaatagggtgctgggtattatcagtgtttctcgttccacctccccatttcgataatgctccagttcgttttgtgttgtgcttcatagtttttgtcttacatgttaatatgccatgtcttttcagtaaaacaagatcatcagactaggagacaaatagcctcaaatctttttttgctagctactgttcttgtgctttaattccagaggtcttactttcctttaggatctgtaattactaaaagcttagaatttctttgtatgacacaatcaggcacc

SEQ ID NO: 23375 - DNA, 921 bp, Glycine max
  Intron number 4 from transcript Glyma11g32180.1 (locus Gly ma11g32180) derived from phytozome v7.0 (chr-ID Gm11; pos 33584218 to 33585138)
acggctgcatcctcaggtacacatccatctaattaatacttgttcaataatccattcttatggctgataattcaaaattgatttttcgacactcttgctgtgtaccctttgaggagagcaaggaaagcgaattttacatgtgacaaatagagggctaaaatgagcaagagtaggttgtcactagtcctataaaaaagtaggactgtgtttttatcaagcaaaaaaaaaccactgaatacaaatgtcaagatattctaacttaattagtgatattgaattcaaattttagatattcatctgtcttaaatacttgaagagaacgaactttgtcatctagtgatactgcctaactgggaattagcatgtaacacaaattaccaacaagctagctaggtgtttataattatcgagactacctagtcagtaattaacaggagcacgaatatcaagtcgggaaccaagctttctcttaagcaaccttctcagctttcacccttaatttgttgagttgcttctttctctcgtaaaccagctgcgccttttccttctcttctcttctctagctcctaagagcaataaaacaattactctcacgtcaaccaacacaacaaattacaaaagccaaaaatgtccaacatctattttcattccaaagattaaaaaaaggaaaaacaactttccaagttattcatattcctaaactctaagaaaacatattaacacaataataatattctttctctcccataataattatcgtgtaacaaaaaatcatttattttagaataattattattttaattttttaatataacataaattattttttttacttatatctcttataatattaatatatgagttacaaaaactataaatataataattaggttaaattactcgtttagttcttatagtttc

SEQ ID NO: 23376 - DNA, 355 bp, Glycine max
  Intron number 1 from transcript Glyma09g10560.1 (locus Gly ma09g10560) derived from phytozome v7.0 (chr-ID Gm09; pos 10662227 to 10662581 reverse strand)
ctttatcttctcttagttcactccattctctccaggtgagctttatttattttcctcatttcaggtgggaaagaagtagagggcaacgtgatttgctttatccagtattttgcccaaacctaaattggttcaacttttgattcggtgtttctcattttccctaaaataattgcttcattgcgtaagtgttctctgttcaattggtaaccgttaatggcgtttgggaatttcgtgaaatgattcttctcattttgtcccacaagttttaacccttgaatttcctattatatatatatatataataaatactttattgttgttgttgttgctttctgattttgtctttttaagcagc

SEQ ID NO: 23377 - DNA, 1045 bp, Glycine max
  Intron number 1 from transcript Glyma11g01250.1 (locus Gly ma11g01250) derived from phytozome v7.0 (chr-ID Gm11; pos 735050 to 736094)
tccggtttatatactgtcaaaactcaaaaactcctgtaagtctgatactattactttaaaattgagtgagcttatataaactaaatgaaaagagaaatggaattggaatctaagcaagattttcatgttgacttgtttttgtttattatttacggcagagggaatagtttttgttaggacttaggtgagaactttcaaagccaagctaccagggcccttgccagcttcatcataaagaaactttaaatcattttctttctttctttaagttgtaacaacagacatcagcaatttttttggcattggcttcactccctttgtcgttttctggtgcgttttttttagtaaaatctaaattaagtgaacattgatttactaactaaagacttcaagctggccaacttaatttaagttgcaagggaggttggaatttattatggaatcctgccagaaaaaaacactagtaatgttttgttttgggtaagttcttgggctatgaattgtgtttccatgcatgattttgtgacaagttagcgatgatttgtgagtgtggtttgtggtggtgggggaggggggagatagcaggagttattttgataagatagatggctgcctcaatctcatggcagaactgtttggataggtattcaaactgtgttgaaggaagaaataatctttaaaggattgagagggggctcttgaccgttaacaatgtagacctctctactttgtccttgttcaagttttgttggtgctgtatttttgttctcaaaaatatttttgctctaagaaatgatacccactaagaaatggcaatgcagtacaaattactttgaattgtggggaggtttatttgagtgcccttcgactattttcttccacccttctgttttggatccaaaggtgctttctgtgtgtcacctgcatgtagctgatgtatttctttttatttaccctaaacataaaactgtcttgctgttatgacttatgacctgtaaatcttgatgcaggtttagcattttctacgacagaggaggaattagcc

SEQ ID NO: 23378 - DNA, 274 bp, Glycine max
  Intron number 1 from transcript Glyma10g39780.1 (locus Gly ma10g39780) derived from phytozome v7.0 (chr-ID Gm10; pos 47395212 to 47395485 reverse strand)
ttctctttgcgcagttccctacctctcctttcaaggttcgtagatttcttctgtttttttttcttcttctttattgtttgttctacatcagcatgatgttgatttgattgtgttttctatcgtttcatcgattataaattttcataatcagaagattcagcttttattaatgcaagaacgtccttaattgatgattttataaccgtaaattaggtctaattagagtttttttcataaagattttcagatccgtttacaacaagccttaattgtt

SEQ ID NO: 23379 - DNA, 501 bp, Glycine max
  Intron number 3 from transcript Glyma11g14160.1 (locus Gly ma11g14160) derived from phytozome v7.0 (chr-ID Gm11; pos 10159704 to 10160204 reverse strand)
ggacaaaatcttcttcacaggtaaatgataatttttttcccaataaaatgtgttttataggtgagtgactccatattatttatcaaaattaatgatagtctcttactttaaaaataatgattttagtcttgaatttttcataattggtgaatttcgcatctcaccttgtattttaagtttcctaaagaaagataagatttgctaattactaaaaatatgagaatcaaaattatattttataaactaaaagacttaatcaattgagtctaattcagtggattaaattgagtgtgtgagttgttataatttttatggtgtctctctttaattctcacagataacaaaaattaaacgagttaaacctattttaattagtgaacttaaaaacacactatactctttttttccttctcttttttaactgaagaaaatgttgttgttcctcctcttccattgctgtaaaaactaatggcaggaagtgcacgagtggggcggattgtg

SEQ ID NO: 23380 - DNA, 765 bp, Glycine max
  Intron number 3 from transcript Glyma10g34510.1 (locus Gly ma10g34510) derived from phytozome v7.0 (chr-ID Gm10; pos 42685982 to 42686746)
aggaggtaatgctaactattttatcaaaatatattgtctaaagcaaaagaaacaaattgtttgttctagatgcagtgctgtcaaatgaacctaagatatttttcattttcttttttattttatatgcaaacttgttattattaatggatattattgtatattgttgaaagttgaaactagatcctaagtattataatagatatgatttggatattatatgtactttgaatgttgtaattttttttttaatttttagtgttataaaatggtgttttgttttacgttttagtgttataaaattatgatattatgtttctttaatattattttattatcatcattattttattaataccggttcaatcgtgtttgaaatattgaaccttgatccaatgcctttaccagttcaatgcctagtccggtattgaaaacattgcttttaaaccttgttttttaattctctgtataaactgtgactatttactttttgtagaaggatgggttttaaagccatatagtagtgtgctcttttggtggtgtatattattgatggagtgaaatgtgaatgccgaaatgtttgtcttgtttgtagagagagttctttatttttgttttttgttttttttgggggggggggggggggtctgtttagctaattgttctctttcttttttttagacggtgatatctttgaataatttcgtttatgagaaatggaatgaacagaagactgacaatctttttcatgtattttcctgcagcaac

SEQ ID NO: 23381 - DNA, 311 bp, Glycine max
  Intron number 4 from transcript Glyma10g38370.2 (locus Gly ma10g38370) derived from phytozome v7.0 (chr-ID Gm10; pos 46157649 to 46157959 reverse strand)
acaacgtgaaacaggtttgatttctggctagctagaaattcaattagaaggaatgtggccttagcatatataaattatttatgtttagaaaagtgtgtatcttttgtccatatatttagaaatagattattatttttaaagagatgtttcttagcaaaagaaaacaactttgactgtaagctagtatagttggacactagattaaagactagcctctgaagttataaatgtgacattagactttgtattttgacatgtgcgaagtgtttgttaatcatcaattcattcttcattaggcaacagcatttggc

SEQ ID NO: 23382 - DNA, 587 bp, Glycine max
  Intron number 1 from transcript Glyma11g04140.1 (locus Gly ma11g04140) derived from phytozome v7.0 (chr-ID Gm11; pos 2757106 to 2757692 reverse strand)
gggatcgtaaggcctgtggatccaagttcggtgaggtaagtaaagtttgttacttttcacttttgctgatttagcagttgcttatgtttgaagatctcccatttgggttgatctttttggattcattctttctatttagagttgaccttgaactttaggctctcctggactaacttcggcataagaactcataagagaaaatataaaaaaagtaaaatgaagtgagcttctctataagttaaagggtgctgctaactagtgcacatgaataaataaaaagtttatattatttgagttgtattggaaatcacagagaagagtatactattacattttccaatggaaaatttccatttttgattcttaaccagtgccctaagttaaaatcaacttatcacatggaaaagttaaatgagaaaacttttataaaagttaaagtgcacagctttcatagtatcaaatgggagaacttctataaaagtaatttttttatgaaaattttgacatggaacttggaagtcagcataatagcatttgatttcgttggttcagtgttggttgaagaaacagaaggacagcttagcacc

SEQ ID NO: 23383 - DNA, 962 bp, Glycine max
  Intron number 1 from transcript Glyma09g39300.1 (locus Gly ma09g39300) derived from phytozome v7.0 (chr-ID Gm09; pos 44419663 to 44420624)
ctcttctcttctcttcatctactcttttcaaaaaggtaagcttcttttttgcttgcacccttcgatttttctcagctttcatggagtgtaacgagtcatctacttgagttttggccacccttttgtgccttgcaaatagggttttcatgctctgaatttggttgtgatggtttttactttctacccttttcttgttctgccaaaagggttgttttgggctgttttggttttggagggtcaaggtgttgtttcctctgttatgccgtgtgtctgatggtgattgttttggattgtttctatgcccctcttcttctttctgtatagtattgattctttggagtgtttttctgtttgtaaagttaattttttttttgttgataaaatttatatgctagttcaagtaatctgtaactgggatgttaatggttttggttaaaatatagtcataataggcatgaggattgatgtttcgtgtcaaggtatttatgtttataatctattgaaaccattataatctaggacaaagcttagatggagttcctgtggtgcttttggtgttgttctccgatcagaattggagttttactgcaaaaccctatgctgacttttaatataaacctttattatgcagattattgaggtaaaactccaattctaatttgataacaatatcaaaaacgtctaagaaactgtatatgagttttttcttataatctttatgctatatggccttattatgtacctaagaataatttctatagaaaccttatggattctataatcatgtctcaaaatgtagggcttgttttcctgtaacctctaattatttactttgtgtttatttatgttatttgaagtttctattgatgtaaatgtggctttatgcaatgtaactatgtaagttcgtttcttatgtggattaatcattaatactaattttttggtttgtgatagcagaatag

SEQ ID NO: 23384 - DNA, 989 bp, Glycine max
  Intron number 2 from transcript Glyma09g39300.1 (locus Gly ma09g39300) derived from phytozome v7.0 (chr-ID Gm09; pos 44420762 to 44421750)
aacctcatctgcaaggggcaccagtatattactatgttagtagttttctatcctctcttacatgatttataagctaagcccatatcgtagcttataagaatctatctagaaatctcactccagcatttttatttccaacatcctcacctatgtaatcttttaatcattagcattagcaatggtggagcgaagaactaattactgaaggaaaaatcaaactatttcataatcaacttgctattgaaagccttaaaatggtcagtataggggaaccgttgtgttagcaaaatatgatttctgctttattttgcttgccaaattactagtttaattttttttttggatgaagtgagtgaccctgaatatttacgtaattgaaagatcaaacaatttcttgtgtagtactttagcaacatagatttattgccgtttcttggactgcagcacattttctaacataatataagattccttgcaaaatggagagctagtgaatattactgttatagttgaatcaagttaggcacctgacagaattcacattgatgatgctcaaagtgaatttttgaaagctgctacttggatggaatgtagggaagatgtatgtgcagatgcaaaataacagaatgttattaaggctcaaatagacttatctctctctctcttatttccttttttaaaaatgaatttctatgcttggacttggcttttatgaatagtatggagaaaaacatgagtatatcattatcatctcagaaggcatgatcccctaggggatgtcaaatgagaaggtggctgagatgtagactgttagtacaaaatggattgttttcattgttctattcattccagaacagtaatttggtctggctatttgtttgttcttttagattatggtttataattatttatgatgagcttatgatttgaagcctaaaaaaatcctgtttgcagtgcccaccaacttttgaagagcgtgagtctttaac

SEQ ID NO: 23385 - DNA, 603 bp, Glycine max
  Intron number 2 from transcript Glyma09g08230.1 (locus Gly ma09g08230) derived from phytozome v7.0 (chr-ID Gm09; pos 7297924 to 7298526)
aaagaaacaaagtggctcaatttcaactactagtagtaagcttttttttatttctttttctttgctttcatcactctccaatgaaaggatcatttttaccacagtttttacatggtttagtatactcctcgggtcttgattatgacgttggctagctatgagttttgttttctagatgcacataatgataaaacactattttgtacagagttaagaacacaataatgctcacggctaagaacaacaaaacaatgttcacagaattaaggtttggttggtgtctactgtgtgttgggtaaccttgttcaattctacaggaaaagaaacatgccacttgagcttaattaggtagagtcagtggagatttgggtagagggagattctaggcttcaattattacatttttcaataaaagtgtagtacaagagaaagtaacagttaggaaaaaaataattcagttgatatagttataacttataaaccaactagcttcaattctaaagcacttgaaacatttatccatttcaactttgtgtttcctattttatatcaccttctattctatcatctttgatgattgattttgttccatcagattacaat

SEQ ID NO: 23386 - DNA, 371 bp, Glycine max
  Intron number 1 from transcript Glyma10g29280.1 (locus Gly ma10g29280) derived from phytozome v7.0 (chr-ID Gm10; pos 38167579 to 38167949 reverse strand)
aaagctccccaagactcgctttagccagtgcataggtatatataaaaaccatcttaaattcaatattatcaaacattgagagcgatcaactatatacagtatttgattaaatattataaaaatatattaataatacttatatatatatttaatgacatttttttcatgctattaaaagtttttaacaatattttattaagtgttaggcctaaaatattattaaatatcactgtgtggtagtgtatatcaaaatgatttttaattgtttgagaatatacgtactccgagtatatactaaactcgtaaattttgtttttacatcaagaaattaacttttcttagctagaactaatttttggtggcacctaggg

SEQ ID NO: 23387 - DNA, 585 bp, Glycine max
  Intron number 2 from transcript Glyma11g29630.1 (locus Gly ma11g29630) derived from phytozome v7.0 (chr-ID Gm11; pos 30374459 to 30375043 reverse strand)
gtggacaccaacttcagagaaaaattaccttttaggttagtttttcaatcatatttctagcttagaaacaatgtatgctgtattcttgcgactattagcatcaatatataaactaatatgaatcctcaaagtatgtgtctaagttaaaatgaatatcaaattgacctcttactttaaagaaaagctaatgaaagcttatgggatactgccttggatgttgtttacaattacaaatcctttaacttaatacctttagttgtttcttaacttggtttgaagatagtcaatttagagtgattggacagactggatgggaatggggtttggtctggttggatggatgaatgtatgtgggcttttaaaaatccaaacaaattggaaaatgataggacgtggcatccttatagctggtaggactcaatggtattttttgtgtgtaactgaccaatgtcatggtttggacatcagattatattctagtattattttctaatgtatctgtgtttgatgattgctattaagcttaatggatggttgccttctgttttagggccatttgaagggatttcttattatcctagagaa

SEQ ID NO: 23388 - DNA, 775 bp, Glycine max
  Intron number 1 from transcript Glyma10g32590.2 (locus Gly ma10g32590) derived from phytozome v7.0 (chr-ID Gm10; pos 41033904 to 41034678)
gtctaagatcaccgtcgaggtcttccccattcaatgtatgtctatctcaattgtaattttttcttccttttcattgatcaatctttgtttttgtgttgtttctgaactcaattatgacattttggaaaatttagctcatgtggatgcttctgaactcaatttagctgtcgggttattcctgcttttgaattttccgtgttgattagagatctggaattcttattatttcatcataccttggtttagtaaaattttgattctttgatctggccttcgaactttccacctctatctataatccatctaatctcagtgcgtttttttgtcttgtatttgcatttggtgatgagcaaaatgggagttcagttatgttaagaaaaacaaattttgatgatcatatactagttagatgtacatagctatatgcatcatgggaaatagggactactcaccacaaattattgttttaaattataagttttaatgcgttgttagtgcaattttctttaaatttgcttcttttcatcgttttgatagtgtgatttttagatatttccgacattattcacctacaattgtatccagactttactgtagtattcatgcctgctactgatgaaagttctgtatttttctccccttgatttcatatttagaaatttaccagatagagaaaagaaagggaatccatttatgtactaaatttgatctctgttaaaattttacctatctatttattgggttttggccatgttatgtgcagcaaagcacaaaa

SEQ ID NO: 23389 - DNA, 541 bp, Glycine max
  Intron number 1 from transcript Glyma11g37370.1 (locus Gly ma11g37370) derived from phytozome v7.0 (chr-ID Gm11; pos 38506914 to 38507454)
gttgaaacctgaggtacttaatttcttcttccttatatttgtatgcatattaatatacacctcaaccctatgaaacacgaatactccagccccttgttatgtctagtgtccgacacgcgtccgtgtcagttttcgacaccgacacgacacccgtattacattatatattttagacattacaagtgtaatgtgtctgtgtccgtgttcggtgtcagtgtcggtacttcatagcctcaacctataaaaagagaatttgttactataatataccatcttgggtttcaatctcatgtataagcaacaagttataatatattttacagtttcttgtgaataagaccagagaaaatacaccaaattaacataatagaaatgctgacatacaaacaatacttgtgttttctcccaaatagcatagtaaattttgtttaatatgtgaactgtgaagcatttaaaatttgatgtgaatgtgatgatatcctaaacgggttttgttgcgtgaataggtatacccactcttcgcttcagttggtgtggctgt

SEQ ID NO: 23390 - DNA, 464 bp, Glycine max
  Intron number 2 from transcript Glyma11g37370.1 (locus Gly ma11g37370) derived from phytozome v7.0 (chr-ID Gm11; pos 38507474 to 38507937)
cttgttaggaatataaccaccaatcctgaagtcaggtatatatggatctttcatatttgtatacaacaagttgttggtttggacttcttttgatcttcattgtccaaatccaatgttttcctctatcaaaatacaattccacatgtaaattattgtcagacatgtagctatgtataattgcacaataattttttaaaacatgcataattcttttctttggatctattccccatattatcgaaatttattgatatctaggtatactttatgttattttttcatcatcagcaatagaactatttgaattaatgcaagaaaaaatgtatgagggaatgaagattgagattgaagctaggtacatgtgtaaaaatatttgcttattttggaactgctcttatctgtgtttattgaatttgattatgctctcagggtgaccaaacagaacagaactgcaggaattcttg

SEQ ID NO: 23391 - DNA, 738 bp, Glycine max
  Intron number 1 from transcript Glyma12g32130.1 (locus Gly ma12g32130) derived from phytozome v7.0 (chr-ID Gm12; pos 35696619 to 35697356 reverse strand)
tcgctcttctagtgaagtttctacacattctactggtatactctattccttctttatatctatcaatattttgaaattttacttactatacaagaaaaatatttgaattttttatacatttatatatttataagatattcaacatagttagtttttcatttaaaagtttctttgctttggtagaataattaaaaggatatacaccggaaaaacttgagagtaatacacaaccactaatttttgcagttctatctactctaatgcttgttgtgggtcactctttcagtcttttcttatggaacaatacttttggaattcgtagtttaatttcttaatcttattctttgtggcccttcttttattgctaacttgcttttattgtaaggtttttatttgtgttgcacacatattatgaaatgtaatcacggggaataggaacacttaagcacactctagagtttatggtaaacactcaaattattagtttaacttattactatttgacatgcgtatttatggctgatgaaagtggaaatgatcagatataaaaatatgcttccggtaaaaaaaagttttttacacgtgtcaaatagtaataatttgagtcttttagaattgacatgataaattatgcctgagtaataactttggagttagctacttttttacatggtgttttaatcaatcataacactttatttagattcagggaagcgagggtcttccaaagttgaattt

SEQ ID NO: 23392 - DNA, 765 bp, Glycine max
  Intron number 2 from transcript Glyma11g09970.2 (locus Gly ma11g09970) derived from phytozome v7.0 (chr-ID Gm11; pos 7134443 to 7135207 reverse strand)
aactgtaatttctgattctctaactctttgttttgttcgtgtttgtgtaaattgacaatttctagttcattatgcaattaatcactacttgcaatgttccacgttgttagtgtttgattcgtatggatgtagctaatagcaaacaacttagatttaattgagttattgccgagcttataatcgccttttctgattaggacaggatagggctaatctggaagttaaaggaatggtgaatttggattttgtagttggaaggagcaggagtttgggttttctaaggttgtaatgtagtgttggggatattaaaagtagtgtgtctggcttatagaaaccacacgagaaaaaggtttctaaacggaagaaaatcaagggaggaggatttgaagtagagaaaaccccacacttcattttgaggtttccattggcattatgcccactttttgattcataagcgggagatagattttctgaattactcaagaaaactgcagatatgatggactttaaggcttcaaatttgtggtttttaaggtttagtttggagtgaaaaaatgaaagcaatggataaatggaaaacatgaacagagtttttattggcaactcacaacatccttaaattgccagatacttgatgtgatttattctatgtaagaatgggtttgtgtattgttgtcgaatattcccttcatgtgtttacattatgtacttcagaaaatcagaaaaccatttatattttactggactattacagggcctctgaaa

SEQ ID NO: 23393 - DNA, 604 bp, Glycine max
  Intron number 1 from transcript Glyma11g31330.1 (locus Gly ma11g31330) derived from phytozome v7.0 (chr-ID Gm11; pos 32426628 to 32427231)
aagccaggttttggggcgattacattgacaaaaatgtaagttatatacattacttttacattacagcaattcaatttgaccacatacaactatataacttagttttattcagtttcactatggtgaaagttgtttccactaatataaggttgtctccacttaattacattgttttgatcatatcactagtaaatatgaaatttacattaataccctctgaggttgaagattgaatatttgtaggtggtccaataatgtcccaataacagcaacctaatgagttgaacaacaatcattataataaactttgatgttatattagaatttgggttttggaaaactccactctcaaactctaagatgatatcatagtataaattatctatatacagctgcttggttagttatttttatgaaaatagtgttatttagtatggttgcatacacattaactactgataatattaaggacatgataaggggatagatgtttaatgcctagttgattgtagttctgcttcttaatttgtttttcaaattgtcataaagttgattttaagaagagtaaaaaaatttaagtgattgtgtttgatgtaggtataca

SEQ ID NO: 23394 - DNA, 599 bp, Glycine max
  Intron number 1 from transcript Glyma10g36290.3 (locus Gly ma10g36290) derived from phytozome v7.0 (chr-ID Gm10; pos 44505144 to 44505742)
ctgcagatccaccttccacaactaatcaaaccattgtatgtgctatgctaccttctcaatctttctctacatgtgtcatatgtgtgtgtttgtgtgctttcttgtcaacaaaacaaacatatagtattaggtaaggggaatagtgggtacttactttgatgctttaatgtagaacatagaattcatagaccatgcgttcaaaaaataaaataaaagaaaaacccttcactttttaaccaattaatcatgattaaggtctaaattttatatggttcaactcaacactcgctcaacatttgcaatttcacctttaaagataatgttaacgttgttccatgtaaccatgtagaccatgattaaatctaaacaaatcatataacctaccaagtctttttttttcaattttttttcctgttgcataaaatgatttctgtcattaattattgggcatcaccagtactagaaggcatgcaaacattggatatgtcatgtgtgtgtaataaactaataatccaaaataaagtccccatttaatttttggtactagctagctagtgatcaaaatctttaaaaactttgcgtagatcattgcaagttta

SEQ ID NO: 23395 - DNA, 925 bp, Glycine max
  Intron number 1 from transcript Glyma10g42930.2 (locus Gly ma10g42930) derived from phytozome v7.0 (chr-ID Gm10; pos 49781173 to 49782097 reverse strand)
ccattgcgcaggttttgttttcttcaattttttgttccaatttcccacgagaagtatctatgagaatcaaattcagcttgcacttgcttgttagaattgacgtttcactttaggaatctatgctcaaagttaatgtgaacatctattacacgagttaacaaggtgaaattacattttaatttaaataagaaaacagcaccagatatacttaaagaactatatctaggtcattcctccatgtggtgactggtcagtagtgaagcatcaggttattatgtttggataaacttctcaattgactggatttgcaggaaagtgaatatgtgaatatcacatttcttggtttggtacaagttttgacttttggctaaatattctcataatcgttgattccgaggaatataaaatgttcatatttctcttttttcttattcccatggtgaaaggtggatatcttatatttctatggaatgtaagtcattttctaccataactatctgttcccatttcattctttcacttttttcttttcgattttttaattaaataactaaagactaatggaacatgttcataggaataatatttgtgggcataatattgacggaaatgtgatttctgggaatgcatattataccttgaaacaaacaccccataaagaaaaaattaagaaggtaaaatgagttaagttcttttcataacttaaaattagcttatggattaattaaaatcagcttttagagaagctaaatgaaagaaattctataaattagcttataaataaactaattttctcctacaagtgtttattaagaagtttatgcttttcagttttcagttactggttaactctgaattctggataaagtggactcgtgtattgatacaattagtgggtgctttttaggttgaagctgcatacgac

SEQ ID NO: 23396 - DNA, 728 bp, Glycine max
  Intron number 2 from transcript Glyma09g38600.1 (locus Gly ma09g38600) derived from phytozome v7.0 (chr-ID Gm09; pos 43932633 to 43933360 reverse strand)
ttcgcctttttcaatttggaattgaggggaaaacggtaatttccctttttctcctattcttcatgttcataaactgtgttgaaatgtgttttgtcgtattatatttgattcgtgtcgttttgaagtggtttttgatgtcatgggaaatttggttctcttgatttcggtgacagatttttgttgaaatgctaatcaggtcaaggtttagggctttaggccctgtttgggtattcttttcccgaagcacttacagaaggcaaaatgaattgaacttctcttataaattaaaattaacttataaccttaaatttttgtataagctttctcattcttaaaagctgaagtataaaagttgatttcagctgaagagaaaagttcaattcattttagtttatgattttcttctcctataagtgtttatagagaagtttatccaaacaagaccttgatgagtttggttctgtcatgtgtagtagttttattgccacttatcagggcacagtcttgatctggatttctcataagttattaggttcggtgtcaagtgaatgtttttcagcgttaaggaagactaggtttactgttatgatttcctcaaacaaggaaattgttgatggatgttcgtgggatttgatgcttttggaattatggaatctgtttttgtctccctgttaatcttttctgatcccagggataacgatttcttttaatttgtgcaggacatttct

SEQ ID NO: 23397 - DNA, 204 bp, Glycine max
  Intron number 1 from transcript Glyma10g40350.1 (locus Gly ma10g40350) derived from phytozome v7.0 (chr-ID Gm10; pos 47787660 to 47787863 reverse strand)
caggtagaataacatgttattatattttttttattaataaatcatttactacttctgtttcttagttctatagtaatatagttaattagttatacaattatataagcatttccttttcctgcaggatttatggtatgtgtttgattttgtgtggttcttcttatcatgatttattgatttcataggtgcgaaagagcaagaaaa

SEQ ID NO: 23398 - DNA, 783 bp, Glycine max
  Intron number 1 from transcript Glyma09g31890.1 (locus Gly ma09g31890) derived from phytozome v7.0 (chr-ID Gm09; pos 38480549 to 38481331)
tttgctcatcgtcgctctcgtctggatcttctcaggtaccaccaacacaacaacacttttctccaggctttcaacaataatgtaaaagtttttgaggtctcgttattaactagtaaactatcaatttggtgcctcaccttttcttgcaaatagtctttaatgtaatgaaattatacaagaagtcccaaaagtattaaatatttataaatttacttcttacattgctatattttactaacattcaaagaatttttgcatacttggaaggctattagtatgatttctaatactcgattgagagattatttatataatttatttactttagggactatttagaagagggagagtaacatttaggaataagaatccaagtctaaattctataagtcgaatttgtagtttgtgcaataaagaaaccatatcagttggtttatgctgtctcagttcactttatatgttctctcatccagtgtttcgattttggattgattattagaactcaaaaagcaaattatcccaccatgattttctaccataagtcataacacggagtaccttaaagctacgatggttatattatatctatgtgatccacctcgtttccaaacactcactcggttgctttgttttttagagtacactttttttttctttatcattgtcatttgaatgtctatcttcagatgtgtggaaattaatgattttaggctttctgatattgtttcatgactttgtgctctcccaggacgccttaagaaaaccaaagttgatagagtgctg

SEQ ID NO: 23399 - DNA, 450 bp, Glycine max
  Intron number 2 from transcript Glyma13g01390.1 (locus Gly ma13g01390) derived from phytozome v7.0 (chr-ID Gm13; pos 1081034 to 1081483)
ccttacctctgtacatttggtgttcatactctctagtatcattcagagagcttactccttctctgggtatgcaatccccttacctcttcctctttcataccgcagaaagaaccatgatttgattttatcgttttcatactatgattcttttttatgttggtcctttgactcctttctgctcatgttcacaagccttgatgcttgacactataagtttctgtgggtagtagactataatattctgatctaaaatgagactcaagtgagaagcaattattaagtttcacagttcttcaatattcttgtaataagctatgatcaagttgcaaacttatgcaggccaaactctacaaattcaggtgccgatagcttaggcaataaaaacagcagctacgtaaaagggcctgttgtggaggaattcacttttcctgaaagatcaactcccttcaa

SEQ ID NO: 23400 - DNA, 744 bp, Glycine max
  Intron number 3 from transcript Glyma12g16390.1 (locus Gly ma12g16390) derived from phytozome v7.0 (chr-ID Gm12; pos 15584999 to 15585742 reverse strand)
tttctaccttcctggtccaggtaactattgcctcatgtttgtgctatatagtgtgttgtcctaattaatttcttcattttaattttcatattttttcaagtcctcttcttgctttgctgtttttcacaatggtgtttcaaggcttatttttggaatgactcattttagagaataagcttcttgattgtaccttttggttttatttattggtcttgggaatgacatagtaatagcgtaggcaactggatatccttttgaacaatcttcataagtaattttgatgttgcaatcttagttggacagtcttttgacaaataatttggcagtaaaatccagtgatcatatccaatatttttgaattatatatggtgaatgtgcacccatgccctatttacccctctaaaagagtagaaaatttatttaacttgaagttttttggtcttgtaagagagaatgcagagagaaacgaaaaggaagcgtaagtagattttaatggtgtaaatcatggttgtattgtagctgaatggactttatttagcacaaatcctagttgggtcttgtgacaatgttttgcaatcttataattgaattgatggtatctattaccctgtagaatgctgatcatacttgttcagtcacattctgacaagtacaccttgattcatatctaattatcttgttggatgttttcacttgtgaatgtgaacaggctggtatcgtgaagaaggagcatatcaagattca

SEQ ID NO: 23401 - DNA, 709 bp, Glycine max
  Intron number 1 from transcript Glyma12g02170.1 (locus Gly ma12g02170) derived from phytozome v7.0 (chr-ID Gm12; pos 1345669 to 1346377 reverse strand)
caactagcttcggtgctgaagcgacaaggattaaggtttgtgttctgttctgttttcattccttgctttcctcgaaaacccaccaacgaaagcatcaatctttttgctttgtttatcgttgaatgtctatcgggtctagtacttgtgcttgccacagttgaggtacgctttaacgagttatgagtctctgcaaaatctgaaattttcttatgtttaaccgtttatgatgcacgttcctttctcattcatctaattgaggaattgcatcaagcccccactttttcttttcgttgattccgctgttcatctcgaagattttgctttacctttccctttagctaagtgttcatcaacctttcccttttacgtgtcttttgtgattagtttgatatactttttttcttctaccaaagcacatagggtcttaaaaaagtacatgaacacatagattcatgctaggagttttactatcaatcctttggggtgggggggaaaggaaatggaataacaatgtctgtaacttgtaagtaatacactagtccagtatttgaataatgtaccttccattttattttatttttttactttaccattgtaaatttttttgtgtttatattcagttcaccataaacaaaagctgatagaataactattatactctgttacttctgcaggtttctcaggttcattttgttgcaccaaaccagtg

SEQ ID NO: 23402 - DNA, 936 bp, Glycine max
  Intron number 1 from transcript Glyma11g21510.1 (locus Gly ma11g21510) derived from phytozome v7.0 (chr-ID Gm11; pos 18533414 to 18534349 reverse strand)
gtgtacatagaagcctaggtgtccatatatcaaaggtatgttgtgataacataagtattttgagataagatattgtaagtattgttcaaaacctcacttatctatgtaacacaatcatcatcttttccatgtctatagttttggcaagaaatgacagggttgtcaatattaaaactattttgaggatattgtttcttcaatatcttcaggctcctgcagctatatggaaaacatttattttactgtggactatgtttacatattcttataatacaatattcaaacggaggttgtttgatattaaaaaaaattatgagcaaatgttcataattttaattaatattttggattctttactattttttaagatacatataaccaacgacatgattttgtttcggtttcttattttctttgttgttcatcattctcttgttgtcaacttagtctcatgttcaatttgtatagaagtgcatgatctcgtcattaattgctagcaaatgtgagaaatatacttgataatgcttttacttgagtggttataaacaagatatataataattaagtgaaggtcatcggagagaacgaacaaaatgataaataaaattttacttaagaacacatgtatttgatgaccacctttaatttttaaactattattaggagaaaagtaaacaaaaatgataaatgaaatttgttagcttacattggaaagatagttaatatgattaattttttaaaacaattttctaatcaatttggtaccttgtctactaattatgcaatccaaacatcttggtgggaagggagtactttaaggcctttccccttatcccaatgtatccctacatgttcttacatgcatttacttgcatgtttaggaataaaagttctaacgtgatttgacattaccataggttctatcactaaagctag

SEQ ID NO: 23403 - DNA, 982 bp, Glycine max
  Intron number 2 from transcript Glyma11g17940.1 (locus Gly ma11g17940) derived from phytozome v7.0 (chr-ID Gm11; pos 14418923 to 14419904)
aatccgagtggcatcgatacaatctcaagcgcaaggttctctttcctttttctctatttttataattaatcgatttatttatttaattttgttaaaccctagttttttttatgaggtttgaggatatgcgattaaataaggtttttatgtcctccttgatagaatgaactagcttcgttaattatgtgccttgctatttcatgtttctcagttagaattgttattttacaagttgaatcctgtggaaagatctgtttttgtattgtgttatggaatgtgtagagtagaaacaacttcaaatcaattgtgttaagaacatttcatagagttattgttgaaggtatattaataagaaggtcctaggccctgtttgaataagcttcttaaggcttgtgaaaaaagtaagaagttaaaaaaaaattgagtttttcttgtaagttatacatctcagcttttggagaaattagatgagagagcttatacaaaagttgagtacatgagtcgattttatgttatgggagaaactcaattcattttactttttagtttatccaaatagcgtcttataatattaggacatgggaggaagatgttgttaccatagaggcatatcaagtgagatgaaagtggaggggtaaatttatatcatacaatcacttgaaaaggctgaaagtttgagggaagcacatttcatccatataattgaaatcaatgactaagattaaaatgcattgaaataatttttaccatctttgtactaagaattaagatatactcctctcatactttcactatacatgacccttctatatgtgtgtgtactcacatgcatgctttgttggggagggggaggatttggtgactatccatttttttttaagaacttggtttatttccttgaaaatattaaatgaatgtctgtttttttaaaaataaaatgcatataggtggctggggttcctggggtgaccgaggcgttatt

SEQ ID NO: 23404 - DNA, 982 bp, Glycine max
  Intron number 1 from transcript Glyma09g28420.1 (locus Gly ma09g28420) derived from phytozome v7.0 (chr-ID Gm09; pos 35397319 to 35398300 reverse strand)
tattgaactagtttcaattgttcacccaacaaaaggtaaattttatgaaattaaaaattagttgaatacatctatctttttatgagaactgtatttaatggtaagtaaatagcagtagtttgttgacctgatttgttttgaaattattaggtgtaccaggaattcaaaatccattttagaatgatgctttgcattataacaatatcaattggagtcatccaaacgaggaggacatttgtggtttagacatgccaacgacttttaatgttggacaagaattatatgttggcgtggattttgacagtaaagatgcggtaaaaaatgcactgaaacaatatgtgatgaaggtgcatcaaagttttaaggttgttgaaaccaaatcgcacaaatatatcgtttgttgccccaacaatagcgcagagtctccttgccctttttatatgaaggcaattttatctaaaaaaactgatgcatggaaagtgacacaatggggtggaccgcacacatgtctaaatatgagtatgacacaagaccatgagaagtttgattcagatttaattgcgacttgcgtagtaggtacgttttttatgttcatattatcctacttttgtgttatttgttattttaatttattatttgaattacaggcatgatcagagaagatccatcaataaaaatttctttgattgaagaaaggataaatagtgaattttcctataaggtttcatacagaaaagcatggatgacgaaacaaaaggcgattgcaattgaatatggcgattgggaagagtcatatgcgaaactttcgtcatggctaacacacatgcaaaatcattctcctggctcttattttcaaatactacatgacaattttattgttagtaatagggtcagtcgtgaacatcggcaatttcatagagtattttggacatttggtcaatgtaaagaggcttttaagtactgtaagccaatcatacaagtt

SEQ ID NO: 23405 - DNA, 413 bp, Glycine max
  Intron number 1 from transcript Glyma12g32000.1 (locus Gly ma12g32000) derived from phytozome v7.0 (chr-ID Gm12; pos 35578060 to 35578472)
catcgaacgcttccaccgcagaatcgccactagcggtacttccccgccctctcccataatattggagctctgttgcttttgatctgcttccttcagcttagaatcggtcttttcgaatgcgatgtttcgttttccgatcgaatgtgatgtatgaaatgactgaattccgttttgcttttttccttttaccggattcttctgtctgcttgtcaacgaggctaagagaataatatatttactgtttagtgcgttgtgttgtgtgtacggactttgcttttatctgactagtataatatatgtagtttagtttctctaatgtttggtactgaattttgtgttttgaattttattggttatctgacataagtgccattgcagctactgagaatcctttcaagggaaacctcacgagt

SEQ ID NO: 23406 - DNA, 674 bp, Glycine max
  Intron number 3 from transcript Glyma12g30810.1 (locus Gly ma12g30810) derived from phytozome v7.0 (chr-ID Gm12; pos 34430096 to 34430769 reverse strand)
gaattctcaggaatctctttctctgtaagtcccatttttattaaccagatgtagatgttctttttgttaattcctttgctggcttaaaatgtgagactcattagaggtacacataacatagagaaggaagaacattgaaaaccttaataattaatttctatataaaaaaaaggaaattaaatgcatagaaaagagaataaaaattagatacttgtttttttagccttatcatgtgactattatttttttaattattgaacatttatcataagattgaaccttagaaaaaataagctctgagatttgtgtttttattttaatttgatagctgtgagtagatgcaatggtatgaattaagcagttgttttgctttgttgttttcgtaattagaattaagtgggaacatcagctcatgggattttgtatgactttacatgtaaacaaagtaaatagccatgatggtcttcataatcaacacttttttcggtattaccagacaggagaagttaaaggattaacttcaacaaggttcaatctactgataatgccatgagtgaactgtggacagatatttgttgtttgttttaaaggtttaaatattagatgtgtgttgcaacatggtcgtatctgaagatcttataagctttatttaaatcttgtaggcttgcaaatca

SEQ ID NO: 23407 - DNA, 720 bp, Glycine max
  Intron number 1 from transcript Glyma09g03350.1 (locus Gly ma09g03350) derived from phytozome v7.0 (chr-ID Gm09; pos 2357736 to 2358455)
ttgtgcttgacaaataatatccttttaatcgagttttttacaataattcatgcaatgtgtggatctatatgtgtaattagtatttattaggtgatctagtattgtattgctgaattatatataaagaagtatcacttttttctgttcttagaactaattagaaccccctaaaaaacaaaaaacaaaaaagaactaattagaacgagctgtaatatctctttaacctcttgtttcgtttattaatacattcttgatgaactcaagtctcaaaaggcaatgcgtaaatgtatatgttggcaaataaattctgtttttattaactttgacagattctattaaaaaaacttcataacaaacctgccattcaagttcaaactacatgcaatatgtattattaacaaaatgataacaaatatgagaactgaaaagaagtggatgtgtggccgaatttgtagcaaatataacaccgcagatgtttctattttgttctgcttgacattttatgcaccagtttgtccattctcgagctaggctgatgaaaaaattattcaattttttatttcttttgtttatcatgtttctagctagattaattcttgtttagagtttcaactatttcttacagttttttttttttgtttatcatacatattcacttaatttttttgcgtgacttcaaatgcagtgcaccaaagggcacgtaattctttgttctccctg

SEQ ID NO: 23408 - DNA, 351 bp, Glycine max
  Intron number 4 from transcript Glyma10g37780.1 (locus Gly ma10g37780) derived from phytozome v7.0 (chr-ID Gm10; pos 45689080 to 45689430 reverse strand)
ctggaggtaatatctttttgctccttatgtgactagtttatttctatatgaagttatgttaatgtgatttgccttacttgaatactggtgatatgtcaatgtgttattaattatgtgttttttaaattgatagttgattttcattgtagacaacactgttttctatgctagacggataagaatcagagctacaaatgcaatgaaacaatagtctcttttggttgtcttcttttcagctcttattgtttccacttttctcccaattaatcaaagtatcttttattcttgtttcttttccattggaaatgctttccaggaagttccagggtcttcaattttagaagctttgac

SEQ ID NO: 23409 - DNA, 732 bp, Glycine max
  Intron number 3 from transcript Glyma09g36340.1 (locus Gly ma09g36340) derived from phytozome v7.0 (chr-ID Gm09; pos 42112580 to 42113311)
gaaaaataggtatccacacctgaatgctgtggtccatttctcgccattgtatataccttgtgcccttgtgtattctagataccattttttttgttgcaattttctttttgtcttgttatctgcatggctgagtggaaagaatcatgtgcttaggcacctatatgagataacatagattcctaggacagtttcacagttccaccaagccagttttttccttatgacttgttttcctcacggaatcaatttgaaagatgaaacaagttattttccacaattttctcttctgcagttaagtattaggagttacaatatttcaactttctcatgtaatcaagaataaattttgattttaaatgtagttggtaaatgcaatgaggaaaatattactcaaaatttattgaaaatagaacattaaattcttccaaagatgaataaatttcaattgctcttttaggggcaaagatatgttcaataatttaaaagtatcaattcatggtgtgaaaaatgatttttcctctgatattgtttttatcttcaatcatggtttgagatggccattataattgtgttccagtaaatattgcattctcaattggagtaaataaatagatgtctgagtatcttcaaatatgaaacatgttctgtagctaactggttgttatgtgcatcatgatctttttggtttgataactagatattgcaccggtaattgagggtgctgttcaccac

SEQ ID NO: 23410 - DNA, 342 bp, Glycine max
  Intron number 1 from transcript Glyma10g02820.2 (locus Gly ma10g02820) derived from phytozome v7.0 (chr-ID Gm10; pos 2013574 to 2013915 reverse strand)
tttcaacaggttctcttcttttctctcttacacttcgatattttgtatgtttctacgcgctttgattgctactgttactgttctaccctctttttttgttatttacgttcaaatattttatcacaatacgacgtcgccgttggtccccatgtttgtttcattcattggagacctcttggactgcaaggtcattttccggaaactaaacttaacccccctctttttttttctcctttttgataaaacgattaaagttgtaatttttattttctttaagaaataaggtcaaaaccctcatgattacttctattttcaagttgtaatatttggtggcgattttgg

SEQ ID NO: 23411 - DNA, 789 bp, Glycine max
  Intron number 4 from transcript Glyma09g31160.1 (locus Gly ma09g31160) derived from phytozome v7.0 (chr-ID Gm09; pos 37935611 to 37936399)
ctttcaagttgttgtaagtcccacggatctgctattttatttcttctgcaacttctatagcgatggggctttgttactttcattcaagatttattagacagatatatcaaaattcaattttgcttggtttttggtgcaagtttgtgtacacaatttatcatggttgctttgtgtatttccctttctattttaatttgataaattccaaacctttacctataaaagcatgctaaaatattacgtagctacaaccttcaattttctttgacctcattgaaagaaataatcacataattctataattttcaatagtcaaatgcaacttttatctttaatgtattgaataaatcagtttattttgcaatgatagtggaaccaagtgcttttaatgtttttgcaatagcagcatctagttcattgcccgacatttaaaggacattataaaccatattgagctttagcatctattattatgcccattttttttttattgagagcaacatatttgtaggttaattatttcacacatcactattttctaagaatgaaacaataaatattcttagttatttttctgcaaccaaagtgggtgacatttaaaatataaatgtctcttgccaagcatgtcatctccctctttgatcatgtcagaaattttccggacaggttgagatcttgcgtggaatataaaccacattgttgtgaattgtgattagtgaaggaccctatttccaaaatatttctgggaatcaatgtgttgattgacatttcttctttgctacataagtt

SEQ ID NO: 23412 - DNA, 819 bp, Glycine max
  Intron number 3 from transcript Glyma10g44120.1 (locus Gly ma10g44120) derived from phytozome v7.0 (chr-ID Gm10; pos 50592330 to 50593148 reverse strand)
acaagacctggaactgcatcgcccattcagtttctgtcttgccttttttttttttctgaatgtccaatgaaacatattttccaattttatttatttttacttatatttttattattgtctagattataccacgtgtctttgaaaaaaaaatacacatgatcggataattgcttcagaaaggttattgaaatttagttattatcgaatcatcataaagtcgactaccatgtcagcaaattgttcgcccactctgccttttccaatagtacttgactgtagattgtatgatttggatccgattaaaaaatagaagtttgaaactactattagtattattatgatgatggtgataacaatttgagtattttacagctgttcaaagtttaaaggtcattataattattattattattattattttgacatatattattattattatgaaacacaaaccttatgaaaagcttcttcatcttggaacacatggattcatcttcaattcttggaacgactatttcattcagtatcatgaaaaccataaggtgaataacacaggaggaagcaacagtcttaatcaatactgatatcaactccctaagggaaagcaaaacatattatcctttactacatgtaatactgtctgtacatttaggcatattgaactgaaattttcttagacttgataatagcctaccagaacaagtgtcatggcctgttcaagacagactctgtaaattgcttgatgatgtgtctcaatgtggcatttcatattgctctttcggagaacctttgtcggggttgtttttttagtgtatttca

SEQ ID NO: 23413 - DNA, 789 bp, Glycine max
  Intron number 2 from transcript Glyma12g17560.1 (locus Gly ma12g17560) derived from phytozome v7.0 (chr-ID Gm12; pos 17628149 to 17628937 reverse strand)
ggatcctctagttcttacttctgcctcactcttgagtatttatcccgctcctttgatgattgcatttctgcgtgcgctttaataatctatcattctatgctctggttgtttgtgtagaatatgcatcactcttaagtaattcaaattttgctaaataccatttttctatttatgttttatttttctttatttactgtagaaaataagggaatcttggtaagaaaggatacatacctgctgttatgcattgtttttacttgttagatgttgtatatttgtgtaagttaatctttcttggttcaacatgtatttattttgtataacttatagcccaataacttgagtaaggatgtgatgttgtttgagttttcttttcttcttctttgtcactttcccagcttttttctttgtttgcttagtttatctgcaacaataaaaggggacaaatttcactgttttgccttagctacttcaattttggatcttttaaagatcattggttcaacctttagtttggaaatgaaatgccttaactgtgagaaacctggaaatggccattagccacttcttcctgtattttgtccaattcctttaaacatgtgccaacccaatagttattgtttttttgaagaagttggatgaaagtttctatttctcttacaaatgctcgattttctattttgtgcacatatcatattttattgtattatagccaaagagaccatattttatcacctatttttgcaaatttcaggcaagttgccagtggattcttcctctgttgatttt

SEQ ID NO: 23414 - DNA, 475 bp, Glycine max
  Intron number 1 from transcript Glyma12g17560.1 (locus Gly ma12g17560) derived from phytozome v7.0 (chr-ID Gm12; pos 17629050 to 17629524 reverse strand)
tgttgttgcttttacttcccatcagaatcagagttcgtttcctctctttcttccttttttattccctttcctctcataatattttgcgttgcaacacgatttcaattttctttgctttctttgattcctaggtctatctccttcccccaacgccctaattcccttatatgttttaatggttatgctctgtgtccttgatcgaggaatgctattggctgaaaaaatgttgctattactgtagaatcgttgatttgtgctgattcttgtggtagatggttgttctgttaaatgttaatttaattgagtattcgttgcgttttctggactaactagcttaatgatactggactgtggaatcaaattttagtattacttggctatggagagggataatgttaaattttttaggactataaaataaaatttggattctggtttgtaacatttttaaatgcaatttttttaatattgcagg

SEQ ID NO: 23415 - DNA, 331 bp, Glycine max
  Intron number 2 from transcript Glyma12g06690.1 (locus Gly ma12g06690) derived from phytozome v7.0 (chr-ID Gm12; pos 4562461 to 4562791 reverse strand)
gaaacaggaggtgttgtttatttaattttgtttaatttttgtaaatttttttaatttcaggcattttctagtattgctttatttctaactccctgtttgcacatttaaaatgctcttggaagttatcaccccctcaagttaaattgtttgtgttgcttttcagttttattgactgttaataataaggatgctggcatatttttggttttattttatttgatttcctttttctcttccttggcatatgcctcattcatacatgctcatattctgattctgaatattattatctcttttttctccctttggctcttgtatataaaggaaagag

SEQ ID NO: 23416 - DNA, 305 bp, Glycine max
  Intron number 1 from transcript Glyma11g27400.1 (locus Gly ma11g27400) derived from phytozome v7.0 (chr-ID Gm11; pos 27097387 to 27097691 reverse strand)
actgtttctgttgtgtcagaaaattcttcttctgagttctttggatgctctttggagagaatgcttggcaaggttttcccaatatcaagtaatgtaaattaattaatgaaatcacatgcttgagagatgtatatgatcatcgaagtatctattttctctatacaattataaccatgaaatgtgcaacatcaactatagttctgtgtacaggttttctctgtttgatccttccctcaaattattcttggcctttgaactgttataagcttccttttcattttgttgtcttggaatcttttagataa

SEQ ID NO: 23417 - DNA, 529 bp, Glycine max
  Intron number 1 from transcript Glyma12g02960.1 (locus Gly ma12g02960) derived from phytozome v7.0 (chr-ID Gm12; pos 1899077 to 1899605)
gtacctcaattcccccggtggcgccatctccgcaggtacccatttcatctcatcgtcgcttcacttcatctaattgcatatgcgtgttcaaaatcacatttttagaggaacccattttgcaaaacccctaattgtcgaaaactaaaagggaacacatctgtgatgtcactgatgtgtgaaagttttgatttttgtccctgcctaccaactgggttgggtcttgtagtaaggtctagtcataccttgaacaggattgactctgaaggaacatatatgtgggaaacaaaaaaattcccacaaatagaactatgtttttgtttttctaatctataattggtgttaattcctcaatggtaaaatctatcattcactaatttataattgttataaattagtcacattctcttcaatcttacagaacaaaaaaaatgcgtacagatagacatctcggactgtctttctgctagtatgtataattgctgctgagacttggcattggtgtcaatgttatgtgtagggcttgctatct

SEQ ID NO: 23418 - DNA, 587 bp, Glycine max
  Intron number 2 from transcript Glyma09g06390.2 (locus Gly ma09g06390) derived from phytozome v7.0 (chr-ID Gm09; pos 5141919 to 5142505 reverse strand)
tgatcttaaaggtaagccatattttgaaagtgattattcatacagtgttagcctcatgttggtatattctgtttcgggatgtttctatttctgtttattattgcattgcatggacattgtaatttaaaagcaattgttgttcccagcatgacaaaaatcacaatattggtatgtaatggcatgtggatcaatttccgtcttcatttttctttggaaaacattcattatggagcttcttctacacatctttcagttttgatgcaccatgtattctcaaaataataaacttgatgcctgtatttatgaaatatattattttctcttgatcatattgagcatgagtcagttaagacactgttggcctctttcccatgagctttgtttccccttgctgagaaagattgtatgaggtctttgattcaaatctcaacatattcctcaatagaacttatattggctaggtttatattaagttgcttgtgtatactgcattgcatatgaaacactgtttttcgctagtatgaatattatcttatttctgatcctttgtttgtagacaactgcctcaaaaagtggtgctctgcgcc

SEQ ID NO: 23419 - DNA, 790 bp, Glycine max
  Intron number 1 from transcript Glyma12g04290.2 (locus Gly ma12g04290) derived from phytozome v7.0 (chr-ID Gm12; pos 2819638 to 2820427)
tttccacaattctcagcccctctttgtctctggaggtaccttatttgcaattctacatacacttcttatactccaattctacatgcactgcttatactctgatcttttacttgtgtattctttattgttgttggtctgcgtgtatctgaatgagggaacttatttatgttctaaatctgcattcgtggcaaaaatgtgagtcgcgttggacacatctgaactccactagaatctggtttgtgtagatttgtgtttgtaagaagcgtttctctgtctagatctgccatgctgaacgaatgaaactagaattatgtgtatgatgcctcatatttggatgtccttctggagagtaatttttcttttggaaggccttctggagagtaattcactgcattaatataaatatttaatgcttcttttatatcttctgcttatctcttcaccttggttctttgcttgtcccaggttgatgaaagaagattagaccatgagcagtaagaataggggatttgtatttatgttttcaagatttatttgaaaaggcaaaaagatttgtttggtgtagttgaaatgctctggatctggaaattagtaactaatataaatctgattttttagacaaagcagtgctgcatggaatcttgttctaatggttttgattttctaagtgtttcatttgtcacttggggtggagaagattttgatgtgctatgtacatcatgtgaaaggggagggttttgctttatacaatttacagcttttgactatattttgtttcttgggacagggg

SEQ ID NO: 23420 - DNA, 821 bp, Glycine max
  Intron number 2 from transcript Glyma10g30840.1 (locus Gly ma10g30840) derived from phytozome v7.0 (chr-ID Gm10; pos 39427547 to 39428367)
atatcagtgagtcaatttctttctcctttgtttgaaccatttcttgtttattcttttattttttatattttgttttatggtaatgaggttgtggatgcagtgtgcatcttcctctgttttcatatgacttttacttctttgatagaacttagctaattcaagaaagaaactttgaaactgggttatacagaattactgtatttaattttaaaatcttaataagtgggggaaccaattttatttctccttttcttcttcgtgtttttattttatttttcttcttttcttgaagaaaaagaaccgggtttattatgagttccaacttttttaaaagtttgatgtattcaaggacgtttatctgcgaagcgaacttgatagaacttgttaggcttggtcatgaagcaacttttaaaggatactttaattagtaattgctggctttacgttaagcatactctaataaccattctttttgactttggactgcatattccagagagtatatagtatatacattgttttgcctaatcagcattacaattatgacatgcttataataattattaatttttatccgctcaaaaacaatgtcaaggagtttacaataactcgtgtgctttgttcaacttgagctataccctctcttgactacaataactatttattgcacaacaagacacgtagaactgatcctaatgatggagtaatactgtgattaatccgattgattatgatgaaaagattgaatgtaattaacagttgaatgtgttttctttgtttacttagacaaggttacacgttcggactgccagtttaagctt

SEQ ID NO: 23421 - DNA, 528 bp, Glycine max
  Intron number 2 from transcript Glyma09g04960.1 (locus Gly ma09g04960) derived from phytozome v7.0 (chr-ID Gm09; pos 3740687 to 3741214)
caggtatcgcattatcgtaacatcaacgtccttggtttttgcaatttctcaaattttccttttgttgaggttattcttcgtataataataattttcatttcctgctttagttcggaacgtgttaagtagcacatcacgctattgctgcttgatttctttctttcttttatttattaatgtatttatttattaattgatattaatattagttattgttattattattatttaaattttttatttggtctttacttgataaaggggagtttggttgactatgcgtgtcgtgaggttttttcctgttttggataacgtttgagtaagttgaaattttgtagcgcttgcttgtagggtgtattactctatgaattttgagctgtcctgcagtttgagggatgaatttggtacggttagaagcttgcattgagtgtagtgtaggtcaaatttgctacatgttgtttgtttttctttgtgatgggatggtaggttatgaggtgaattgggtgattgtgatgttgttgtagggct

SEQ ID NO: 23422 - DNA, 906 bp, Glycine max
  Intron number 1 from transcript Glyma08g43670.1 (locus Gly ma08g43670) derived from phytozome v7.0 (chr-ID Gm08; pos 43456981 to 43457886)
aggtgagaagggaagtgtaaagtttgaatttttcatggttattattatccgggttttgtttgtggctttggtgatgtgagtgtttatgagtgatgttacaagacaaaccctgcgggattttgattagcaatgttaggatcatgggaggggtcggggtagggtttctaattttgattcgtgatgtgagtgttaacaagtggtgcttgggttgagtgggaatcgttgtggagtttttgactctgggtgttggttttccttgttttgatgattctgaattggactttgttatggtgattcattattaatttattaccttgtctgagtctaaaagattcattaatttgagatcacttttaggggggaaataagtgtgttttgtctttttacttatccagtgcggtgtgtaatccaatgattgggtaagatcggttatttgataggaaagggaagttatttattttgagagataagagggaaagtgcaactaacaaacaaactaagaatgctggatgtcctgcccaatttttctgcttattagagagatagcaattcctcagaaataaaccatgagcacaaccccaaaagagtgtccataaacatagctttattctatatcaagcataggggttaggttaagagacttccttagagatgcaatcattctcttctttctataataaatgtgtatgagatattcaaccgataaaacttattattccctgtctgtttctctctttgttttagcttttaattttcacaattgcctgcctgccttctcctcttgacataatttactgtagtcttattgctatctttctttatacaacttttgtttttctgtgcttgtgacaagaggttttctactttgcagtggattgaggaaccaacacttctggtgacacgttt

SEQ ID NO: 23423 - DNA, 692 bp, Glycine max
  Intron number 2 from transcript Glyma09g38920.1 (locus Gly ma09g38920) derived from phytozome v7.0 (chr-ID Gm09; pos 44151962 to 44152653 reverse strand)
ttcattcctccaacagtctacactggctttcccaggtcaaatctcttttttgttttcctctaagctgattaacatgttatggtcgaccaaaactttgtgtttggtttgttttctgtttctatttctaaattaatgtgcaatggttttcactttattttgttttcttttgggattaagaaatggctgtaaagtaaaaatatacatgttaaaaatgaagtaaacaaagcaagtacaccctaaatgattgattatatatatatatatatatatatatatatatctcatattttggttgtaggatgtgttattggggttgactaaggaggcagaatcacttaacaagggccatttgtcacatagttagcacaagccctccagagatatacaaagcttacgttaagcagtttcaacaagattttaaattgtttctgaaatcacgttcggaggaacttgtgccaggaggagcaatggtcttggtggttctcggcaatcatgaaactcctagaagaattggttgcgaattagttagtctaaaactcaatgacatgttcttggaggtaaataacaattttttcattaattgtcattaggtatctcttgaaattaactaagtctttaaaatattacacattatattcatgaatatatacccagcagggtttgattgaagaagaaaaattggactcctttaa

SEQ ID NO: 23424 - DNA, 875 bp, Glycine max
  Intron number 1 from transcript Glyma11g03750.1 (locus Gly ma11g03750) derived from phytozome v7.0 (chr-ID Gm11; pos 2506661 to 2507535)
tcgtggtcggtatcatcgaaaacagagccaaagaggttttgcaacttccattctctgataaacatcctttccattttccatataatgaaggaaatttcaattccacgttttcctttttgctccagctactcttttctcgtttacttgtgcttcaattttctgttagatcttgtaagctgtcgaggcatttctcctagtcgcttattgtttcgttttcaattatgtatacttctagttctggtagctaagttgattgctcgaaactcatataatgatataacttcaacgactatacgttttaaacttttaattgtgcttattaacctatacgcgttaggaatttcaatcgagcttacgaaacacaagaatatatatgatcttcaaattacaatgccgccgagtactgcataggagctgaaaattagtttcatatccgcgtatttatttgtttcgtaatggagagatgtatacggaggttagttttaattgtatcaaaatgtgtaagttgcgttttaagcttatatattctgaaactgtttaatttttaatccctaattcttacttgttgttctggactatctgtaaacagccaagattgtatgcagcatttggtgttcaattttttttgtaactaaagctattaagctaagtgctattttaattctatcatgaatctaacgctatttttgtaaggggtaaagaatagattaaaacaattccgagagagtttaaatgcattttttttaatgatcttttctaatagattaaggaatgggtttcggataaataaatgaaatttataatgcctaactgaaatcaaatcaatcaattatctaacaggttggattagctgcttttgatttgaggtcagcttc

SEQ ID NO: 23425 - DNA, 991 bp, Glycine max
  Intron number 1 from transcript Glyma10g35100.1 (locus Gly ma10g35100) derived from phytozome v7.0 (chr-ID Gm10; pos 43281638 to 43282628)
gagagaaaggagctgtcaccgaagttaagttacaggtgtgtacgagttaagactttagtcttatttctatgaaaattcatgttgttatgatttttaaggtattactattatggttggtccaagaataaggccgtccaaattatttgcattaggctcccaaaagaaatttatttaatttttggtttgattattgaggtgtattttttcattgaagaagttgaaatcctgtcagaagaaaattcacttttgtttttctaaggtctctaattttttgtaagataccttaagttacccaaaaatatgttgagtcaggtatgaacttagttatcgcaaaagatcgtgaacttattatacataggtagttatcttaacagatccttaatgtcatacatgtctacttgtgataagagttgcataagtaatttcgttcttaagttttaatcccactttataatttcttgtttattttagtgtttttatttaatcaagttcagatgtttatatattttgtatttttcttttatcaaaattgaaatttctgacttaacaccaacttttatcatgtgtgtgaatcttttgagttttgactaaaatacaagtaaaagcacttaaaaaattacaccttaaattttgtccttttgatcaatcggtctctaaagcatttatacttattggcgtcagttaaggcaatatcaatttttctttttctaaaagaaaaaaaaaaatgttctcggtaatacttgtctcgttcctgataaataaatagaagagtgcgagataggtagaaggaacagagtgaaaagaatccaaaaggaaggtatatgaaaaaaattagaagagtcataaaaagaaatgaaaaaaacaaagcttaactattttccttagctaattaatgacaagaagattaaatatatttatctgtcttatgaatatttcatatttaaaaaaaggattcggatgttttgtgcataataatttggatacagggtag

SEQ ID NO: 23426 - DNA, 479 bp, Glycine max
  Intron number 2 from transcript Glyma10g35910.1 (locus Gly ma10g35910) derived from phytozome v7.0 (chr-ID Gm10; pos 44125893 to 44126371)
aaccgttgctttggactggctgttgagttctgacggtattattattattattattattaatactagttgaaaaactctatctttatttgagtcgactcatctttgagtttgagtgactaaaatcaaacattgctctaattaaagacactaagcatatttaattcatagttttattagtccctttggatttttcatttctgtttctctatctagtgatctcatggctaatggagactaaaatgaaaatctcctaattggaaaaataataattataggggccaaaatcaggattttttcttcttcttaagagaatcaaaacgaaacagtcctttattataggtactaaatattttttaagtcttaagtttacaatggctatcagattagaaacctctagcctaagtacaaatacaattccacggttgatctttcggacttatgtgtctaatcatggtacagtttctgctggtgctatccat

SEQ ID NO: 23427 - DNA, 411 bp, Glycine max
  Intron number 5 from transcript Glyma11g19600.1 (locus Gly ma11g19600) derived from phytozome v7.0 (chr-ID Gm11; pos 16356997 to 16357407)
ctattccaatttcatccaggcatgcctttctcaaccttgaaatcttgccctaaaggcttgaatactttttttgttcttgcagtttttttcttttcattttagtttttacaaaatgtgtttgttttgtttttcatatttaaagcattttgggtagaactttcaacaggaaaaaattctttaaatagtaaaaaaaaaaatgctttaagatgaaaaacaaaacaaacacattttataaggattaaaacgattgtttttcaaggacgaaaatgaaaaaaaagcactaaattatatgcaggaaaaaaaatatttaagcctacattaaaattaaatattaccaaaaagtaaaagaaaagttatttgcttttgctgattttgatttgcctttttcatcatgcctttgatagagtttat

SEQ ID NO: 23428 - DNA, 633 bp, Glycine max
  Intron number 1 from transcript Glyma10g13860.1 (locus Gly ma10g13860) derived from phytozome v7.0 (chr-ID Gm10; pos 15765763 to 15766395 reverse strand)
cagtttgtaaaggtaattattttgaatttatgtgttatggatgagactagattcatgggttttggggtgtaaatggtaaaaaaaatgtgattaaaaaaattaaattgagttttgggggctgttggtagaattttagagaagtttggagtgttttgttagttgatcaatgttcattgatttataatttaaagataaatgagttatgaatttgtcttgggcatctttgcatttcattgatttgatcctttatatcctctgcaccaattaatgttacttgctactgcctttgtgtatattcttcatgaatggtgttccattagtcctatgttctcttatattgggtcttcatttacctaaataatttaaagataacaaggtttactaggtagtaaagtactaatttttttttcactggtttgataattatactttataatctggcctgttaacaataatggcagtagcagtagtattgtcctgttcctgttcgtaggtaggtgattgtggtggagtgtttcgagaaataagtcactttgtacttgctggtttctggtttttattttgctcaactatctaaagatgcttctgttcttttatcatctttcagggtcctacggttgtaaacactggaat

SEQ ID NO: 23429 - DNA, 596 bp, Glycine max
  Intron number 1 from transcript Glyma12g32780.2 (locus Gly ma12g32780) derived from phytozome v7.0 (chr-ID Gm12; pos 36214251 to 36214846 reverse strand)
tcctactctttcattcggagacaaagctcgacgtggtggattttccaacggcaactctttttcctttttatttgttttttgttttgcattcaaaattgatgtattaaggtctgattcaatttttttcaagcttatagcatcaggtccgaatccgattcaaaattttgtagtgtttttttgaaagtaaattgatttctgatgccaagttttcttgaagttaattttagtccttacttttttatctgagtttagaactacttagttattcactcaaggtgcttgtgtgatcatttgaaatttggagtgtgggcatcttgaattttgttagcttgtcttataatttttttaccattatctgaactcagtcgatcacctcaccaagttcaacaacattccatgttgtgatatatacattttcttttttaaaaacattgtcttcattttcatatttataaaagaaaaaaactatatgaaattttggtaattttgtgctagatggaatcagatcagaaaaatatgaagattgttaatcattaattattaatgttttaaatcgcatagaaagaacaagtgttgttagtgtgctcccattgttc

SEQ ID NO: 23430 - DNA, 702 bp, Glycine max
  Intron number 2 from transcript Glyma12g03140.1 (locus Gly ma12g03140) derived from phytozome v7.0 (chr-ID Gm12; pos 2066219 to 2066920 reverse strand)
aagccatcagctgggcgtgggatcttctaaccaaagtatgtatttttggtatatgagccccctttgttgtaaacaatggtattgctttgttaaatgactgtgcaaaatgctttatgcttgagaatggtatgtaagctgtaagcattagcgggtagctaataattaactggagctacccctcctgtgccatataggttggtttttctgttgctggttttctgtggtcttaaattgtgcgttgcatatggtgacaagttggtcttctggtgttcaattacgctttttcaattagcaatttcaccgtcactgtcaccagtacttccactccatcaattgcaccatgcctaccgctgatgcattgagttttgtttgagaaagaatgatgttttgttgcttaaatattatgtgggagtttgttagtgttccattgtcaattgcaatcttgacattggctatcccattgaatggcctatactacttgctaattatgggtaaattaatgatctcatgacatccaatttaaaaaaataaaattataacgtttaacttgtctgtatggtattgtggaacattactaaattgagaagttgatggtcatttgattcctcaatttatgtaatgcatgattattactcttgtaagtttacatcattcacttctttatcctgctgcaggtttacaaattaccatcagattgcattt

SEQ ID NO: 23431 - DNA, 425 bp, Glycine max
  Intron number 1 from transcript Glyma12g03140.1 (locus Gly ma12g03140) derived from phytozome v7.0 (chr-ID Gm12; pos 2067123 to 2067547 reverse strand)
accccactcttctcttcgtcaacgctggtacgtttcacgatgagtgattcaatgcgcgttttttttcttccaaattctgcttcacaagtctctgtataccatgctatttttgaaattggaatctgtcatcgtagtggtaagggttttaacttgaaattctaagtgattccaaatgccccgaactttacgttttgtgttaatttgttcagaaatgattcatggacacctcctatccatttgatatgatgtaataagaagagagaaatgataagtgttaaaacgaggtgattcatatattataactctaattttttaatggtatggatgttttgttggtaataatgattataaagtttcgttatttgttttttttgggagaaagtatatggcactcactgttaaggtttatttgtgatgtgacaggt

SEQ ID NO: 23432 - DNA, 844 bp, Glycine max
  Intron number 4 from transcript Glyma12g11680.1 (locus Gly ma12g11680) derived from phytozome v7.0 (chr-ID Gm12; pos 9766234 to 9767077 reverse strand)
ccaaaccagaatatgttaatcatgaaagtaaaaaaaagaaggtggtggtgcttggaactggttgggctggaaccagttttttgaaaaatatgaaaagcaactcctatgatattcatgttgtttcaccacgtaactattttgcattcactccattgttaccaagtgtcacgtgtggcacagtggaagcaaggagcgtcgttgaaccgattcgcagcatcaccaggaaggtattattaccttttccatcaatttatatatgatctctattgttttaaataagaacaaaatttaggtgttattattttataagtatcctttgtgctaactgtcacatttgtgtttttgttaaaaaaagtgcagaaaacatacttatgacttactactataagagtcaatacgtaattcttgtttgattaattttgtctaaattttatataaaggttaagaaaattgttaaatattttttttttggataatatgaacttatttgtctatattaccttctaactccattatttcttcttatttcactttgtgaatttatcaaaagacaaaataaacatgaaaataaaaaataatttatgtatccttagagtatttcagtgataaataatttgaaataaactaaaacacctaaagtaataattattttgaaaccaacacagtagctattttctaatctccaactttctttgtggaaattgagttttcatgtctatgcaacatttttcatatctgttttcaatatttttcatttctatgcatttacaagtagtgcacaatgtttcagcttcaaaattacatcttagtcaaaccatagttacagtatatacacttacttaca

SEQ ID NO: 23433 - DNA, 527 bp, Glycine max
  Intron number 3 from transcript Glyma12g11680.1 (locus Gly ma12g11680) derived from phytozome v7.0 (chr-ID Gm12; pos 9767081 to 9767607 reverse strand)
ttggactgtgatgcctaggcatgataccattctagaagatgttctttatcattctcttaaaatattataaagaagttacttgtcattgcaaaaacatttttttaaagttgaatttcaatattcatgcatgtgattcatataatcgacctcatatatttaagttaggtaagactttgttgttgtggtttgagttggtttgtgttgatataagctttatttaacggaaatgattcctctgtatattatgaatttatattgataatatggttagattcaaatatattcactaaaaaattgtttaatttacgaaagagttataccagtgaatttctaaaaaaaataaagagagttataacagtgaaatcactctttttttttagtatgtaacattttttagtgagtgattgatcttcttataagttgtttggaggtatttgattttttttttcctattttttgattcgtttttatatttatctctttctttattgggtttagcagtagtggaggtctagtggcatattgcg

SEQ ID NO: 23434 - DNA, 742 bp, Glycine max
  Intron number 1 from transcript Glyma09g26840.1 (locus Gly ma09g26840) derived from phytozome v7.0 (chr-ID Gm09; pos 33459564 to 33460305)
caggtactaattttgacttgattacacttgataataacaatcgttctcattcagcagtgattgagattgtatatttttcatcgaataaaccatcaatttggtccatcaagtattattctctctcctaaattgttcatgaagtaataaaactatatgtattccctcaggtattattgcatatctatcaatttagtccctgagttgatatatcttattaaggtttaagaaccaatttgaagggtttttccatacttgagagactagctagtatgatttctaatatttgagggatcacttatataatttttttttactttaaaaactatttaggagaaaggatactatttcagtgtgaatttgaggggtttattatttttgtttttaaaatacagactcaatttagaaaagttgtatacaagcaaaagaggggggggggggggttggtttgcaggaagttttactatttttattttctgcttttgctaatgattacaaaaatatcacttgtaaaataggtgcgacttttgtaattatcattgaaaaattaagaatttttgcttttcataagatgaagcaccatcagtagtttagcaacatccatatggaaaagagtttcactcttcatgtttattgtgcaattcacttttagaccccatcaaatttagactttttccattgtctatgatgaaataatcatgcatttgcagagacattgtgattggttattcagagaaagtaaggg

SEQ ID NO: 23435 - DNA, 964 bp, Glycine max
  Intron number 1 from transcript Glyma10g02030.1 (locus Gly ma10g02030) derived from phytozome v7.0 (chr-ID Gm10; pos 1447601 to 1448564 reverse strand)
aagagtctcgtaagtacgttgttaacaaattacaaagaaagaaaaaaatgattttttttttcaccgtggggttgttttgttttgaattatgtagctgcccgtaaaaaaatgtcttttttttattattattttgatttttacccccaacacccacaattgatctcggtgtttgttctagattttgtagtgacttccaaggttaagttttgttataatgtctgggttttaatcgtgaattacgtcaaccccttgttgtcaagatcaattctccaattgaaaaggatttttaccgaagcgactttagtgaatatataggttggtgattgattacgccgtggcaggttcgttgcggcattgatttcatgtctctgaaaaaatgggtctggagatcttttcggtcaatgtttatgggtctagctggaaactttccattaatgctcagctagtttcaattacatgttcagttttggtttctaattatcgtatttatatctgttctaagtattcacttctcaattttcttggaacgtttttaagaattatattaaatttaattagtttgctttaattacaggttgttaattgtttgggtgtttcataaatatccctggtttcttcttgccttttgaaaatatgaagtgttcgcatctttaatatcaaattgcatctcttgtccgtttgtttctgtaattactactatctagcaatatttggttctctgggcaaaaggcaatatctcttcaagaggaagccgaaatggaatatttattttgctcttcaagctattgttttattttttttggaagttttgatgactttaatttcattatatcatatgttttgatgtccacattgccctctctgtagttcttacccaattagcaatgtcagtgtgctttaaattttctccttttcttttttctttctaggtagctgtgcttttagttatagtattaagcactgc

SEQ ID NO: 23436 - DNA, 331 bp, Glycine max
  Intron number 1 from transcript Glyma09g31220.1 (locus Gly ma09g31220) derived from phytozome v7.0 (chr-ID Gm09; pos 37982516 to 37982846 reverse strand)
aagttcttggaggaggaaaaggtaccacgttaaattcaatttagttcatagtttgttagtcatgttatacaaattcatgtttgagtacatatatatatttacaataaattcattggcatgatatatatatattgcacactagtaaatttgcacttgcgttttgtgagcaactcatgagagagctataatcttgcaaatgatatatatcattaaattttctctcttcttttgttagcaatatgctagtgatttgaatttaaggaagttttgacttttgagaatccatgaattgattctaatatataattcgggaacttaattgcagtggcag

SEQ ID NO: 23437 - DNA, 621 bp, Glycine max
  Intron number 3 from transcript Glyma09g26190.1 (locus Gly ma09g26190) derived from phytozome v7.0 (chr-ID Gm09; pos 32568075 to 32568695 reverse strand)
ttctactccaaaccttagttctctcacagtcacgggtcataataatcacacaatctcctccgcatgcaatctttctttccttgaagaagtaaccattgacacccttggttatacactttttccgaatacagacttactcatcataagctggctgcaagttctcaccaatgtaaagatactgaggctctattcgggtacccttctgacaatactacgggttagttactatgctttctcctctttacatcttttatttttttcataatgctcataagatgggtgttcttgtgtcaaatttttagccgatactcaatcttgcaattaagaatgtcaattataatatgcctcctattcactctaattgtgtaggatatatcaaatcctgtttcggtgagtactcagcctccctgctttgttcaattgaagtcattgattttggcgaaccaaccatctgcagatatatcttttgaccaactaaagagagcagtggagtacctacttcaaaactctccacaacgtagaattgattaaatcttcaggtagagttttttccatattattcagttttacttattttatgcttctgttttttccatgatacagtgagactctcttccatcc

SEQ ID NO: 23438 - DNA, 665 bp, Glycine max
  Intron number 2 from transcript Glyma10g37790.1 (locus Gly ma10g37790) derived from phytozome v7.0 (chr-ID Gm10; pos 45697787 to 45698451 reverse strand)
gaaagtagaaaatagtaatacggaagttgatgacacaaatattttctctactaatataaaaaaaaactagtatatttttttcttctaatggtgtctcaagtttggtttcttaaattttgttccttggtttctatttggggtataagtataatatttgaaaataagaagaaaaaacatgtttcattggactgcttcatagtttaactagctcaaagatcatggcttgtcattttgaagaaggctggggcatgtagtttagacttgttagttcttcaatacgctgccttaattttacaataattacgagcatgaaaatttggtagattgcctgtactattgtctccaattcattttctattttaatcctagatttatacttaaatttcaatgtagaaagatcttttgcactaccatattcctcttgatttaggtcagactgtcagacacaatgccttcatcacctgtatctcttatcatcattactttatgtatatgaccttcacaatgcttgtccatatggatgggcatgttagcatagatatttataatatatgttttctatgaattgctgtctgattattgatgaactaaagtgattccattttccttctaaaaattgctttaacttaggataaaacatttgaaagccagtgtgctaaggagat

SEQ ID NO: 23439 - DNA, 752 bp, Glycine max
  Intron number 3 from transcript Glyma11g06440.1 (locus Gly ma11g06440) derived from phytozome v7.0 (chr-ID Gm11; pos 4556689 to 4557440 reverse strand)
gagattcgaaggattcaaagagaaaataaggccaggtattgcgttaaccttcgtttaattagttatcaggttcagtttacttacctagttgttgagagtgaaaactgagaattaagattttttttttaaaacaaactgcttttgagaatcttctgtaattcctttgcattatgattcaccatatagatagatagattttgggataatttatagcttggtctaaataccattgaggggatgagggggaatagttgcaaagagtgttaccggagagtagattcaaaagctcttttctattgaaagatatgactttgcgagcttctcattctgctgtttagtgtttattcatcgattagcattaggtgcttaatggttttgaagaaattgttggaaaaagtttcagtaaatcccatcaaacttgggtctgctcagtgtaatatataaaagggcttttcagctcaacacttgtgaaatgagagtccacgaattcatgtaaggatgttgaatcatatggattgatatatgctaattgctaacctttagcatcagttaaatggtatcactcttctttcattgctaaaccataggttaagatataattgcatgctcttcaactttgttgaaaaaacttgcaggatttgtttttggacttgtgcaaaacaatctaattcagtgagtacctaattatatatatgactttgcatttttgactggcagggttgttcgtgaaggaaaagagcgtcggaggagat

SEQ ID NO: 23440 - DNA, 762 bp, Glycine max
  Intron number 1 from transcript Glyma10g39950.1 (locus Gly ma10g39950) derived from phytozome v7.0 (chr-ID Gm10; pos 47514142 to 47514903)
catcacttcaaattcctcagagagtacttatcgtatttattattacagcatggttacaagtacaatattgatccctaaactcaatccttcaccaaccaatgtctatttggtacatcataagtgaagctaaaccactcacacattgacacatatatgttgagcaagattttattattattattattattatgctatcttaaaggtatttcagacttaaaaatgtaaggaaagataaagattttaacaagtacttgaaggtatttcagacttcaaaattccagcgccttaatgctatcttgaattccttgcctctatactctgtttatgcaggaaaaagcagcaaatctcaagctgtcaacgccaaatacgttgtcgcacctattctattctttgttgggttgctgatcttgatttgcatctatttaagagtaaggaagccaacaaagcattttgagagtaagttcagatgtttatttaatgcttgatgtaagagtgaattcatattttctcatgccatttcttactttggtcgcgtgagatcgacagcaagaatcaagatgaatcaaatgttttttttttttctcagacatttacatgggatgtgacgcagaattaatggaacttttctctacatgttctacttgatctcaaactgaagaattgttttggaaacatttgtttttgcaatctgcactttcaatttccatttgacaaacatggcttgctaaaacttaaaacttcctcccccatctaggtgaaacc

SEQ ID NO: 23441 - DNA, 585 bp, Glycine max
  Intron number 1 from transcript Glyma10g43470.1 (locus Gly ma10g43470) derived from phytozome v7.0 (chr-ID Gm10; pos 50149793 to 50150377)
ttctcgaagacgagcttcaacttctctgcgaatatgtactcttctttcttcgattcctcgctgttactccaaaaccccctcttgcccagcctttgtttattttacccctttttttgtttattaaataggaatctgattatgcattttgttcccatcgcattttcgatccaagcctttgttcttctcacggttttctccctttttcttgggattttattgaggaaacaaaattcttaatgctctctttgcttcttaacttcgtattgtgtctagagattttttttttctttcacagttttgccctttgtcttccttcattcgggatggtgttttctaaattcaattgcaacctgtgctcactgaacaaatcattatctcattattaattattaaacatgaagtaattcagttacttttgctttagttctagtgataggttcgtgtttgtcatttgtgcaccttggtgttattaaaatgttttatgctaacttgcacattcttttattttaattgaatccgtaacaaacgttttatttttgaattttgcaatacctcaggtaaaagagatccttattgaggagtcca

SEQ ID NO: 23442 - DNA, 661 bp, Glycine max
  Intron number 1 from transcript Glyma09g03690.1 (locus Gly ma09g03690) derived from phytozome v7.0 (chr-ID Gm09; pos 2659290 to 2659950)
gaactctcttgctcgttcagctggtaattaataatataccaaacttttgtttttctatgttttgatcccaatataatactataccatagggcacaagtgacatatttcatgattgcaattgttgacacgaaaattagttccagtattttttttcaacactggctttctatcttctacatctctatgattattgtggtgtgaaaagcgcttctcacttctcgtcccgtttcatcaccaatcaatttctttgggggtagaaaagccaaagtttgcggttttctaatatatatgaagagcatcatgatatggtagtggattatgctagccaggactttataatatggcatatacttgttcgtggtggggcatatataaaaaagaaatatgtaattatataggttgtcgatagttgcttgtccgcatcctccattcatgtaaaatggaaagaaaaaaaaaaggagttatatgaattcataccacacaattagaaaaaaaatcatatatttgtacagaaaaaaaaagtaccataaaggaaaaagaaaatgctctttctttatttccttcattatagtagtattttgctcccttagaactttaccaatacaagcaatttctcgtttttgcaggactcaaacgaactggcaagagctgcagattgaga

SEQ ID NO: 23443 - DNA, 694 bp, Glycine max
  Intron number 2 from transcript Glyma10g33540.1 (locus Gly ma10g33540) derived from phytozome v7.0 (chr-ID Gm10; pos 41881220 to 41881913 reverse strand)
tctgcagaagattgctcctgaggcttctaaatgtatttgataactggttatgcattttttttccttttaattacatgcagtttatcagtgtgttgatgaggtaagggcttcatctgtcattaaacagtttacaccaagaactccctttgtataagaaattgatgcagaatattagtatggtttgtaaataagttggcattttttgccatataatgtccaattgctatgatgacttgattattcagatgctgatcggtatgatcacttttatcttgcaaatacaaattccaggattcttttagaagtgaaggaggggggaaatgagggaaattagatggatagagaattgaagctctcatgcatgtctgagtttccttcaaaattgaaaggaaaaccccctatctcctctcaaaattaaacttatttacccctaaatttgatcttcttacatccattttgtttgtctgcctaagcatactagggatgctacttagtgactcttgcaattctccaatgtactttcctttggccttctttctaaaagtgtccaagtcacaaattaaaaggatttattttgaaccagaataatttattcaaacaggacagaattatctagaatctaacatttactgcttttttatgcctttttctttttacatttttgcttatagtttgatcctcatatttcaggtat

SEQ ID NO: 23444 - DNA, 980 bp, Glycine max
  Intron number 2 from transcript Glyma11g11970.1 (locus Gly ma11g11970) derived from phytozome v7.0 (chr-ID Gm11; pos 8539757 to 8540736)
gttgctactgcccttgccaaacaggttggtaacaaacgcgtgatatcggatgcttaataagatgtgtcttcttacgaaaaaaaaaatgatgcacgcggaactccagatctagatctgtgatgttgacatcatcgatgttcttaagtatagtgtgtgaagtgaagctactgttatgtaccagagttataaggttgtattgatggtaaaaggagaagggagggagaaaaaagtggtaggttcgattccttttctaacaaaaaaaaactaacaattaacaactcacctttgctgataaaaaatcaactgttatgtgccacaagttaggctggtgccccatgcatttgctattttcttcacatatcttataacacattcgatcccatatatgatttgcatgtgaggacaacatagaattataacatttaacttgaactagttacttggtctctattcttgttttctttttaagttttagtccctgtatcagaaaacagcaagttttagttcttagacaatttttttgtagtggtttatccccaccagaaagtttttgttgcagttttataccattgaaaaattttctctggtgttaacactatggaccaaagctcaacttttattatgcatgtgtagggattaaaacttgtagtttgttcgcatgggaattaaaacctagaatgaggacaactattgggaacatatgaatagtttaacctataacatttactagccggtaatgagccagccagattggttataggaacttaatatccacactacagcttaacattcaatgctgtaatatttaaatatgtggtggtgatgcgatgatttatctattatgatttgatttgactaaaactacatgattgtgtagacttcaatctgcatatccaccactttgtgctttcaggactgatactgctctttcacgagtttgtgtaggacaaagaagaagtacaacatcacatatctgtatt

SEQ ID NO: 23445 - DNA, 986 bp, Glycine max
  Intron number 1 from transcript Glyma12g05570.1 (locus Gly ma12g05570) derived from phytozome v7.0 (chr-ID Gm12; pos 3700053 to 3701038)
tcaagtacactcccttcactctatgtccatcttctagttttatgatattatcacatattcttttacaaattgttgtgcttggatgaatggatcgtttaattctgccaatttttttccctctcaatagatgtcagtatgtgtgtttcaaatgagaaacaacaaggatatctaagagtgtagttataatttatagccctggctattatttcaatattaaacatagagatgtgtagcacaggacgccagatctattaaatgaatctgtttgacatgtatggttatgcttttaatggaccagtcaggaggttgtttaagaaaacttcatagcagatcagtctaaggattgtagaatttgattccataatccttctagttagttaatattgtcttaattcatatgatatttctttatgcttcttgaagcctcaaatttctgatgttttaaagcactaagtttatgaaaagagctaactgattactgatcattaaaattgtctgacatatgtcatataagcttgtgacaggaacatgttagggaatactgtactattttaccaaaacttcattgatctttgattatttctgttgggtatcccaaattgactaatgatatattcatatcatcaaatgatgtgagatctccaacacaccccttcattatgaggacgggatgtctcaagcatgaagtttgcagaactcaacatatgtagttggttcgataacagcctgagtggcccaatgagcggcccagtgatcccaagaataactactactactactaggataggctatgttatctagatttctgttattctaatttcaatttgatctatttaaacatagagttttttgttttgtcttttgaatatttataaatcaagtagagtatatgatgtgatacctgtgttgaacatggatattaaccttctcctatatgtaatgtaactgtaggataagccagctttcatattttgtgttgaggacag

SEQ ID NO: 23446 - DNA, 881 bp, Glycine max
  Intron number 1 from transcript Glyma09g28310.1 (locus Gly ma09g28310) derived from phytozome v7.0 (chr-ID Gm09; pos 35294167 to 35295047 reverse strand)
catacctgggataagccctggaatcatctttacaggtactcatcatcatcatatgtctctaaccagaaattgatgcatatagtttgacactattataggcctattatatcaatcaatctccgggtaacacatatatagctaagttgtataacttgtattaattagctttttcttgtaagttgaacaacttaataatacgtgtttgatgtgctatgaaaatattgtatgtgacacgtatttcaatacaaaatcaaaataaataaacaaacaatacataggcaaaccaatcatgctcttaatagccttgtggagattaattaattaggatcataaacacatgacaacccaaattgtcagcttagctaacattctttttaagatacattcaatttataaaaaaaaaaaaaaaaaagagggaaatataacggatatgtttgaaaatgtcttactaattaattttttttatcatttttttcaccactactaaaaaataatgaacgggtagctaattttttttattaattaattaatgttaattactagtttttgttaaaatattagtggaaatattcgaactcaccatatcttctttccttaaatcctccttctcaactaccaaccaagtggtaactaaatttagtgatttttttttattaaaaaaaactaaatttagtgatagaatatagtttttccttgctaattttgaggtcgtcaagttgtattgacaatttttttaaagaaaattgtttgtgactaattttaatgttaatattttctagtagtatgttgagccctttaattaattgaatgtctttgtttttggaaaatatctatatatccatgtaggtactccacttgaaatcgagttcgcagagaaacct

SEQ ID NO: 23447 - DNA, 761 bp, Glycine max
  Intron number 1 from transcript Glyma12g34310.2 (locus Gly ma12g34310) derived from phytozome v7.0 (chr-ID Gm12; pos 37474085 to 37474845 reverse strand)
aggttaaggtaatttgattcccacacagcaccacataatttatttgttagaattatgcttggtttggtgttttttttttttggtttggtgtcatatataccacatatctgcaattttcagttcatcaatttctatgccctgcctctaatttgcataaattgctatcaaaagggaatcaattaaagggtaaacacacaaattcttctaaattgtttattttcagattcaaaccccactttgagctcacatgatcctcgttttatataaacaatcatagtataattaactaaatcttatctctaatgtaatcttcaataagaatattcataaggggctttaatttacaccaatgaaagtatgaaactactattaattaattataatatttcatagtcgtgccaataattttgatcaatcttcacgcaatatagaactgaattttttaatttacaaaaataattaataaaacttaattacgtgtaaaaaaaatagttagttagaatcataataattttgaatcatataataatttctcttttttttttcttcagataatcttttattctttgtctagtgcattgtgaaatttgcaagtagagtatccacttcctcatctccattctcttttttattcaaattaaaggaaaggattctaagcataatttattgctgaaagtggaatccatatatgttttaacccattttgtctacttctatgtgcattaattatgtggccttcaattcaggaaattgcttccaag

SEQ ID NO: 23448 - DNA, 496 bp, Glycine max
  Intron number 1 from transcript Glyma08g44640.1 (locus Gly ma08g44640) derived from phytozome v7.0 (chr-ID Gm08; pos 44214393 to 44214888)
caccctgacaatcttctgcaaggaaagctagtaagcatacgcggttccttttttaatatcatactctctgttcaccttacatgctactagtaactaaattgtcaaatgagacaaacaaagattggttcacttggtaagacttagattcatttttcttccatttcttctatttcttagcttttgaaaaaataaatcaaataataggaagtaacatttattttctcaaaagtttagtaatagaagaaatgaataggatccaaagcccaactatgtgggttcgaatttcgctgtcgatgtgagaaccttgttggctctggaagcatccaataaagagctcctacaacctaagttatctaaatttttagtcagaaaaaaatagtaagcgggcttattgatgcatatagccaaaattagaatctgctaacacatactttatactatatttactaatcttgatctgcacaacagaggcttccagcagagtttgtaaacaaat

SEQ ID NO: 23449 - DNA, 220 bp, Glycine max
  Intron number 2 from transcript Glyma12g08860.1 (locus Gly ma12g08860) derived from phytozome v7.0 (chr-ID Gm12; pos 6618937 to 6619156)
acgttcgtaaactaaacctaactcatgcattttattcttaacgatttcatcgttttattgtttttagtttgttctgttttgattttctggttaaacgttagtgttgtttgtttgattttttacgtgtgcgattgagaagaaacacctagataatggttctgagagagtgtttattgtatgattaggtctctatcaatcctgagattacttcgaagaaggt

SEQ ID NO: 23450 - DNA, 456 bp, Glycine max
  Intron number 1 from transcript Glyma11g07410.2 (locus Gly ma11g07410) derived from phytozome v7.0 (chr-ID Gm11; pos 5210473 to 5210928 reverse strand)
gattcgtcttttccttgttcaattccatttttcaggtcttggttctttctttttctttaacccctaatttatgtataaaaaaatttatgctttagcattctgcattcgctgaggacgcgttgtctgcaatagtgtcttcgctttgtttttttttttttataaaaaaattaatatttttggggagggtcaggaaaaattaggtttttccttagttttattagtcaaccttgtgagaaattagggtaagccctgtagttaagaatgtgttttgatctgggaattggattagtttgtggcttcaatgcattatgttgtgttaagagcaattgctggtgcctggaaaattgaaagaggtgacgttgtgatacatgggtttattttgccaccctgctgagtggagaattatttggattttgtttaggtgattgaagttttgtggtagaaggaagattgata

SEQ ID NO: 23451 - DNA, 937 bp, Glycine max
  Intron number 1 from transcript Glyma10g41460.2 (locus Gly ma10g41460) derived from phytozome v7.0 (chr-ID Gm10; pos 48523813 to 48524749)
tgcttcgctatttgcccgagactgagcgcattcgggtgtgtgtcactctaattttagaattttgcggcttttttttttgttgacttaatatgtgtttgaaaaataataatagtggactgaaatgaaagggcccagatgggtgttggagtttgaaagccgtggattttttcgttttttgaataaaaaattgattttgatgttgcccttgatcaataaggacgcgtttgtagtgccctgttgtgcccgcattgttgattggtttggggagaattttgggaaaatgttgatgctttttttttaaattagggaaagtaggaatttgaattgtgtttcatttttatctcccttaattgatagctaacaatttggatgattctatatactttttgactgctgaatggggggatgcatgttctgaagatggttatgtctgtttaattaaaaagtgggtctttcaataaagacatggttccaaatcatttatgatgttaatcttgtctgcttagttcttttgaataatgtcaatcttatctttcattggcatgctttttggtcgctcggaacttggaagtacttgcttgtgcctattttgaaaatgatacatctgctatgtatgttagtgggttttatggaagcttagtattctcaagtgtagtagtctgaatgatatggattgctgtctgcaattgttgtagaaaaatgtcataacatgtgttatttggttactggtattaaaaattacttgttaacctaaaaaggtgtgataagtgagcacagtgatcattgtattgttgatagcaagttttacttagtatgacagtggatatgtgtttattttctttttcgtttggttttgttggtcactcttttgagttttagttattctatgttggattgaacagattcaaaaacacaaggaatacaggcacaggatcat

SEQ ID NO: 23452 - DNA, 674 bp, Glycine max
  Intron number 1 from transcript Glyma12g02440.1 (locus Gly ma12g02440) derived from phytozome v7.0 (chr-ID Gm12; pos 1555567 to 1556240 reverse strand)
ctgagctcaaagaagagctcaattcgcagtacaaggtttttttttttcccattctccagatccatacacttttttcttttcctttcgtttctcgatctcatttttggatgcttcgcccgatccttcgcactgcattttcgtttcctttcattttgagctttaaatatcagagaattcgccaatacgtaaacagtgactgaatgaataagattgaatattccgatttatacaaatgtgcattgatattttatatttagccgtcttcgtttatgttttaattttaaattatgatccccgtggattttgtgtcttaacttttataacttccactatgctatgatattcacttaattaacctatgcatccctttgctatgttcatgttttccttttacgatttttattgttagcgtatgtgaattttgtatcattctatcaattgtcatcaccgagcacgcgattgggtattatattacatcactgtattggtaagatttgttgatgttctgattaacagctgatcacaatgggatttctgtttcactgttttgaattggtggacatgttttattggaagtctttgtctctctattgttgccatagttgaaaattgcatgtaaggaggcatgggaattttacttctcctttttcatgttttgtaggataaaagaaaag

SEQ ID NO: 23453 - DNA, 766 bp, Glycine max
  Intron number 1 from transcript Glyma08g43630.1 (locus Gly ma08g43630) derived from phytozome v7.0 (chr-ID Gm08; pos 43409783 to 43410548)
agctggaccaccaagtggctggaaaacattgcaaggtgtgttccttattctgcttccatttagtcttctaatgtttccttgatcctcatttgtcttcctattagctagttttgtgcggttgctgagactcatggctgggaggaaattgggtatttgatattctctcgagttagagactttgagtcttattttaatgaattacttattatgtcaaccttttttagtttgatttatgttagtagtgtttcagcaattgtcacagcaatgaatagtcatcaatttttctatctcaaagaaaataagaagtaaaccatgttattatatggagtcaagaataaaccgtgtatgcattcacagtgtaaaagatttttactttggtatccaatcacatgtatgttaaatttgttgtcttttacaatagcaatcttaaaagtcattcctaccataaatttttatcggttgataatataaaaaaattacactgatagtgcaaggaaattaaactcttgaatcaatcaataggtataactaactgctggttttgttgtgattgataatgctaactaactgctcaatgtgttttcatctctttgttcatcataaacaaatgcaagaaattcagccttgtgtatgaacatgaataaataaatgcataccaacttttgtctcacttattgacatcatgcgaattcagaaatcaggaccatatttgtttaatagcaattcctcacatgcttgtctggtgagctatgcaggatctccacca

SEQ ID NO: 23454 - DNA, 581 bp, Glycine max
  Intron number 2 from transcript Glyma08g43630.1 (locus Gly ma08g43630) derived from phytozome v7.0 (chr-ID Gm08; pos 43410826 to 43411406)
tctctggtgagttcaatctatctcaagacctgaacattttgatttcttgtttggatgatgtttaaatctttttatatcaaataaataagatatttccaaagataagaaggtggggtcagtgatgacatttattacttaaacgtggaactagaaggaaaacatctatccctgaattggttggcaccatgggtttatttggcccttgacattacaaaaaaggaaatttagtccctgactttagcaactatcaattaattttgttcttgacattataaaaaactgaaaattaatttagtctttactattgcagttattagtcaatttgtttcctaacattaaggaatcaaattaactaatatttgtctaattcaaggactaattgactgatttgatagtgttaagaaccaaattgacttattcatatggaactagttcttggttctttcctttgatcataacatctcagaagtggaaaacttgttccagtgtccttgcccctttttgatttgtatatgggcacttacaattttcttgttactggaacagttgtccagggagtgtactctcggactaataagttt

SEQ ID NO: 23455 - DNA, 494 bp, Glycine max
  Intron number 1 from transcript Glyma12g37080.1 (locus Gly ma12g37080) derived from phytozome v7.0 (chr-ID Gm12; pos 40068774 to 40069267 reverse strand)
atcgcttcctccaagaatacaggttttgttctgcttctgttcttttgtccaagtttttcctgttctgtcactcgctaagaataatgggttgtttcttgaatttgaagggtttttattttgtgggtcggttttgtttttgcccaaggtcgtgggggatggatgaattttgaatcttttcgtggattttttggtggggttctttgtgttgttttgtagagaacaattgtccaaaacttgtatttggttgtttattatctatgttgttgaatacaatttggttgataattgttgtgtatttgaggttttataggaacgttttatagcgagttaatgcttaagagtctattgcccctcttgtttttgaccggttcattctgaatttgcttggaaagtggaggttatgaggaagcaaaattcggcatgcgtgtgtgcgttaattatacttgttcttaattgaatcatttttctgtgataggaagaagaggctggctgag

SEQ ID NO: 23456 - DNA, 712 bp, Glycine max
  Intron number 1 from transcript Glyma10g11620.1 (locus Gly ma10g11620) derived from phytozome v7.0 (chr-ID Gm10; pos 11818238 to 11818949 reverse strand)
agcttttgctgctcttcagcctagagtacctgaaggtaatggtcacatcttggaccctttcattttttatttcttttggtaatcatgttaaagacacaaagttgcccctgctgaaagtagtgacaaatctttgctggggactttgagtgcaaagaaggtggatatgttccttccgacatgatttatttcctaaactcaagaattaatcaggattcgaatcctgaaccacttagttaagaaacatgctaccattcggaatttatatacataagaatgtgaaaatgaaaaaaaaaaaaagaaacttgatctgttgttatgagttgagtttaatgcccactttgcctatgtttacttcaaactcttgttctgcattgtccactcttactctgatttgcttgctgcaatggctctacggttggtttactttcttgtacattttttgtgggtaacctttagatctgcccattatgttgagatttagctcctttgagcaactttctgtagtgaaaaagtaaaagcacattaccaaagttaatgagatgctttacctaattcaaatgagaagtgaatataataacatactatcacattttacacatgggatctgattatgtgcacttaataaaactgattctgaagttgttgtgtttttttcttctttcttctgtgtgcgtttgattgcaattttttaactgcacagcttacctccaaa

SEQ ID NO: 23457 - DNA, 411 bp, Glycine max
  Intron number 1 from transcript Glyma11g14940.1 (locus Gly ma11g14940) derived from phytozome v7.0 (chr-ID Gm11; pos 10683458 to 10683868 reverse strand)
gttcgttctttgttctttcctttctcaacacacattcatgcaaattatatacattcattttgttttttaatgtttataccttcatcgatctcttactttcttgcttttgggtaatcaccaagtcgcctcttcatgcaagtgtgcttggtatgtgtgttagctaataaaactaaaatatctcagaaaatcaagatttttgttttaacaaagatcactgatattttaatgttcaagctaagtaacaaaaaatatttaaggccataaatgtacttttaagctcaaattcaaaactaattaagccagaacaactatgtaacaattgatctacgtatttcctggtccttttcatttcataagaaacaactcaaatcatcttagaagtcactgtctcctcatttgcgtagcccaatc

SEQ ID NO: 23458 - DNA, 763 bp, Glycine max
  Intron number 1 from transcript Glyma10g06830.1 (locus Gly ma10g06830) derived from phytozome v7.0 (chr-ID Gm10; pos 5584705 to 5585467)
tctactcttttattttttaaccattaaatatacaagtaactgacttttgatttttcacgtatgcgttacctttttcaatcatcgagataagaatgatgcattcctcgcgcgcaatgggcactgtccattgacctggataaaacaagttcacgagtgctagaattcaagctattttacttttagtttgttatccattaatttctaccataggaaaaaaaaattacaaacacttctaaagttcatattgaaaattataggtgaaaatattttttttaatatacgttaatgttttatgaaaaataatctttttgaatgggatttgagttataaatttgcttttaaaattttgaatatattcttaaataaatttgtagggtcttctggactcctactactcattttgttaataattcacttttcttacaagaaaatttataataaatacatgtgcattttttaattttaagaggagtgttaacaaacatcccctttaacgtttttacatttttctaatacatactctctcatttgttaaattttactaatttgaaaatgagaatgggcaaataaaaaataagaacatattattgagattcacatgaacttaaagttcaaataaaaacgagtacgttgaaaaaaaatgtaatagatagtgtgatactttgatataaaaaatatgattttgcattgtgtccataagtaactgaagatgttggttttgcaagcagtggctcagggagccacagttactttcacaaacaat

SEQ ID NO: 23459 - DNA, 872 bp, Glycine max
  Intron number 4 from transcript Glyma08g45830.1 (locus Gly ma08g45830) derived from phytozome v7.0 (chr-ID Gm08; pos 45099986 to 45100857)
gaggccgggtatgccatgctaattagactttaatatcttagtatatgatttttatttagttattgtaaaaatctaaaatattatcctatatatataatactttatgattaggtgtaaagactataatttaatatatataatttcctcttgattattttaagaaaaaatataataatttatccgtgttgttttttttatctcgttttaattctattttctttgttctttttccttttcactcctatccatcctattttaggatgcacaatcactagtgttattttaatttcatatttttttaaaaaagaagtgaagggcctgaaaagaacatgaaattatcaaagtacgtggtcaggaaacgaaattcaacatcataatcatacctgtcgtggggttagaccgtgagtgttaaagcaattttgcctttatctctgattcctccatggatggttggtcccactctataatggggcctcctgagttctaattattaaatgacctccatgatccacgcgtcacagagcgtgtgaaattattaacacgggcgctcgctggtaataacaagttctttttttcatgtgcactaaagactgatgcaacattagacaaaccaaagtattgaaatttttattaaatgaagtaactttgttatatgagaattcatgggtagagagacacgtagcctcaaataggactttatgtaaagcaagaaaataattgttttggttcttaaattgatgtgtttttgacatttcaggcaaatgtggttgaccagcatgaaaaagaaacgaaattaaagaattggatcagtgatgatgtggatagtgaatcacccagcccaactccactgccaaggccaacttcaaaacccg

SEQ ID NO: 23460 - DNA, 811 bp, Glycine max
  Intron number 1 from transcript Glyma12g08900.1 (locus Gly ma12g08900) derived from phytozome v7.0 (chr-ID Gm12; pos 6656658 to 6657468)
ccaccgtctggctcgcttgggacactctcaattcggtgccgccatttttcaacacttttctgttttgtctttttttatcgacaaatgttattttgttagttttgttagaattgtccgttggagttggtggattcgaacccgtgacttcttttcctcccttctcctttcacccttccccaaccactgcgttaaccttatatttccttttttttttcttcgtcttttcgctctataattgcctacattattatgcattgttaatgattttttttcggtccctcaccgtattaaattgttaattccttgagaactccgttgagtttagttggttccctgttttcattttcaggttacatttttcaagtaatagttacgaaaatgttccattgtttatgttccgtccggtgttttagttgcggaggaagggtgagaactgataacagactttgcaaaaccttcgacataggaaacaagatgaaaattgtgggacgcttttgtttttagagtttaatttctatgcagtgttgatgtaaaaagttttgcataggtacagcattttaggttgttcgttctaaaactcaacactcttactgtatttgactagttgtgattggatgcttttacactgtcaatgcatggactaattactcttgttttttatcagtaaaaacacgtcaactgaaaatgaaaatgtgacacaaattaacaaaccaaacatccaccatgtttcacttgttactgtttttagattttaaactttgaagtttgtacacacttaataaagggaaaactttttcttgtttgcagcatt

SEQ ID NO: 23461 - DNA, 442 bp, Glycine max
  Intron number 3 from transcript Glyma11g07120.1 (locus Gly ma11g07120) derived from phytozome v7.0 (chr-ID Gm11; pos 5001975 to 5002416)
tcgtttaggggcgacaagtctcaacatataacgttgtgatcaccaccaccgtcgtgaaaaataatatgattttgaatttgcaatagatgacatgtggtggatcataaaattttgagatttaagaagaacaagaaatactattagggttttggatttgcaaaggaagaaggagaaggaagaagaagagagtgagaaagatgaaaaagaaaaaaaaaacccacattttatgataatttttagtcgttaatatctttatttcattgatatttaaatagacggaataagcattttgaatcaattttaaaaaataaaggataaaaatgaattttctaaaaataaaaaatcaaattaaacttttaaaaaataagaaataaataaatcatttgaacataaaaaaaataaaaaatatcaagggagttatctaaaaaaatagaatccccat

SEQ ID NO: 23462 - DNA, 614 bp, Glycine max
  Intron number 1 from transcript Glyma10g31750.2 (locus Gly ma10g31750) derived from phytozome v7.0 (chr-ID Gm10; pos 40239191 to 40239804)
ctgctctcttgttgaggcttgtcactaacaacgtatgtatatgtgctacaatatcaaatcccacctttccctctctattactctctttctcattagagatattattagatgattcaggacatagtctcattgtagttaaattttttataaaattgaattttttgtttatatgaaccatggtcaagaacatagacgctgctagtttgagattatgtaccaatagtatagatatgatgatgactctgcgcctgtgccttcaactaattataaattctgatagccaataaaaaagaaaatgaaaaaaaaaaaagatctttgatacattcagtaaaaggaaagaattaattttgaagttacttaaattcaatttaaggttatgactgattataaataattatcttcggattgattggctttatgtaaattaaggaacagcatctcgtgtgtgtgtaatactgtattttgacaaaatttatattgataaaaaaaagaaagctatacttgagcttaatttgtttatggaaactgaaaatatgagaaatcagagtacagtgactatattgtggttgcatgtaacagagaccacaggggttcagtgtgtcaatcgggcttgg

SEQ ID NO: 23463 - DNA, 955 bp, Glycine max
  Intron number 1 from transcript Glyma10g10150.1 (locus Gly ma10g10150) derived from phytozome v7.0 (chr-ID Gm10; pos 9753976 to 9754930 reverse strand)
cgaaggtatgggggagggatgttgtacgcagccttacccttgcatatgcaaagaggctgtttccggattcgaatatgcaattaaaatgttattataagtattactttttcatttcactttttagataaattattctaaaatatatctggagaagaaaaataataggacataaacaatcatttgaaatgtaaagttaaagtttctgttgttgtttgttgtctgtttttagtagttacaagtttgtctttaattttgaattttttaatactgcgtatttatgcaagtttataataaattatttaatccatatctaaactcagtgtagtggtcatatctaaacaatttttagggattgactctatgtactattatatgggattgataactatgtatagatcctaaagaatagtgagagacagtgcttcaattttatggtatttggtcagagtcactggttttaaaaaacaccttaaattactgtatatttgccatctatgttctcaatgtaactaaaggccaatttcagaactctgaaaacccagaatacaattggtacaagataaaaccttgtttagattatgcaccatcacattcttggttgtgtcaatagtatcccattcttagtggaaaaaaaaatctttttgtagccttgtaggtgtattttcataaggtgaacttaaggtgaaacaacattttgaaatttgaacctatattatctatatttgtgaagaagtggcaataaaaggattaaatattacaaaaaatagatttctgaaattttgattttatctcttgatatcccaaggttcttagcattgaaaagaaggcaatgatgtatatgaaaatttctctgtactttttttttttgttattcttttagatcatgtagcaggataatttacagtttctttcttggttagtttgaattccgacagagttgttgcactgaagtacc

SEQ ID NO: 23464 - DNA, 982 bp, Glycine max
  Intron number 3 from transcript Glyma10g36940.2 (locus Gly ma10g36940) derived from phytozome v7.0 (chr-ID Gm10; pos 44964293 to 44965274 reverse strand)
gctgacataccacctcttccttggccttagccctggtaagtttcatgctgttgacacctataacatatatggatttatctaataatcttgttttgtgattttttttattgtataatttatgtacttatggcatttgatatgtgttgacttttccccccttgtcaatccaggttgaggtcatctttgaatgtagaatttatttatgtttccttgattttcaattctgctaaattgaatacattgttcatttctttttttggattggtaaaaagtgatggaatcaagtggttgttttcttgtattgataggcctatgacgttggaatgcaaatctactcaataaatgcaacctttgttacaataaactagatcttactaactgcttccaagtgacagtgggaattgcctgcccgaattaaatttttattgaaactgagttcttatttgtgcaatttagatatctggcaagtgtcacatatgatggtcaaattctttgctgtggcccacgtatgagtttcttctgcttatttattgaagtttatgataataactaaggtttaccaagttactcaaggattgggtgttgatgccgcttcatgcttaattgcttacttttattgtttacaaatggtcatataatccatttaaatattcaaccttgctgactaggtgtatttattttttctttttgcttgttcacttcgctaatgttttagtggtgggtgatgcatgtctatggtttaggttcactataattatgagcaaatagttcatgctttgtggtctatcctacttaatgtattggttcaattattgctatgttatcataagtaattccttattttgagttgacaattgtgttgatgttactatatgctgtataattatgcatctggcaattttatgttcctgtcagtcattgtctttgggacctgttttggactcataagtcagttctgctcctgcagccttgcttgttgaaa

SEQ ID NO: 23465 - DNA, 522 bp, Glycine max
  Intron number 2 from transcript Glyma11g05820.1 (locus Gly ma11g05820) derived from phytozome v7.0 (chr-ID Gm11; pos 4112411 to 4112932)
tgaggtacattgtgttctcattttcatatcatggtgtgcgctagttttactccaaaatttcttcaataacaagatatatataagatcatcgtagtagttgaatagtagattgaatggaaaaaaaatagcaacagatagattacaattgtctggaatgtgctaccttgataagatagataggtctgctaaacaaaattgcatttctttttggaaatgttagcaacactttctctaagacttttcgtttgacacattctgttttattgagtgaagccactaaatagtaaattagtctcattccacatttattggatacagagaatcgaggaactgtgttattggacaattttattagctgtttcttttataaatagcatggagccaagtttaaggctaaaataatatagttcacgatctagtttacatgctctggcgcaaagtttgatgctgctggcttttttctagtagattctctcttcacaacaaagtttcaattttgataatgattgattaaatcatagg

SEQ ID NO: 23466 - DNA, 1008 bp, Glycine max
  Intron number 1 from transcript Glyma12g12540.1 (locus Gly ma12g12540) derived from phytozome v7.0 (chr-ID Gm12; pos 10768480 to 10769487 reverse strand)
ttcttccttgtacggctccatcacaaagctcgcaggttccaaccccacttcgttttcttgcttagttctaagtcacggaataatggttgcattcaaaatttcaaatttcgtctttccaatgttaaattttatgcaggcgttgtaaattaagttatgcccataacctgtttgatgaaatttcccaattaaaaagatgaaagctcttttactacttgggaagatgataataatgcggtcttatatgtagctctcatcaacctcagataggctgtttttggttctgaagaaagggaaatagagtagatagaaatggaagagaaataatttgaaaaaagagaaatagagtacaaataaaattgaatgttagagttgttttgttatgattaacccgtgggtccacaaagttcaaaattaactctctaatttctctctcatgccaaacaaccgcaccttatttccgtctttgcaaaagcattttcgtctttcgtaccaaatacagccatagtgagaagtgttttgaaaatcggacaaaccatatctggttggactgaaaaactgttgaaccaatatagtgtctagtctaaataaatcacaaaaacagcattgaggataattggtcaaagaattggaaaactaactaaacaccggtttatagcgggtcaatgaaaactactttatacaacttccatttgattttttttttttaagaaaatgaaaaagttaacttgatgctgttgatgaacatttttatattagtatatggttgaaacttagacttagtattatgatatatttgatttgaaattttgtatgtaatttaaatgttaaaacttacaaaataatgtttttttttatagtttttaagactataaaataatgatagtaagtatgctttaactggttcaatgaccagtttaattttagaaacgttaattgtattgaatcttcaattttttggttactcataacatgggtatgccataatttggtcttgatagtgaaggagca

SEQ ID NO: 23467 - DNA, 981 bp, Glycine max
  Intron number 2 from transcript Glyma10g42590.1 (locus Gly ma10g42590) derived from phytozome v7.0 (chr-ID Gm10; pos 49503793 to 49504773)
ataagcgtatccgtacatcagttgctgagacacgggtttgtagccagtgtttttaattaaccattgcatttcctgtagcaacactgtgattctatgacatttcaattacttattattgcattttttattgtaaaccttattaggagaatagaattccaattgtatcaaacagtaaaatagaattgttctggtgcagaggagttaaatttgggtaaggtatagcatggtgataatcttctcttgattctggtacaaatataaatatttttctttcatgcatgtgtttctctgaagatttagatgacacactatggtaattgacctgaatggaggactgggatatttaatgttgcaaccttatcagtcattttaattttaataaggatccatatggctgaattttaatggttttggttgaggattggccaagttagatatctcatattttcaataatcactatttaagaaggaagcacaagcaaaggaggaaccaaggtagaggggattgtgtctccagaagaggttaacaactgaccaacaccaagcattaaaacctgtatgtataacaaggctgtaaaggaacataaatggagaaattttacaatcaagaagcaagagtttctctgcttgcagaaatactaacagatatactcttatttttaatcctacctctgctgtcaatatatttgttgtaaatatcttgaggaacttgacttaaaatattttgtattgcatgtgtaacttgttgaaggccatctcttattgtaaacaatcattgataactaattgttgctatgtttttcttctcttggatactgactatgccatgttctttttatttagtttttacctaaatcctaatagctacatattcttctgccttatcataacttcatttttttcaacattcatatttactctatttgttttgttggaaaaacactaggccgaaggactaagtaatagctttgcaaggcagcc

SEQ ID NO: 23468 - DNA, 503 bp, Glycine max
  Intron number 1 from transcript Glyma12g01000.2 (locus Gly ma12g01000) derived from phytozome v7.0 (chr-ID Gm12; pos 549343 to 549845)
ccccccagcaggtacctacccttttcttctttatatcttatctgggtttcccttaattttttattctgtttttctgtcaatataactctagagttgagagggaagtgatgaatgatgctttgttgcttagtgaatcaagttctgtattctgctagatccacttcttgtcattaaccaatgggcaaaacttggatgtagttctatacatgattttgtgctcatcttgaataataattggagtttcactttgatagtctgagttgatgtttaatagaaatctttattatcactatattatccaagtgaaatttcaattccgatagcagcatggcaccaaaaacaccaatagagctacatccaagttttgtgcttaaccaattctctttttaagttcaacatttttgctttttttcactctttaggaatttcccttttttttatttgaatcaatgggtgatctgcatttaggttcatataacgcaaggtgacctagtggggaaagc

SEQ ID NO: 23469 - DNA, 984 bp, Glycine max
  Intron number 2 from transcript Glyma10g35890.2 (locus Gly ma10g35890) derived from phytozome v7.0 (chr-ID Gm10; pos 44096833 to 44097816 reverse strand)
atcaggtgaattcctcaaactatactgaaatgtcatattccaattttaggggtgtgtacaatttttttgaaaaatgcaatgtatggaaactgaatggtctagagctatgatgaactaagttgcccttaacatgcttctttattactgtaatttgaaaataatgacactctagagtacttgaaattgaattctagtacatttgcgcatgtgtgacaagtttacatttaattgcgtggtattcgtttaatttaaaaccactaaaagctctttgattattgacaagttttcagaggcattttgaacctgaaacatcgtacaatttacagattgctgcaaattttacaggacgtatgatatgtgataacttaacatgatagcctatgtttaggcttcataattacccaaatgcttgaatgtaatgaatctaatagtactacaacaaatataaacagatgctctatcatatatttgactgaacgtttaagatggaaatattctgaaagcccctttattcctgaagattaacagaaatgaatgttgtagttgttgaatgtttcattaagtatggcaattcatttttttaacatacaacctagctccccttcacattttggaaatgacaatgtttagatgaatgctagtgaaaaatctatctgaagtattaaaagatagtattaagtattaactgccaacagcttttggcaccattaggcattggttctcaatagccataatctcctggcggtctcagctatttttagcacttgaacttatagttacttttcatatccctttgtctaaacatgcataatcaattgtttctgcgcttttatagttgttgattaagaggagaaactcaggttttgtgttaatggagcccccggcaaaccgtcgtgggggtcttctaagaaagagtatgatatttattatttaaataatctttttctaggtttttgttcgtgattttgtgcccagtgctctagc

SEQ ID NO: 23470 - DNA, 617 bp, Glycine max
  Intron number 1 from transcript Glyma10g35890.2 (locus Gly ma10g35890) derived from phytozome v7.0 (chr-ID Gm10; pos 44098201 to 44098817 reverse strand)
ggacactctcttcccccgtcgccgtcctccttcaggttctctccccgttttacatctcagctaccgtttatttccctttcgtcttctcagatctgtctctttttctgtgcaacgatcaattgcgctcattcctgcgtcgcagctgaatttaactttcatgcgtgatttgtttttttctctcgccttttttgtcttgtttgatttgcgtgataatggtgattttcccccttggatcttgatctgttgcttgttttcctttaatgcgccatttatcatttggttattgtgttcgattggattgtcggagtcgaaggtgatgtttcgtgttgccgaaaatgtgctgagatgtatttattttattttattttccactcttctcctggagcgtaatattttcgaaaggttacgtatataatagtttataatcattttgactgtgactcgtgattgtgctttgcgtttctgattcagtcattggttttatgctcttttattagttattttttctgattttttttaatacatgtttgtttctgttttgcatttgaccttggctcatattgttgttttgtctgtagatagtatctatttttgatataatcgttccgttattagag

SEQ ID NO: 23471 - DNA, 878 bp, Glycine max
  Intron number 1 from transcript Glyma12g03210.1 (locus Gly ma12g03210) derived from phytozome v7.0 (chr-ID Gm12; pos 2109039 to 2109916 reverse strand)
actctcactctcactctcactctctcagctcaggtactctctctctctctctgttttaatatatactattcagatcagaaattgtggatttacgctctcgatctttcatactttatcatgtgtctccttgttctgcatttttgtttctctctcaacgcttttctatagcatgtttactgtttttctttatgttcgtactcgctgattgcttcacccgatttggttaaaatctgttttcagttttcgtttttcactctgtctttttctcgaaaaccaaaccgacgagccgtacctttgtttttttagtcaatgtgagttccattttcatgctctactcgcgtttccgtagcgtatgatctcagatctttgttaaccactgctggattttggtggatttttcgattattggccgtttcatgcacatgcagcaacctctgttttgattaggacttctgtggaagcagtttttgcatcatcaatttgttgctgcttttctttgctgactaatgtggttgatgcggccacaattgtggtagcagacacttaaaaaaccatgacgttgcacccaaaattacggttgctgaccgtgttttaaaaccttggttgtggcgtttgcattatcataattatttattgataactttatagagcaaggatcctagttcttagtgctgaggactttgtcttaattttgtgtttgtttccctgttttctgacttgatattaatttgtgctactgaatcaattgttattgtctttgtctttgttctactagaattgtagtttttattatttttttgttgtgtgtgtgtgcgcgtttgtagataactgttgattttaaatctttcatgctatagcaggagtgtataatctgagcg

SEQ ID NO: 23472 - DNA, 886 bp, Glycine max
  Intron number 1 from transcript Glyma11g20460.1 (locus Gly ma11g20460) derived from phytozome v7.0 (chr-ID Gm11; pos 17264987 to 17265872)
tttaccttctcaactggtgaagatcttcaccttaggtttgtcaatttctacacttttgcatcatgtttacatttttttttttaccattttatgaagttcttttttttatattattttatttggtaaaaagcgatctgcctggctgtgaaatttttttgaacgttgaccatacaagtcaaacaatcatgatttgactaagccaaaagaggatctggtagtgctcaactagagttagtgacattaggttcagtaacactaataagtagtacaagttgcaataacatatcaaaaaaagttcaagttgcaataaacttcagaattggaaatatactggttttcgtgtgttaaacaaagtaaatatgcctcttattacaatatgtgcataccaaataccagttttactgttcatatgtgtaaaaactaaatgtttcgttttttacagccaaacaattcttttgactttgagacaactttttacgaccttggtaaaggatgttttcttgtattgcaatcctatctcataggaaaccgttaaggtagaaaattattgttgtaaattaaaattaggttgaaatcctaaagaggtaacaagcacgcaaagaaccaaagtggtataaaatctgcttttaaggatgtattcagttttattttcatatgaaggtcaaattatcttttgatctcatttgtcctaccaaagataagaaaatcatttgtcacttgtttttctttaattcaaagttttgatcccgtgaattaatcaacaagccaccccagttcagtggctagcattttccctggcaccacttttatgttactgtattattatacttgctgaaaattctttgtttatttttttattgcagctatcagcttcagaaatacaaaa

SEQ ID NO: 23473 - DNA, 679 bp, Glycine max
  Intron number 1 from transcript Glyma10g29030.2 (locus Gly ma10g29030) derived from phytozome v7.0 (chr-ID Gm10; pos 37940660 to 37941338)
caggcgctaccaatccgctcttcaatctcgatcaggttcgccttctctactttccccccaattcaattcatttttcaccttttcttcgttttctccttctcctattcaggatgaggttcctgtgacaaaaaaaaaagcattttttttacaacttgcgagggtgtgggggttggattttatgtttcgatgtatataaagggggtaaaataagggacctaacgtgaaattttgattttccggaaaattgttcagcggatggttattattattattattgttgttgttgttgatgatgatgatggtagtggtggtggtgatttttatggttatttgatgtgtttggattattgatactgggcatggaaatgggaattttatgaaatcagaagcataattataatgatattctctaaaaagcgcagctcaaactgcttttttggtgcctcgttttctatgcacgggattattaattattaatattatgatggcaatgataattggggggtttgtgatgtgtgaagatcttggttagctatgtaacctgggattagaatttatcttagtgattttaaattgtgtggatttgctgaagagggcctttttggcccccttgggtttgttctggttctggtgtttgtttattttcaaatatctaatattgattttcgtgaatttagac

SEQ ID NO: 23474 - DNA, 963 bp, Glycine max
  Intron number 1 from transcript Glyma11g30020.1 (locus Gly ma11g30020) derived from phytozome v7.0 (chr-ID Gm11; pos 30918785 to 30919747 reverse strand)
agaactggcacctattgtctagcaaagtatactttgtaagtatcataatatcttaacttagtttgtagatacagatgaaatatttttcttagttatggggtggttgtccttgtcatttctttatatgcagattcaattgtagtataaatatgtctgcaatactttgttttgtggttggttaggaaatcatgctatttacttcggtttcatatagaggatcatggttatgatagcattggtgtattttgccatcttcttgctcagtcctgcccttactacctttatatcattttgtgccttttctttcagcagtacttcacagcgtttcactctctgcgtaatcaatgatttggtttgtgtctgctatgcacctatattataattaccttttcaagttcatttgattttaataaagtgaagtggttttacttttggaaaaaccaaaggttcaggatcctaatactatttagtgtaaatggagaagatgtggtggtggtagtggatgtgataacatgtagcttgctttttgcatccaaaatgcagcgacttttatcaaatatgaatttgtgttctattatttcaatttccttcatgtttcttttgttttggtcatatgatcctgcatcatcatttctaacattttgtttggagaaataaataattctgtcctcatgtgtaccttcagaagatcaagtttattttttactgcaactcagtgaacttagttagctagtccttccaaaaaggtttctgtttcttttctctccaccttagtgtgatgtgatcaggttagaagtgagaaacatgcaagtatctttgcttaagttgggttgccacctggtctagaagaatgtatagtaattcttttgtcgtgcctgcatctcttggatgttcatggtttgatttttgtatgttgattgcatgtcaagttctcactacttcctctgttttgattgctaggtt

SEQ ID NO: 23475 - DNA, 538 bp, Glycine max
  Intron number 1 from transcript Glyma10g42530.1 (locus Gly ma10g42530) derived from phytozome v7.0 (chr-ID Gm10; pos 49453257 to 49453794 reverse strand)
gtgagtttgggaaacatgatttacagaggaaagaaaaagttgagagaaaatagcatagtataataggaagaagttttatttttcaattatacttcttcatttctttctttttttctcttaattcaaataaactacaaaactatacatattttgttccatctctttccattttacttattaattttttatttttaactaaaacaaacattcatattatttttaattttgatttattcaaaatataaaaattatcaacaataattttaaaatattctcaatgaaagatataagaatttataatttcgatctccttcatataaaattaaattgaaaaaaaaacaaaggaagtatgttgttgagatttgtcatttgagggagaaaaaggtaaaatccagtataattgtttcccgccaaagaataaaaaaaaactaatttttagggttcccgctctgttcctttttccgcgctctctcttcatatcaaagtgtagtgacgcgtcacagacactctgtcaaactacgcaaacgcaaagggtttc

SEQ ID NO: 23476 - DNA, 891 bp, Glycine max
  Intron number 1 from transcript Glyma09g08550.2 (locus Gly ma09g08550) derived from phytozome v7.0 (chr-ID Gm09; pos 7850769 to 7851659 reverse strand)
ccccttccttttttgcgttcattctgttttcataggtattctttttacttcctctgttctttcctctgttttctgttctgttttttttttccctctgttcctttgttattagttactatcattctgttcatttctcgttcccttattactttgccacattagcttctgctctgcaacactaagatctagcacaatctctgtgttgcaaccattggatcagagtctgagacatgatcctgggtttctagttcttagttttgaattctagttcggttttggggtgctgtctttgttagtttttggctcattttcattggaattaccattctgcacttcatacttggtttctggaactgggaagaccgttctgaggttttgtgggaatgcccttttttaaattaaattgaattaaattataaacaaatgaaaacaaaataaagataagaatacaaaaaaataattttgattttgtctgccgactggccttgaactaagatcttctttgttggtttctcatttttatggttatgttttggatgcatgctgtttctggggtttaagaggtttttgatcctgcaatgatcaatttaaaaattttaaattgaagttcaagcatttgttagtgattgtagttcaaataaggtacatgatttgtgatcaatgtttatttttttggacctgtggttggtgagagggggtacttactggtaggccttggaatccaatactgtcttctagaaagattaaaaaaattccacattgttttggttttggtttttgacttttggtgactaagccttatcctttttatggtgacttgttgcatacagttctaatcagtttttcttaggcttcttttttctcttgttgcagtgacgaacttctgaagaa

SEQ ID NO: 23477 - DNA, 916 bp, Glycine max
  Intron number 1 from transcript Glyma10g27610.1 (locus Gly ma10g27610) derived from phytozome v7.0 (chr-ID Gm10; pos 36283225 to 36284140 reverse strand)
agcttagaggcaaagcaattgcactacactcccaggtgaaatttgatgttctttgtcaatagtttgttgctgccttgttggtggtgtttgtcactcttttgcttgatttgagaattttgtttgtggggtggtggcaattttagcttggaaccatgtttcactttgtgtcattaaaatttttattattattgaaaaacgtgtgttatttttttagtatttttgttagcctagggatttgaaccctctctctcctgtgtcattaatttgtgaattgggcttgttgtgttacgtgtgtggtttatctgtttcaagattggttacattgaaggattccggaatctgttgaaacacaattaaagggatatggatttgaaaaacactgacagtgacaagtggttaaaaataagagagattggagaagaaatgaatttggatccattttccccttgatttccattccccaccttaactcttcttttatgtttatctggtttgaggtttgttaagcattgttggtggattttgaaattataaaaatgaatcgaactcaaggaaattggactacagtttttatgtagtccatatcttgaatgaccaatttgcaaaacattaacatgttaaggggttctaacttctgagacaaaggaggggccaattagaaacactaataatatgttcataattaccatttgtcaccacaaattaccccaaaaaaagggcattcaagatttaatttgaggtaaaagaaaaagaaattgagaattttgttcaagcaactgattgaagatgttgtttgctattactagtattttgtatgagtaacattgatgtaagcatgaaacatgttttttgtgctgaactttcacattttgaaatgctaggtgatcacggaattctgcaaatcaataggagcaga

SEQ ID NO: 23478 - DNA, 804 bp, Glycine max
  Intron number 1 from transcript Glyma10g29870.1 (locus Gly ma10g29870) derived from phytozome v7.0 (chr-ID Gm10; pos 38629360 to 38630163)
accgcaaagaccaggtagcattttgcgtcagtgctattcttcagttgttgccttctgaaattgcgatttgtgtgaatgctgataaaaaaatgacaagtcaaacgtgcgtgagttttgatcgttgaggaaaatttagtgccgcaaaaacttgccaatgctcggttgtctttatgtaaataactattattgttgctgagatactgtcccaaatctcacggaatgaaccgtttattgcgtttttttgtgttttgcctctaacattttaattgcatttattctggattattgagtgaagttaagaacttaatccacatggctatgtttcaaatttttttagtacgcgattctaatggttttgtatgggcgaagtaaaagaggcatggaatgttctgactaacaatagcgatttgtgtaactccaaaaaattaaagagatattggtttgtttattttatttttcatgattgcagaccagaattaatttgagactggtttgtttgatgatgtagttaaacaaatactaataggccttgtaagtgtggatatggtagaactggaatatagaaaaaggcattatatacgtgttagtttttagaagcattcattgtggtctggtgctaccaaataatttacggatcccaatttgtagcgatagaattgtattttgatcaacactatgctttggcaaacttcataattgcttttcagctgtaaacttatcacttatgaacaaaggagtcagggttattcacctctttattgtcaagcaggtgctttgggcttgttttgatcggctagaactcgg

SEQ ID NO: 23479 - DNA, 345 bp, Glycine max
  Intron number 2 from transcript Glyma09g24210.1 (locus Gly ma09g24210) derived from phytozome v7.0 (chr-ID Gm09; pos 29942085 to 29942429 reverse strand)
attcaactaaacaagactatcatcaccattcaatagttaggtcagtttctctctctctctctcaacacttcacaaaaccctatttgattttccctttttgcattgatttcgttcttcaatttgaacccaattgacgttatagtcgcaatcacaattgcaaaaatcatctatcgcaattgcaaaaacatgcgttccaatgttagaccctgccaaaacctttttgtatttatcatcccaataaataccaagttcctcatgtattcttctttctctatctttgtgctaattcaataattcattttggtttgcaatttcttcattcattttgttttcttttattaccag

SEQ ID NO: 23480 - DNA, 500 bp, Glycine max
  Intron number 1 from transcript Glyma12g32980.1 (locus Gly ma12g32980) derived from phytozome v7.0 (chr-ID Gm12; pos 36358132 to 36358631)
tccgcaattcagattttcactagcaatagtttcaggtatatatgtatgtaataattcattagcatgatttggattattatagtttttggccaaattgagcttccatcatgaatatttatcaaacttgtattgaaagcttttgtttttgtttcataataactagtagattttcgaaattgaaacggggtacaggaaaaatctttttttctttttaatttcttttaaagttttctgatagaatgcaccatttgggtgataatgtttgctatggtcaaacttccacgcggattatatcatcactctatgatgttgcttttggaaaatgggttgttgagcttttttcttttcttttttctgttgaactggtttggtgaattattgtgtgcaagcatgattgtcagcttgatgatttggtagcttataattcagctaggaattaatgcaaaatttttgtgagcatttcagggaagagactgaatcaggtgactgtgaaacaaggg

SEQ ID NO: 23481 - DNA, 884 bp, Glycine max
  Intron number 3 from transcript Glyma10g10040.1 (locus Gly ma10g10040) derived from phytozome v7.0 (chr-ID Gm10; pos 9570616 to 9571499)
aggtaatcttttttatttcttctgtatttgatttataagtgcataaataaatgaacaaatagattttatggtactgttttttaattatagtcagagtttcgtctcaataatttgtggaatatagatttctatgagatgtcaatataaattcttaaagtgaatcttcaattctaattatacaatagtgccaaaaacacttataaaactgcatataaatattttcataagtaaatgtattctattgctgtaaaaaaaaaagtaaatctattctatttttaagtaataagtgcataaatttcggtaaaaaaaaattataagtggataaataaatatgaagagtgtgtttctttacctgctgcatgcattagaaattatatataattttgatttttaacccatgatattgatgtgaagtattaattaattttgttgatgactattttttttaaaaaaaattgattaatcatttttattaaatttttttatcttgattacattttttttcaccctcaaaactcaaatccaagaacttccttaaagaaccaaattcaatatcattagatcaataatttattatttgagttattgggtgaaatgttggtaattgatgtatatcacacattaatttttgtattagtgcacaagattcatctaattattgtggattcattagttttaaatccaaaaaattccaatggtgatcaagagtttaataatgggataatgattattgaaacaaaggtcatttttatcttatcttaaatactttcataatatattcttactttgtagtagcattattttgtttcttgatttgtaattttcttaattttcttttggggattgaaggtggagcaaaggtacaggcagtaccacaaccagat

SEQ ID NO: 23482 - DNA, 536 bp, Glycine max
  Intron number 1 from transcript Glyma10g02140.1 (locus Gly ma10g02140) derived from phytozome v7.0 (chr-ID Gm10; pos 1504952 to 1505487 reverse strand)
gcactgtctgtggctcccaactcaagcacaactaggtacataacaaaatactttatttcagaccaatgtgattgattataatttacactagtataaatgaattacatagtaaaaacgtagtaccaatgggatacaaattaagagaaaagagaaaggtgttagtagagtgtcaatttttttttaaagatttttaataatgccatgtattcaattggaaatgtatacactatatacagtgagctttttttttttttatgtataagtgaaaagaataaatattaagcattagtcaaaataaaatacagaagtcatatgagttatttaaaaatcacgttaagaaactcattctcacattatatctatgtataattatatatgacttagatgtactgttttcaatctgatgtaagaaactcattcttacattatacctctcctatttgattgtaagaaatatttcttcattgggttgtaaaattaaatgagtgtaagtgataacaggtttgtgatacacgtaacggcgggggcatacttcg

SEQ ID NO: 23483 - DNA, 921 bp, Glycine max
  Intron number 4 from transcript Glyma11g00540.1 (locus Gly ma11g00540) derived from phytozome v7.0 (chr-ID Gm11; pos 193478 to 194398)
ctctccaaaaggtaccattgccctagcaaaaacacaatttcattcatcttataatttatttttttgtcctttttattaatcttataaacgtagaccgaacgattccactactctggatttgattttatttccttttgctatataatgtactatatctttggtcgagaagaattttaatataattatctacacgtttgtttgtttccattatctggcccttatggacgtggctcgttagtataaaatatgaatttattatatataggacacaagtgacatattgaaatgcctcctccatatccttagtttatgtacataaaatatttcattaccaacctgtacctgtgtcaggccaagatggatgttccatggccctgattgttaggtctcaccttgctggattatgaggtgtgttattcttataagtaggtttaggattcacagtaaaaaaaataaaataatgtgaccacactgtcagagtgagtaaaactgtaaactaagatttatgaggatgatgtaagtaattttttgtcctggtggtcactgggggttgaggattagttaggatgattttatttttatctttttttcagaatgcctatttgaaggggctagctatcccactccgtgaacctgtgaatgtaatgggaccattttagctgtctgtaaaatagtgctctgggtcaaccctagtagctagaactagaagggaaataggttagggggaatcagtttggtacacgtacattacaatgctatgtttgtagttcttgggtaccccacacaagaattggcattttctgacgtttgaacaaccttgcgagctagtagcaaatccttatactaattatggttgtggatataaatcattaatctgtatgcataggtgcacttgttgggcctttcacgcccgaaaagcca

SEQ ID NO: 23484 - DNA, 958 bp, Glycine max
  Intron number 2 from transcript Glyma10g36690.1 (locus Gly ma10g36690) derived from phytozome v7.0 (chr-ID Gm10; pos 44796548 to 44797505 reverse strand)
ctgtttctctggtaatttatttcatccatgcatcctctcttatattcagattctctacaagaatatcaatcagttaatttgtgcccttcctttcttttcatctcaaaagtaaatagtcagaaaaatcatatcaaacctatgtgcatgtttggtattcgatcagtaaaccttgttatgcacgaatcttgagattaaatcaatgatatataaaacgcatcttacaaaaaaaaagagtggactgtagagattcattttgttgtccatttgcaaccgaaatccaaacatttactctatatacttgaaaaaaaaaaaacacatagttaactcctatagtaatatagaaaatgcaattagaacgaaggtacgttggatgattgatattttaaataattgtttttatttatttttacttatttttcatcactttttccgtacatattttaaaatattctaaaagaaacccaatttttcctcgttttaattgtggaaaaaaaaatcccgtttgaccaagtcttcttctaaaggataatttttgccatacatcactttaaacacctaaaaaggggtggtaattatcctttagtagtaccactgtcacaacactttttctttttgattggttggcaaaaaaaaatcacaacactttaacaataaaatattattcatataaatcatcactctccaaactccccatatttctacgatcaccatgactatacttgaaataaagccatgaatatttaacacaaagcaagtatagcaattaaaaaatgaataacttttttccccataaatacactttacatgtataataaattaaaaaagttgaaccagtagtatttatttaatgcaacacgcattagccaatagccattagcattgtcttactatgacttgtttttttcttctttgactatgagtagtcaggggggccaatatttcccgtgccactgggaag

SEQ ID NO: 23485 - DNA, 632 bp, Glycine max
  Intron number 2 from transcript Glyma10g01050.1 (locus Gly ma10g01050) derived from phytozome v7.0 (chr-ID Gm10; pos 749079 to 749710 reverse strand)
caggtgtgttccaattttggtttcagctcaagctatttttctcaatgtttatagtagtaagttacaaagtaacatgttgaacttttcacttttgagccatatttctaatttgattattatttagcttcctactttgttgaaagatccagagttgtaatataatccagtatatatatgatgtaggcatgttggactaaaccacattaaattgaatgtaaagatattgacaacatactctcaaatataatttttgacactatctttcattggttaaaatttattcaaaatcacaacatctaatatattctttttaaacatattctttagattaaaaattattagaaatcacacaatttttgtgatttcacttcttatcgaacctcattaattattttgtagtttccaataataaaagtgtgttaaaaacaatgtatttgagaatgtgttgctaacactccttatgggatgaaacgtggtaaaaaaaccacagcagccaagttaaggcaaatatggggaagcaaaaatgtacaatgctttacttgctatcctaccttttagagttgtgatgattcatctttcacaatgcttgctcacttcatttgtttgtagagacatactggtggaatactcaa

SEQ ID NO: 23486 - DNA, 489 bp, Glycine max
  Intron number 1 from transcript Glyma10g36590.1 (locus Gly ma10g36590) derived from phytozome v7.0 (chr-ID Gm10; pos 44705922 to 44706410 reverse strand)
caagggttccttgcaacaaacccttcttccttcaggtcttctttgcatctcaaactatgcgtattgccttgcttcttcgttttttttttttttttggtttttaaatcaacttaagaccgggggaaaaatgggttcttgcatttgaccttttaaaaaaaaacaacttggctcaaccaatttgaaactcataatttgactccatgaggaataagttataataactatattcaagatttggagtgtttttattttattttataatgttctttataaataatttttggactccgttctcagtttatatttttatttggattgttttgttttgggagtgtgaagtgaaattttacaactcttgggagggagggtggtcagaatttgcatggtttgtgataattagcttgataacgtttgttgtttagcttcaaaagtggaattttcaatttgaagtttctaactacatgttgttgttggtattagaagaattca

SEQ ID NO: 23487 - DNA, 597 bp, Glycine max
  Intron number 1 from transcript Glyma09g34460.1 (locus Gly ma09g34460) derived from phytozome v7.0 (chr-ID Gm09; pos 40840673 to 40841269)
cagtcaaaaagcttggtggccctgatagtatgtaaaatattttctctcattatataatttggtgtttttttttctcatgtataatcacaacaatgaaatttgaatctaaaactttgtgtaaattatccaaatcttcactaggccgatccaagtaggttatatttgttggtgttgttgatacaaaagagttaacttggaagataagtttttgttagtctttcacaaaattatgtattatctaggaaactggaattcgtgtaatctgcatgctgatgtagcccgacatttctgcatatgataaattaaagtagtatttggtgtttccctcatttgtatagtctttttccttacaaatccttggcccattaaggaggatgaaagggaaaatgtgcaatggaaatatccaatcactttccttcatgttttagctctaggggttttgcttgcccagctaatatacgctggctaatccaatattattttactaatctgcttatcattaaataaaaaaatctaatcttcgtgtcagaaaatgacattaatctgaaacggtttgttttgtgttcagaggcgactcccaagtctgttctgaggtta

SEQ ID NO: 23488 - DNA, 483 bp, Glycine max
  Intron number 1 from transcript Glyma11g01350.1 (locus Gly ma11g01350) derived from phytozome v7.0 (chr-ID Gm11; pos 793913 to 794395)
tgtatgtcccactactctcatcttcttatcttcttttttaatttccatatttaactcactaccacagaattgtttttttacatcagttaatttgacaccatttgatacatcttatctctgttttcttgtcacgttatatcatctattatatctgtgaatcccttgaaagaaaataaaatttaattgggtgcaaatattaaaagggcatcaatgtttgtaccattataaattacttacaatattgttgaatcaacctaattagtttagatatttaaaaaattagagattattacaacaatagtagtcattttgtgattcattataattagagattattagtctttaactctccctcaaaattcaaatactcgactttcaacaaaaaaaaaaaagttattcattattgtgtatgttgtgttaattttacaatatagctagattgacattaatatttctttatgactaatttcaggtgacaagtct

SEQ ID NO: 23489 - DNA, 818 bp, Glycine max
  Intron number 1 from transcript Glyma10g33100.2 (locus Gly ma10g33100) derived from phytozome v7.0 (chr-ID Gm10; pos 41480853 to 41481670 reverse strand)
aagacttggtagatacatctttactttcttattttacacatctcaatttagaaaagccaattccttttgtggtgcaacaacatatggattttgatgaagttcttaagttcattttgtttgaaggatgcgtagataataggtgaatagattctgtactgtaactaaacaatgatgatccttgtaaaaaaaattgaggtggtagatatattgagcttagaattggagattatgtcagggttcctttcattggtatcaaaggtgcatgctacttaatgttataatgttcctggttcaatttctaatacccctgttggagattacaaatcacattatttgggttgaaggggacgggaacatatctttgccatttattcttactctggtgtctaatgcttttgcagctgtccttaccccttttccttcttcattcttcttattaccatagtgcatacaaatattgaacttctaatcattcaactgtgataaaagacattgaaactaattattcttctgaattttcctcatgatcttagttgtttgtttatacaattggttatgtacatcgagttgtaatttattagggctcttccttgccaaaagaaaacgaagtccctttcttatctcatgttgcgaacctacttctccaattatgtatcaggatattttagtttgatgctgaactgctacctggatttggtttatgttatgttgggttacatgaaataattttaatattatcctcatcattgacacatttcttgtcatcatgtttatgtttcctgatttattggctttacaactatatctgtaggtctgtg

SEQ ID NO: 23490 - DNA, 529 bp, Glycine max
  Intron number 1 from transcript Glyma12g33340.1 (locus Gly ma12g33340) derived from phytozome v7.0 (chr-ID Gm12; pos 36661592 to 36662120 reverse strand)
ggaacagttcaggtaatctttctactgatgctgcttattatgagcattaattttttttttaattatgagtgtcatgatatttgatggacatgcatgtgcaatttgcacaccttcagggttctccagtttgatctcctcccctatctttgatattgaacaaacttttggctgcaaggatgggaatttcattttgttggatcttttgtgtgatttcatagtttttagacttgcatcaaataaagcattagtaagggagagttcagaagattataggatcatgcgattaatgtggaggatccaaacagtcataattttgcattcatgtaactcattctatattctagggattcagccttgttcatttttcttttattcttcaagcttccttaagtgttatgaatgaccgaggcacttctatttttattaaacaaaatgagtttgtcctgtgtgttaaattttcatgttcattttctaatcgaacataactttcgttaatccatctgattttaccccttttttcagccggttc

SEQ ID NO: 23491 - DNA, 904 bp, Glycine max
  Intron number 1 from transcript Glyma10g02640.1 (locus Gly ma10g02640) derived from phytozome v7.0 (chr-ID Gm10; pos 1889256 to 1890159)
tagacgatccccttggcttcaatccactctcactggtacccactatctttctcttattattgggtaaaaaaaattgttgtgtacttatttgtttgagaattaaaccgacaaaaattaggtacaaaaatttgacaaacaagtgttaatacttgattagttgaacagtaagttaaaaaaaataatattttcaagattttgctgaaccacgctgtttgtgccgctttgacggttttctataattgaatggttagtgaaaattagatgcacgaaaagtccattctcttagtaggttgtgccttgtttttcaaacacattgaatttgggaaatgagtaatgaattgccataactaaataaccaccaactggtctcatgggtgctgcgacggattgattttagaggtaacgtttttcatggctatcatgcactcagtgatgtttttgattacatgaagattgatggtgtgtcatgtgttacccacctacccttataataagggcataatatttgaatgatttagtaagggtcaccaatcattctctggtcctttgtcattacttttgcgatttgttaagtatttagacatataattcattctttgtggccgattaagtttcggacccacatgtgtgtctctacataaaaaattacttgagaaaacggacccttttcaaaagaagatacgagtgcttaaagtatagaaaaatcaaaaggttttgagcctgttattatttcatgatcagtgttacttttcaaaacttttttctcttactaccttttgacttgtggccctatgcatttgttatctaggcttttttgttaatatgtagtttaatttaataatgaaacgtgatttcattgtgctgtaaaaggttaagtgatgtgttttttttatggcagagctaa

SEQ ID NO: 23492 - DNA, 416 bp, Glycine max
  Intron number 5 from transcript Glyma11g00640.2 (locus Gly ma11g00640) derived from phytozome v7.0 (chr-ID Gm11; pos 299308 to 299723)
gtgtacaggtaacactgtttcttccccatctttcaattgttacaaaataatatatgtatatatttacatgggaaacttgtttataaaatttgggatataactttttggcataataggattcgaagtacctgtgaactacactctggataattatatgtattggaaaaaaacatgtttggagtgtgtatgtgcttttgataatataggcataggatatacaagaacaagaactttgtttttttccaaaatatgtaaatatgttgaagaatgtttgaatttgatcatgtctttagcttctagtgacatttctatgtgatttaagatttcattttgctcgtttttatgggttgagagatcacttatcattgatttaatatggattatcaattctggttctcataaataatattgaaggc

SEQ ID NO: 23493 - DNA, 970 bp, Glycine max
  Intron number 3 from transcript Glyma09g00990.1 (locus Gly ma09g00990) derived from phytozome v7.0 (chr-ID Gm09; pos 534500 to 535469 reverse strand)
caaggtataaagtgacaagattatgtctatagttttaattttttggttatttaaacttaatttaaaagagagagatcattagatgggactttaatattgtatatacaacaaatatatttataagtttcatgagacttgaaaagataaatacttgaatagtaaaagatgatagttatataaccaacataattgttttctctgttaaagttctattttatgtgaattctctcaaatggctgtaaggaaggcatttatctatttattccatagaaaatgggaaagaatcattgagcgtattgctagtttgctatactgtgtaaaaaaatatttccttcttcctcaagaccagcaaaatatcaaaactattatacataagaggggaataaaaagacaatagacaactaaacaaaagtcaaaaactatttgttagaataaatgaaaaagtatctagtgatatcttgattatattttattgtaatctagtctctcgtaggagttaggattgtctccatatttatttatatttgatgatttgtttccttatttaattagagttatgatctagtattagtattcttaaatttcgattaagtgcgtaactcaatctcacaaaatttggcttaaggcgcctaacgcaatctcacaaaactagcttgttaggtgaggattgcccaagccttataatgactacattggccatatctttagttgatgtaggatctcaacaaaccctataaagttaatgatatgattaacaattatttaacttgttttgctagatctgactcactggctgtgattatgatgcaatgacaaaaatgtttcatattctttttgcctctttctctgattctcgttttccacatgcatgcattgatacacagctagcaatacagatagttccttcttttcatatattctcatgaaaattatattacttccagggggaaaggtgattatcagattgact

SEQ ID NO: 23494 - DNA, 699 bp, Glycine max
  Intron number 1 from transcript Glyma09g00990.1 (locus Gly ma09g00990) derived from phytozome v7.0 (chr-ID Gm09; pos 536176 to 536874 reverse strand)
attgcgggctgatacgcttccattctttgcttaacgtaagaaagctcttttctttctctatttgggcattgctattgcttttatctctgctttgtatccccctttctgatccaaaggaaatccccaacgccattacagaagtcaaacagagttgcatcgaattcattatttgcgttggaaacttctcaatttatgttgcgtctgggacagtttaagttaccaaattgttttcttagatatttatttcttctatttttaaatcactgtcgggtttagatataacatgaaatcaagagaatttcaagcttatgttgttactagttagtgctgtctttactgagattttgttttgaaatttcagtactgatttttgtgttttatcggcaaatgttagttgttaattgttagttttttgttagtggcaaatttgacaaatgttaattgttagtactgatatgtgacattagagtaaaagatgccaattttttgaaaccataaaccatgtgctattttgttgtgaatagcagcagcagctgagaaatattatttttgtgttgattgcactgggaacaagctgtaaaggcatctataagaaacagtaataatgaaattgataatagaaaatattttccctctccatttgttcatttatttgttttgattctttttgtgcatctaatggttctgcatacatccagg

SEQ ID NO: 23495 - DNA, 627 bp, Glycine max
  Intron number 1 from transcript Glyma12g22340.1 (locus Gly ma12g22340) derived from phytozome v7.0 (chr-ID Gm12; pos 24321179 to 24321805)
tattttctcccctgaaggacgtctcttccaagtcggtacgtaactcaaatttcttcttttactgtaacctctcgcaacgcgacgttttaatcagttaaataccctttagatctttcacgttctggattgacctaatttgttaagattttctatatggaaaaacaagtattgttattttttggtcgttcatgaaattattttttaattttggtgatttaagttgaaattaatggtaatggaatagtgagctaggttagtggattgcatttgtgaaaggcttaggaaggtggaagtccgaagttaagaattgctcgcatgaatctgagtggattgattgtgtccgttaggaatggaaatacattgtttttttttctattggcaaaatgtatcagtttctctttttcaatcttatgttctctctctttttttaaaaaaaaaaaattgttgtcttaagccctaatttaaccttaccaaacgcggccttatatctgtgactcccctactggatcagcgtaggtttatgaaaatttcattgcagtttgtttgacttgtttggaaaagagttgactagtttgttaggctgtagtgttctgagtggtggaatttttatgcatgttgaaacagagt

SEQ ID NO: 23496 - DNA, 535 bp, Glycine max
  Intron number 3 from transcript Glyma10g33550.2 (locus Gly ma10g33550) derived from phytozome v7.0 (chr-ID Gm10; pos 41886952 to 41887486)
agccgcttaaggtgtacctggctaggtacagagaggtaatatttcttttttcttggtatattttttgagggtttctgtcagtttttttttagttgatatatgttagaacttgaggagaaaatttgataattggaataatctaaattgaatccttgtctgatgcatctggctctcttgaattgtagaatctagatatacatataaaagacgattttattcttgagtaaattacactaactactcctgaggttttgtgaaattacataaacttcccatttttcatttccttttccatctcgaggtgtgggttggtgtttggttagatgagctgggtgggtgggaaacctggtaattactggatctgtacattctcatcctcctctcttcattttaatgttgaagttttgataatgttccttatgcctttataattatctgatctttttttctttctttcttattatttggttggtgattttgaaatgtccatgatatcacaggcggaggttagttaattctccccttggcttaattg

SEQ ID NO: 23497 - DNA, 794 bp, Glycine max
  Intron number 1 from transcript Glyma10g01270.3 (locus Gly ma10g01270) derived from phytozome v7.0 (chr-ID Gm10; pos 921953 to 922746 reverse strand)
tgaagcattttccaaataaggtaagcgatgttcacgagatcggagacgcagatgctaattcgcctccgagttttgaccgagttcgtgccactgagtcggtctccgccgagttactcacttcacaagaagtcagttttttgaagaccccctttttcgtttttcttgtgattctgtgtgtttgtgttgttggatgacatagatggtcatagaccgtgatggggttctttgattctttctattcgcttgctcaatcatgtgaattctttaatttctctttctgggatcaaggtccctgcaaaaaaagaaaaaaaatgtaagacttttggatcaggggtcatcgggtatgttgagcttaggtgaatatacccgaattctgttgattttgtttaggttacttacttcgttgtatgtgcttagtttagcggcttatttatgatgatcccacttgtttgttagcgacagtaagggaatctctctttgttcatttaaatttgaatttcttgaaggagattgatgtgtgtgtgggatggatttttttggttgttagtatctataagggtaacattgttgctggtcaacacgtgttgcagatcaaatcctccttggagatgttcgtaattttgcaatagattttcgaaattgtgagtgtgaattgattgttagcttgtggtctttttgtggtttgaagaatcatattgtttctgtgatgaacacgttatgcaaaatagtacatctagtccttgaatatattgattcttgttttgctgatttgcgtttaattatccttgtgtagg

SEQ ID NO: 23498 - DNA, 655 bp, Glycine max
  Intron number 2 from transcript Glyma12g05140.1 (locus Gly ma12g05140) derived from phytozome v7.0 (chr-ID Gm12; pos 3425657 to 3426311)
ctgggtcggcgtcaaaaatccgattccaaggtaccaactttttcatgtgtttttgtttcttccatcatttcttactgacaatagcttgacaattttttatttctttttacaagaagtagcctggcaattctagtttgactttatttgtcgcctatcaatttttgtaatccagctccttatgtgttatttattgagaaaacaattttttcttaaatacagtaattttgtagtatatatgtaaaaatataataattatgttatgtcgtcaaacttagaatttgtttgatttcacatttggaaccaccaaacttgagtctatagttaatcaaatttgatttagctttgatctgtttgacacttttcaattagcgaaaaatttatattagttttattcttaactttaagtagcttttaattgatgttactttgagtaactttttttgttagattaataaatttatactgaattttaatcctaatttgattctataatgaaaacatctaaacacacacttaattaaattgatccctcaatctgatcgtacaaaataaaatgatgtcaaatttatcctccaacattacattacagattatgaacattacatgcattaggtacactatgtgaacattgaactgaatttgcaggtgggtccct

SEQ ID NO: 23499 - DNA, 772 bp, Glycine max
  Intron number 1 from transcript Glyma09g01730.1 (locus Gly ma09g01730) derived from phytozome v7.0 (chr-ID Gm09; pos 1116684 to 1117455)
ccaccattcgcgtcttcggaaaatctttccttcaggttcatctaatataattccctcaaattcaacccattctctaacctgggcttcctccaaaatctcatcttttgtcaattcccctctggaatgaaaaataaagctattaactattaatctttaatctaatttacataatatgtaccttttctttggcagcaagtgtaagaagggatcatattattagaatttaattagaacttatgtgtatgctgacattgtttatttttgtaatggttattataaaattcttatacagagtgatctctaatttgttgtgtattcttattcaacgggctttttttttttttcatatatcaggttactttttgaattgtgaagttgtagtttgtaatactattatgtaagttggtatgaatatgaaataaacaaacatttctccaaaagaaaatgttaccaaacacgtgttcaagttccctaaatacgtagcgtaaaaaaaaaaggttccctaaatacgtagtatttgggtttgatgtgtatgaaaaaaaaaaattattgataagggtgttcactcaatgaatcctctcatattagaatttacatatccttgcttgtaactgaagagtggagaatgataggcacacaattttagcatgataagatgaatcttaacttggagtctggagattgctctcttgtatatggctatgatagataaacggaaaggtccttatgatatcaatgtgatgttacgtagttctctgcagcctcgagacac

SEQ ID NO: 23500 - DNA, 651 bp, Glycine max
  Intron number 2 from transcript Glyma11g36830.1 (locus Gly ma11g36830) derived from phytozome v7.0 (chr-ID Gm11; pos 38150770 to 38151420)
cttctaaaggtatccatcctcaatgtgtttcttacattcttccttcctaaatgtatctgaatggagttataaggttgacttagtggttgtgaaggagggtttaagggttggagggaggtgggggagaggtcgtttgttcgaatccccttactaacattctaacataaactaacaattgacattggccaatagaaaaaaacaaaatgtaatgtatgagttgaagggttgaaaacttgtcttgaacattctttgtgtttatgttgaagaccccccctcccacaaaataaaaaatcttattgctatttggaaaatgtagtttcatttacttgtaaataaaatagttttcatgcaatatcatattttttttgtcatattgttgaaaatgtcctatattttccttttaagcattgtgtttgtcaaacacttacagcaattcccttttagtatcctttggtatccataatattatacagatgaaaattttcttgtttcctgtagaatgttacagcatttggtcgcgtttgcttatctcaagcatgccatttaataatctgtttggagttggtatccataatattttaattgctcacttattgtgactttgattcttgtgtagaaccagagaaatctatacaagaaattgcacaaggc

SEQ ID NO: 23501 - DNA, 728 bp, Glycine max
  Intron number 1 from transcript Glyma09g23220.1 (locus Gly ma09g23220) derived from phytozome v7.0 (chr-ID Gm09; pos 28585470 to 28586197 reverse strand)
cattggaaggtccagagttagaaactctcaaggtatgtgattacattctatcaattcaaatctagttgtgtgatttaactaaaataatccataacacaggccatacaatttttggtactaaaaaattagcccccacttccaaaagatcctaaatattttcttcatttatgtcttgtgtcttaatcttaaatgaaacttagtctaagatgcaagtatatttatttagacataagtgaaaaccactttgatccatgactaaccaggaatatagctagatagagactgcttaagggttacgcgctcccggtgcttgctattttcattttctaggcttgttatcaattggtatcagaactggttgttagtgtcttggaaaaaggtaccaatggatggattgactagaaaggctgtagaatgcatctgataagacattggcactcagggtcggtgctatgataagtattaggtattatggagtgcttaagtctcatatcgagtaatcaaatttctttcaactttaactaataaccttttggtagacacttcatttgcaccaaactcaacaacaccataatttcctgattgaatatcctaattctactgaatttttctttcttttccccagaatttcctaattatgtttgtttgtgcatattgaagattataacatattttgttttcctactccaacaggcatcagaagagacagtgcttccacaggacaagca

SEQ ID NO: 23502 - DNA, 883 bp, Glycine max
  Intron number 1 from transcript Glyma11g34870.1 (locus Gly ma11g34870) derived from phytozome v7.0 (chr-ID Gm11; pos 36641392 to 36642274 reverse strand)
attctggtatgtaatgctaattttctcactctttagctatgaattaataaataaataaataaaaatactatgatctattgtagagcctacccctaaatagattaatgtttggagttcagtaattaatccatgtacttacttttatgcaattatcatagtcatcaatggattaacttgtaaaaagtagtgttttggggatcacaactttgtcctacccctccaatgacaacaaaagttggtgaagtcagctacatggttcacatggtgtcattcgactttgttaaagactgagtgatccatgttaaatgtatgtttggatgagcgttgacaaaattgattttggttaaaattgattttgaagtgatgtgatttatgtttggatgttttcattatagaatctaagttaggagtaaaattcagtataaattttttgatccaaagcaaaagctactcaaagtagcatcaacacatactcaagtttgctccactaatcacgttaacagggaagtgccacacatgttggtcaaagccataatcaaattttactaactctaaactcaagtttggtagttccaaatgtggaaccaaacaagctctaagtatattaacgaattttacgttagctgccgagaatctaacacaatcctcctcctcctttacctgggcttgggaccaactttattctccccctccaagaacctaaaaacaaaatcaggcttgtcaattgatttgattcaagttggactagtttaccctaaataatgatttactaactgtatgtgatgcttgtgctggctgataacaatttcttggttatcttatactttttagcttcttccaaatgaatctttttctttcgtgtttgcagagacaggaagccatt

SEQ ID NO: 23503 - DNA, 763 bp, Glycine max
  Intron number 2 from transcript Glyma12g13020.1 (locus Gly ma12g13020) derived from phytozome v7.0 (chr-ID Gm12; pos 11386242 to 11387004 reverse strand)
atcaagtgaagaaaatcaagtccaagctaggagtggtaagataatttaatgtataatttgttggggttagtgggaaaacatattcaaattgactcagtgttacttattttagggagaaaactttaaaatagtatcatgcatacaggttattcaaatggttctttaatcaaaattgatattctgttcttgtaattttaagagaagaaagtaaagtgctatttcttatcaattgatcttaattacacgagagttatataggcagctagaagatattctaaccatcaactgattacaaaataaatgtaggaacaagataggggaaaaaggaaaaaaaaatatcttaataatctgatcttgctcttggctacttaaacattgtagaatgcttatttgaaattcaaaataaaagcacatacaactgtggacattgttaatcactgctgtaatttcaatgaatagtattaacaatgattaccaaggtgcaatgtttattttgatttaaaacatacaatatttatttattttttgattgccaaatgttaacaattagtatgctgtattagtgaaggaattccaatccatgatctccttatcaccccaacccttaaacctctccctccaacctccaaccaccttatgactcctagaacaaataacatttatgatattatgtttgtgttattattttaattaattgtggtatgtttcatcaaattcagttaaattaataatatattttttgtgtaattgcagacagtaaacg

SEQ ID NO: 23504 - DNA, 739 bp, Glycine max
  Intron number 2 from transcript Glyma11g15030.1 (locus Gly ma11g15030) derived from phytozome v7.0 (chr-ID Gm11; pos 10765740 to 10766478)
agcgagccaaaggtgagtgagtttgcaattaaaatcattgcgttattcaatctgattattttcgccgtgatgctactttgagtcttgtgatttattatagagtacggcgattcacatggcaacttgtgcttttagcatgttattggaattaaaatgtttgtggtcacgatctatatatatatagaataaaacttagaaacagtttagtatgcgcttttggtagttcttcagcacgaattggagtttcatctcggtaatttgcgtaataatggtttgcattaaagatcaacatatattactgaagtaaaactctaattctgatagaagtttagcatcacaagcaccgatggaactgtatctaaatcttgtctttatatatacttcttttggtatgaagtgaagttttaatccgaggttaaagtagcatatatgtggctaagaaagtaggattattatgtgttgctaacataattagctgctctgttatgttatggtgatctctgaatgctggatatgcttgatcacgtgtgattgggaactttattgaacaaatgagtgtgatacaggaggatggaattcacaagaatcacaactaaaatgtggatatttgaattgaatctaataacgtatcaggaacttctttttttgtttcctagaagggggaggatgtatgtgtattatcctttatttgttaaacaagagttataaagtgcatgttttctattttttacaataacag

SEQ ID NO: 23505 - DNA, 610 bp, Glycine max
  Intron number 1 from transcript Glyma11g31620.1 (locus Gly ma11g31620) derived from phytozome v7.0 (chr-ID Gm11; pos 32973645 to 32974254)
aaaccaccctcactaagattcaccctgtttgccctgtgagttttttttttcttttgcttagaagactcttatagtgcttgtagtgttgttctttgatcagaatcggagttttatatttgtagtttgtaataaaggattccgttaaatgtcaatgcggattactgaggtgaaacttcaattttgattagagaatagtactagaagcacctgttgaactgcatctaagttttgtcttttaacatttttttggttgttcttgatggatgtcactaaaactctgtcatgaatgtcagcctcattgtgagtgtttttgttttttttttttttttttttgcttagaagactatttagttgcttaatttttggacaaaacttacatgcggttctataggtacttttagtgttgttttccgatcagaattggaattttatataggtagtttgcattaaagaattccattgaatgtcaatgcggattattgaggtgaaactccaattctgattaaaccaccatctaagttttgtcttttaacattttttggttgttcttgatggatgttatgtcactcaagttagtttacactaagattttgtcatgaatttcagcctc

SEQ ID NO: 23506 - DNA, 597 bp, Glycine max
  Intron number 1 from transcript Glyma12g09200.2 (locus Gly ma12g09200) derived from phytozome v7.0 (chr-ID Gm12; pos 6980310 to 6980906 reverse strand)
aaatcgactctgctggcaccatcaattaccacgaggtgggtttatctatgaacaaacaagcaaacacccttatgtcatttcatccaaaagatcacttctttaaaagaaaaattaagatggtttttttttagtttaacatttccaccagtcagaaatctcgttgcaatgattcttaagatagttattatttttgagtttaactcacatatgccagtttgtgattagattttgtgtatatattatttatttaaggacttttttagtttaacttatttttacacggtctatgcacaattctgtaaaaagaagagaaattgcttaatcgtgaaatatttttctataaaatcatgaggaaattttaaaagaaaatgctttggggatggaaatgaagactgtctacattacttggattgaataagatgtaatttgaagggtttgataggatttacaatgtcatccaatcacaagtttataataagtttgttgatttttaccatagttatacctagcatctgcatatgaaaattaaactctttagattgtttaaaaggtttttttttttttggggggggtggggggtgtgattttcgaagggaa

SEQ ID NO: 23507 - DNA, 837 bp, Glycine max
  Intron number 2 from transcript Glyma11g31890.2 (locus Gly ma11g31890) derived from phytozome v7.0 (chr-ID Gm11; pos 33231019 to 33231855)
tcttcttcatcgcttatcttctcttcaaagacatcgtaagttccgattataacactcttctctttgtgtttctcactacccatttgtcccatttcctcaaattttctatgtgggtgtcgtgtctgtgattttacgtttttggttgtgtaattgaaattaggctcaaattttgatcccatgcccggggatctcaatttcttaatccgcactcgtcgagattcaaattcaattttaatgcttggttgtgatcaatatgttgttaactataaggaccctgttcttgaattcattgtaaatgattatatttatagttataattatattttttgtcgtgaatgaattatttaagtaaattttaagtttttaaccattagataattacttctgcatattggtgttgcctccttgattcagatacattgggtacaccttctagtcataagatgttaagaatacactatgtattatgtaatgtaatgtgttatactttgtatttgttggatgtgatataaactataaaactagattcggtatgaaatgttaatatgccctgctattgtgtcggatttcagtgtctgatgtttcagtccattcggaagagattttgcagaattgatttgagcttgtaaaattgtgtttagcttgtttaaacaagttttattcgcaaaatttatctttctagcttatttcaacaagttttatggtcaaatttatgatgtaaggttctcatttgatgagagtttattgaataagcgcttaactaatctagcttctgaatggattcttaaatgcttggcaacaggacatctttttccatctaaactccattacccccta

SEQ ID NO: 23508 - DNA, 494 bp, Glycine max
  Intron number 2 from transcript Glyma12g13980.1 (locus Gly ma12g13980) derived from phytozome v7.0 (chr-ID Gm12; pos 12627202 to 12627695)
ttgaaggtaaatattatctaaatattaattatcttcatactacacctttagcacaacatcatgttttgattgtatacaagattatatatataattagggtgtaagttgctcgataatttgacatgtgactaatatatatatatatatatatatatatatatatatatatatatatatatatatataaataaagtgaataactataaattgatggttaggattaaaagttattaataataatcattattatttaaaaaaagtcataactttatgattttgtttatgacggtatcttatagctaagatttacttttctctcactctctcgcgactttgtgtgactcattctacataatagtttgatttgtaaaataaagatctattttgtttattatggccttctacaattgaaatttaccatacaaaatgttgtttttactaaatagcaattgaatatttaatctcattgtaatttgagtgacatgtagactata

SEQ ID NO: 23509 - DNA, 1000 bp, Glycine max
  Intron number 1 from transcript Glyma10g00880.2 (locus Gly ma10g00880) derived from phytozome v7.0 (chr-ID Gm10; pos 610846 to 611845)
tgagttctaacttcctcagatttgatcccaaaccagtaagctttttcttctcttcacattttctgctgattttgcatcaagtttgcattttttgctggatctggatcatttttccgtctgggttcgtttgatttggcctttttcagtgctcgtggaaatgttcgcttttgatattgaatgcaccccagattccactttttcgattttttagttgttatgttgttgcattgaatggtgattgaattatgaactagtcttgctccttttgatgctgatgctgttttgcattgtgccggatctgggagttccatttaattccatggctaatggttatcatcaatctcattcattactatttgatttggatccaatgatgtttttcagaatcagatttgccattgcatatcatgcattcaattatcagaatcatgggggtctttctttgtggatccatcattttcattggttaggtgtcagtggatttgtggtcatcgttgctttctttcacctcattttttcgtaatctttattgtttttcacttctatgggacgattagtacacgcaatttcgactgaaaactacgagtgcttcttttggatggagtagttggatttgattaaattagcttgagttactctcctattgtggtgaattgtccttggccatttgtttcttctatgaccaagtgttactaggattattggtggggtacactattccttttgattatgttacccattattgaattcatctccttctatttctattttctttcttcatacctgcttacatctcatcaaactctggtcacacttgaaaagaaacaagttttaaactggtgtctgtgtttggatctgttctttgtttttattctttttatagctctatgatttaatcaagaagaaaaatcagtaatgaatatctgtatctatttgctgactgcagtttctttccttgcttgcaggttattctttgaatcagctatcagtgtatcaattt

SEQ ID NO: 23510 - DNA, 866 bp, Glycine max
  Intron number 1 from transcript Glyma09g42020.1 (locus Gly ma09g42020) derived from phytozome v7.0 (chr-ID Gm09; pos 46689668 to 46690533 reverse strand)
ataaggttaatttttactctttcctttgcttcaatttccctcaaattcaatgattttcttcttgtggacattccaattgaaacaactcatctcatgttatgatgtggtttgcaactcatcacttgtgtttctatccaattcaatgattttctattgattttttttctatccaattcaacttttacgactagtttggatgagcttctaatgagaacattttagttgtagaagtttaattaagacttttcgaaggcaagaatgtaagtttgtcgcttatgttttgaagtgtttatagagaagtcagaaatgatcttttgaaaaagttaaggtgcatatgattaagagtaattaaatagtctatgtagtgttaagtgtttttaatctaccatctaatcacaaattgacatgtaatgtaagtttgatgattcttacaacaattaccataaaagtcatatctaacatgatttctgattgtttaaaggtacctgggtccataggaattaaactgtatggctattggttaatcttaacttatacaagaagtttgactcattttttttccctttttaagtgtttgttcaggagtttatccaaattggggcttagtccaatttctagcctatgattacataatagtatttgggtcaggtcatgagatgaatatactgcttgtttaattagacaaagaaaaacagaaaattatgaaattttgcgtttgaactgggaacgcgtcagtgaatctatctttttgcataatgtttcaagagaaattaattgtcaatttgttttgatgttgattgctgaatttgagaaaatgttgatgttgtgcaggagcaagcaaaaagttcagaattcaaaggcttcac

SEQ ID NO: 23511 - DNA, 899 bp, Glycine max
  Intron number 3 from transcript Glyma11g00600.2 (locus Gly ma11g00600) derived from phytozome v7.0 (chr-ID Gm11; pos 265710 to 266608 reverse strand)
aaggttggactgcaagactactaccctcaagacaggtaaccttaaaacctaaccctgatcagtcacacctttgcctttgtcttccatatagttacctctttaattctttgcaatacactacaaagcatgagtattgtgtaaatttgaagaaactacagctgtcgtcagtctatttttctcctaaaaaaattactttaaattgaagaatatttttaagaaatgtaacaattaaccactcctaaacgtagctaacttttattttaagctttcactttagataccaatgtatatttaagatggttaaattcaacatgttcattgttgcaatctttttttgttggtgtaagtgtttcttcatttatacattggttatataattataatggctctctgtaggttatagtgtttggcctgtttttttttaatcttttatctttaaaagtagtcaattagcttttgttcattagcaaaaaagctacctttgtcttcaagagctttcttgaaattgtgtcttaagctctccttccaaagggaagagatgcaccaaaaaaagtaccttaaatttaaagaatgtcaacctgtatctgtatgaggtattgttgtttccaggacagcaaaataagaatatttcttctgtaaattgaagtacttgtagaatttgtatagtaagttgttgaaaattggtttttgcttgttctttgataaaatttgctcgtattgtttttaaactttgatgtatattaagttgtgtagatgtgaaattgctaacctatctgtgattaaactttatgttgccgttattctcttgtatgcatatggtttctcctgtttgcccctaaactttggttgctcaaaatgatgcagtttgggtatattgtcttgacaacctctgctggtat

SEQ ID NO: 23512 - DNA, 607 bp, Glycine max
  Intron number 1 from transcript Glyma09g03390.4 (locus Gly ma09g03390) derived from phytozome v7.0 (chr-ID Gm09; pos 2376443 to 2377049)
gtttcgtagaacaattcgaaattcaattgttttaggtccgattgtgggatcagtattttttattttttttatttcggatgaacaattctgattaggttttctgttgatgttgaattccaaagttttgttatttgattggacagtggtttgcatgtttctgtagcttccgtgttaagaatggatttgtgggttttctttgaacgctcacgatcagcttcctccgttgaatttatagtttttgtgccatgtgtgaccttaaaatcacatccttgaactatctgctgtctggaatcaatggattaacaatggaagtagggaattgaacaatttttaataacacaagttgcgtgatttgtacaataattggattgtatgctgtctttaaaaatcaaaacaaacgcaaagttgaaattttcttagatgatttgataaagaatcttgagtcaagaatttgtaaaattcaatatttaatgggatataagtttaaagtaatcggaagagcttctgatgtcttatgattgcaaaacttgtgattatgtatttagagctaaacataatgcttatgtaatttactattgcttgccagctgagagtgtttctgatctat

SEQ ID NO: 23513 - DNA, 701 bp, Glycine max
  Intron number 1 from transcript Glyma10g35300.3 (locus Gly ma10g35300) derived from phytozome v7.0 (chr-ID Gm10; pos 43539075 to 43539775 reverse strand)
tttctttgctttctcatccttttccttttcccaaggttcgttttttttttcattttttttttgctatttttttcttctatttctctcttctctttcttccaatttttatttttaattgatttttccccttttgggtgatcggggatttttgtgtctggatattggtttagggttttttcttcagtgatcattggtgtgcatgtttcaagtttgatgtgttggcagtggaaatcaaaggttctttttgtgttattggatgcaaaagtttcaacttttagtctttgtgatttcatgttaaacaagcatttgtaatgggtctaatggtggatgatatccccttttttttttttttttttttctctcttgtgggtttatgggttcgattgagtgttttctggagtatgtggacaactgggttgatgtgaagccctgatctaataagatatttttagggtgaatttgatgaatgatggctttatacttttagttttcaatatttccatgatgaattgtgtttcattagttagataaaaagagcatcatttaatcatattaatattttcgctccttgtataaagttcattgttttttatcaaactatgttctgcaacacacacatatgaaagcatttatttagtttgactattattttttgtccattttcagcaattgtactctttaggggcataatacacgtaaag

SEQ ID NO: 23514 - DNA, 706 bp, Glycine max
  Intron number 1 from transcript Glyma12g34020.1 (locus Gly ma12g34020) derived from phytozome v7.0 (chr-ID Gm12; pos 37195038 to 37195743)
tcaccttcatcaagtcaaggacatgacaatgatgccaatagatcctcatttatttcttcttctttttcgttatctttatcaatgttaatgagtcagggggttacagttgaatggatggtagaaatagcaagagaatcttatatatgataaaaaagagtggaattgagtataaaaaaatgctaatctcacgagatgtgagtataatttattctaaatttaaagctagttttaaaatcttaaacaatataatattttttttatttattttaataatctcatatattaatataatttttatttataaaaacaaacaatattgcgggctgatagactgacccgctccatctttgatccaattgattggagggttagagagagtgtggagcacgtaagactggtggatcaaaatgttgatgcggtcccaccaaattgataaaaggctagttggctggcccgcctcagtgggtccattttgtcatcgcgtacttaatattcgtgaagggattatgtgaatgcatccccaatgtattgtatgaatcattgagttgtatgcggtgatacagtgtacttatatgagttgtgtttgtctacatgtaccaatagtgtaattcatcgatgatgaaaaacgtatcatggttttggacccggtttggccgtggatcatcctccaatttcagcacagtaagtatagcatccagttcttcca

SEQ ID NO: 23515 - DNA, 362 bp, Glycine max
  Intron number 2 from transcript Glyma11g35640.1 (locus Gly ma11g35640) derived from phytozome v7.0 (chr-ID Gm11; pos 37276984 to 37277345 reverse strand)
ttttggatcttaaaaaccttgaggtatgtgtttcatgcttcattttcatgtatgatttgacattgtttatatacataggacatgaagatttctttggtcttgttgacaaaataatatttagttgatgttgttgcatcctgtttcaagatccctgttttttttttttatgtacgcattagcagaggaacaggggttaatgacttcatgctgttgggaagttttgtttttttggaaatttttttattctggattatttgatttggtgtattacacccccccctcccccccccccccccacacacacacacactattttagcaatttgacattattatgattattcttacagattttgattttgg

SEQ ID NO: 23516 - DNA, 824 bp, Glycine max
  Intron number 2 from transcript Glyma11g18630.1 (locus Gly ma11g18630) derived from phytozome v7.0 (chr-ID Gm11; pos 15267887 to 15268710 reverse strand)
ctcatagcagtgccaattttattgaggtaaagagtgaatttttatttatcagaccaaattagaaatgtgttaagcatgctgattggttcatcattttcacaaagttcttttcttccagttacttttgatttattattttatctggttttttttttgtttatttaatggaccaaaaagaagatagatcatgttaggatccaattggaaggtatagtctcacattgggagtatggaattttagtgtggggtttattaggccttgttctcttcgataactagcttttgttttgttgtgtggtttatggaaggtttttatcaattggtatcaaagtctttcaccgtgccttgctactgcaaactgagcgatgcgggtgttatgtggggtttatagggcttgagttgtcaaactacagcaaatggcacgtgatgcatgttgtgcccatgagatcttttaaattgtttactaggactctttttaaaaatataattttttttttgaactttaatgtaacaatcatgaccttatagcttcttaattggaaatcactagtttaaagactaaactgttattattcactctgaactggtatgttatgttctttacattgtatcctgtatgtagattagagattagtatttaaattgaaaaagtaacagcaagaaaaaatagatatagatccgatcaattaaataatttgtaattttgttgcacatattgatgtcttgttctttttcctatgtttttttgggagggaagaaactgaactatgttgaaaagttgaaatgcaggaggtagaaaatcagccaagaagtgagaagaatcg

SEQ ID NO: 23517 - DNA, 1035 bp, Glycine max
  Intron number 1 from transcript Glyma10g05600.1 (locus Gly ma10g05600) derived from phytozome v7.0 (chr-ID Gm10; pos 4390860 to 4391894)
ccaggtatgtaccctcttctttgcttttgcttacttcaagttccttttctattcttcaattggtttccataaagattgagttttttctgctctagcaccgttttctgcattgggtgttttgttttagtgtttgtccttgtgctctgtaacacctgttctctggcattgtgctcttggttttttcatattgcttctcctcttctcttttctctctctcaatggatgttttttcatgttgtgccctttagtccttagatgtgtttttttttttctttttctttgggtggttcatttgtctttcagttcgaaaattaaatctttttgtgtgtgattcaagattcagaatactgagatgagctgagggcaacaatttagcttgaatttcatgttgcataaactaagtaatggaagacactggtccagctctaatggttttgattcatgtgtttttctgttttatttagatggctcttgctgccactaattatgagtcatttaagacccttaaaattttcaatcttgatgtgttttttccccttaatcctttgtttttagtgcaagggtgcatgtggaggttcgtaaaccttgattctagcagagttacattagtaactggcaagatgcacgtagcttttatttaacagtgattaattgccaacggtgatgccaaattaaaacagtgattaaccatcagttatgataaacaattattcatgactgaagattgtttgcctcttcgaacctgtagtggttgtgtatctattttttattaaatgaatcattacataatttctatcattgttttgcaaacttcttttaaagtatcattgtgtaattagatttttcgtttatctcaactctcaattgactattgcctgatatttacttgatttgacttggtaaaatttccctattagatctaaacttgtctgcgcaatgaattcacttcatgtatgctgttatttggtgacaaaatatgtcgacacgttgtgttttacaggttttgtaagtttggattgtggtggtaaagaaaat

SEQ ID NO: 23518 - DNA, 662 bp, Glycine max
  Intron number 1 from transcript Glyma10g28460.1 (locus Gly ma10g28460) derived from phytozome v7.0 (chr-ID Gm10; pos 37356590 to 37357251)
tgcacaaccagaccagagattcaacgcagaaactggtatctttactaactctgtgtttctttcttcattaaattatagtttgccaaatctctctttatggtgagtgttgctatttaatttgatgaatttggggtttggttcaaattattattgtgaagctttgttagcagcagtagcagacacaagaattaatttcgatcacgcatctctcataaccctatttattattattgaaattattttttattcgacagtgacagatagaccctcatggcgggtcactgcttcttctgtctctctctctctcttctcaattatggagggattggattggatgcattgcctgatgcaaccactgccagaaaaaaaaaaaaaaatttgtcgaaatttcattggaatcaaaatcaaattttcgagccttactttgaatttgaatctagtaaccttttcgtgaaaagaagatccagtactttctaagctactactttattgtttatttgcctgattcatttattttttttcttgcttgggtatataattctaattccaattaaattaaatgctcaactaccgtgttcacacggaggaatgaagtttttaattgctttcattttcttgaccatgaagtgcttatccctggtccataggatctgatttggttc

SEQ ID NO: 23519 - DNA, 874 bp, Glycine max
  Intron number 4 from transcript Glyma11g03510.1 (locus Gly ma11g03510) derived from phytozome v7.0 (chr-ID Gm11; pos 2353812 to 2354685 reverse strand)
cacctcagtcccagcagtacaggtattttagttgcttacaacttacatgggcaatgcttattatttttgtttgtcgagtttcttgtgaaattagattattgacacatgatgttggtttcaattgcatttgctgcccctaattaatgattgcacttataaggttatataacttcttgtgcacattctgttttacactcgtaaagtccaaactgctcatatattatgttgacacgaactatattcagttgttttttttataaagcagaagtgtcttctatttgtcagaattactggcaccacctatatggacgcgcttttgtatgctgcaatacaatattgactgtggttatctttgtgcatgaaacatggtaacctgtagatatatttttgctcgtgcataaatatttgggggataatttcttgatgttggttggatatgttgtccggtgttatatgttctatttaacattctaggtaactatggagagaatttgacttgaaaaataaagggttttatagagattgatcggaaattgaatttccttattcttttgtttgactttgactttacctttatgggtcaatcacattgtgatttttttaaccagattttgagctttgaacatgataactatacacggattactaacaataaacaaactgttaaccttttgaacatgaattggatattgtgaccacaaaaacaagaatgggaacagaataaagagaactactacgtgttaaattggtttaaagccggaggttgatttgatctgaagttaattgttgtacttaagtaaagcattacaacgtgattctttctatcatgttttcgacagatttggctttcatcagcctccgctgaactctgtta

SEQ ID NO: 23520 - DNA, 454 bp, Glycine max
  Intron number 1 from transcript Glyma09g30040.1 (locus Gly ma09g30040) derived from phytozome v7.0 (chr-ID Gm09; pos 36951338 to 36951791)
cattttccattcgtagacgccaagaaccctaacaggtactgccccttctcgctcagctcaaacattctcgtaccctcttattttttcttcaaatcattacatgggttcacatcaaaatctctttttttttttcgcccccattttcacactttcattttaatcttagatgttgttgttctgtttagtttttggctcaaagatctgatttttttgctcttttttatgctaaaatggatcttagatcaaaacccagaagctgaaatctttggggtatgaggttttgcttgtgtgcatttatgggatttgtgtaatttatccccttttctggtttgactttatttgagctgaaacaaaggtgagtttttaggtcagacaattacattttgttttttttttctttttctattttgcatattaattgctgtgttttgaattgtgttggtttgttaggaga

SEQ ID NO: 23521 - DNA, 619 bp, Glycine max
  Intron number 3 from transcript Glyma08g43000.1 (locus Gly ma08g43000) derived from phytozome v7.0 (chr-ID Gm08; pos 42901246 to 42901864 reverse strand)
gctgctttggtatgcatttccagaaagcaatttttttaatgaatatatagtatctacaaatatatctaaattaatcaaaaactcgagatacaataaaattatgaattatttattgacatgttatgttaaaggtttaacatgtttgtcagtgcatgggaacctggtgaaatttaatattagtctttcagaagaaaaaaaaaaaactttgttaattttgattctggtaatttaattgccatttactaataatgtgacatctatttagatatgtcttgttaaagtgatggctggtgtaacatgtttaatgttagacatgtcatattaaagtgatggctggtaataacatgtttaaatattagacctgtcatattaaagtgatccttaatgtaacttgattaaatatactctttcatttacctgacatgttatggtcaaattatgtttctgtctctttcatttggtttaacatctgttgagaaaaaagatatgcatataagttgaaaatttgaaacacatcaagttaaaagttagcatgcgaaatcatatttgaatttagattttgaactgtggtttgttttgttgttgttgtttgtgacatagttgcctgggagaacaaaca

SEQ ID NO: 23522 - DNA, 777 bp, Glycine max
  Intron number 2 from transcript Glyma09g37990.2 (locus Gly ma09g37990) derived from phytozome v7.0 (chr-ID Gm09; pos 43495828 to 43496604 reverse strand)
cggtatgaatgctaatacatgtattctttctggaaatggtgttagctgttatttcttgcttttattgtttggctatttatttatcagcatttttttctcgtgtaatacatacatatttatgtatgtatttatgtttttcttctgttgtctatttctatataagatgacatggggaaacatatgtagtgaagatgggatctacatgcagtgaaacatattgatcaatgcttgacttagtctgaccttatcaagatgggatttgaacaagttcctgtattgttatctgctatacctataatctctttggtcttgaaactacttgtaatgtgcttagagaaaagatttccttaaccttaaccaattacagtaaaaacagcattaagtaatgaacttatgtctgtggtggtgccttctgttttcatttatgtctgtaatagtaatatggttttagatttgcaataacttcttgagaaagagctctagcctatgctgattttgtcatagcatttccagttttgcacatacttttagatttgaagcgtctaattaatccatgctatcatatatctcctcttcaggatttttcatttgtaatcactttcaatcatagggattgcatccttgtccataattagagatgaaaccatttgagttttacaccggttgttttattgaaaatatcacatttctgtatacagatcgtcactctgaattgagacttcgtacctttttaattaaacaggtcagcatcacgacattctagggcagcttctagtg

SEQ ID NO: 23523 - DNA, 532 bp, Glycine max
  Intron number 1 from transcript Glyma12g04090.1 (locus Gly ma12g04090) derived from phytozome v7.0 (chr-ID Gm12; pos 2671850 to 2672381)
cttccttggagccgcagctgccctcgtcttctcctgtaattcaatccctaatttctcaattagatctatgctcgtattttcttgatctcttttgaatttcactttatcaggaaattttaatgttcgatgcgcaatttgatcgctgcatgtaaaaaaaaacatatgttatgattgatgattcagttgtgctttggtggtttttgtggagcaatgattttgttggattcaattaagctactgcaaatcgtagacttagttttacatataaactcagaggttttatctcatagatcagtagtcatttctcgtaattattgttagaatcttcgttgttttggttggaactcagcggacaaaataagtctattgaaattgcttcacgttgtttcgattcttgaaattgattggtggaagaaccgttgaatagttatgtatataaagaaagaaaaagaaattctgagcttcttcgatagctttgcattttctgtagatttatctttaatatgaattgtttgaactgatggaggaaggt

SEQ ID NO: 23524 - DNA, 807 bp, Glycine max
  Intron number 3 from transcript Glyma10g28600.1 (locus Gly ma10g28600) derived from phytozome v7.0 (chr-ID Gm10; pos 37480554 to 37481360 reverse strand)
ggattgatcctcaaagaagagccgagctaatcaaggtctgtttcgatgtttttttttcttaaacctttatttacctatcttaagctcaacatggttccttggttttatgtgtcaacatacacttcatgaatacttttttttttttttctcttcatatgacatgagtatgctttactgagtttgtaagcaaaacaaagcagcagcagggcaacaccatgaataatttacctttagtgtttttcttaaccacctaataaaattgaccacgattctttggcaacttgttttttctttgtgggcatagatatggctgtaggagtggcttagtaaccactgaattggcatgttgtttatacaaaataccagtttgtgtgtaaccatgagaaatattatttgacttttattcatttcctaagatatccttctttttccattgggcctctttggttcatttatgaatgtggttgtccatgaggtttctcttaacttatgtagtttatgttaataaaatataaggaaactaactcattgaggtgaatgcatttaagatgttaccagcatctatccatgaatttgatattagatgccagatggcataaagactgagctttgcagtgccagatttgaccaaaataaagccattatggtctcttgatgttcattttctctgtttatgcatggctatttctggaaagttttttgtgggaatgcataaatagttgtctctggaaatactgtttcttaatttctgttttgctgttcaattgggtaggtattagatatcgatctttcctggagattgcataa

SEQ ID NO: 23525 - DNA, 940 bp, Glycine max
  Intron number 1 from transcript Glyma12g33860.1 (locus Gly ma12g33860) derived from phytozome v7.0 (chr-ID Gm12; pos 37057205 to 37058144 reverse strand)
gtttctattcagtcattccggtgaggattgatttataaattaccttcttagtactgcagatgtctatttgctcatcctagagttgctagtaatattttcttgtcaatctctctcttaaaagctttattagatggagtgcaagttcaaaaaatgattttatataacatttatttttaaccaaaaatgaaagaaggtttgtgtctgtgattgtgtgtgagagaaagggttacacagaactgtgaatttatttttcatacaagtgctcaagttatatagattgtaggaatagtattaacaatcttctgcagttacttgttaaatattgtttgttgcattatacagatgttggtgttgctcgacacaagaggtttataattagtagagctgaagttacaatgcgcatgttattgctgtataactgaacattttaaatgtggtgattacagagaaccaaaggtgtctctttagcttctgcaaagtagttggtgtttataatgtcattaatgaaattataatttagttttgcctagagagggaaattcagtacaatctggaatttgacattggcaaaaataaatatatattttatgtattttatttgcaagtgttattctgtaaattttcagattgtaatcagatgaaatttcttgcttggagctgatcctatttcatcatgttctgttgaatatatgtggtttttcaagttcgtatgattacttagctgtatcagataatttttacttagagatagatttttaatatgtgtttcaaaaacctctgctcattcatggattgtgacatgtattgctgtttgagtttgttgatggtatcctggttcttgatgtgtaactaaaatgatttttctaactcactgcattttcattaattaatttgataacatgcaggagacaagactcaaggaactttttgatagtattcc

SEQ ID NO: 23526 - DNA, 896 bp, Glycine max
  Intron number 1 from transcript Glyma12g31250.1 (locus Gly ma12g31250) derived from phytozome v7.0 (chr-ID Gm12; pos 34824429 to 34825324 reverse strand)
gctcttcccgcttggttctattttaattaattaaggtattctcatatatttgctgcatgctacaactttttgatctgcgaatttttattacgttgtgcagtgctgtcaaactgaaaaggttcacaataaacaagcgcacacacacactaaccacccttcttggttcttggataaccccgtacatgaaatttttatttgacaccatacttgtttacatgttgctagctatagcataacagggtcggatttagctctcggatcccttaattccctttattatattgccacaagagacttttacatttctccattagcttaattcctccttctgaaaaattgttttagttcaacttaacgcaacatttttttatcagccaagaaaaacatggattagatagaggtacaagtacaagtgaccccaaccctttagaatatcaaatactagtcactagctactaattatgttgcatgttcctgtgcttggtttaaggtgagaggagaaaaataagagaaatttttttttcatgtaagacttacaaattttacactttattttaattttaaaaaatttattttattttcatcctctaaatcaaacacacccacgatatctcgatcattctggttttcacacgcactatttcactttatgacttgctttgacgggtagattaaaaacaaaatcacctgctaattgctactccctcttgctctatttatataattatgcgtacgtaactgatttaacttgtttagaaaatgctggtcaaaatatatatatatatatatatatatatatatatttaaaaaagttattatttcttgaaaatactaattgtttccaatgactgacttagaggaagagttactttggttggaaaaggtctaacaaaaaa

SEQ ID NO: 23527 - DNA, 438 bp, Glycine max
  Intron number 2 from transcript Glyma12g30430.1 (locus Gly ma12g30430) derived from phytozome v7.0 (chr-ID Gm12; pos 34051824 to 34052261 reverse strand)
gttgtcctcaaacaagtgggcttcaggtaaatgcaattttctctattttttaaggccctgtttgaataaatttctcaataaacacttataggaaaagaaataagaaggtaaattgaattaagcttctttgatgagttaaaattagttttgtgtaagctaatttataaaagctctcacatttagcttcttgttaactttaacttctgcataagctaattttaacttaaggcagaagcttaattgattttatatttttgttttcttctttgtaagtatttattgagaagttttatgacttttatccaaacacggtctaatttgatgttatgtttgtagaatagtaaggtgaacaatatgccccaagaatttgtgaatattttgtggttattggattttgttacagattcagctcaatttttttgaccctggaagttcatc

SEQ ID NO: 23528 - DNA, 798 bp, Glycine max
  Intron number 2 from transcript Glyma12g08670.1 (locus Gly ma12g08670) derived from phytozome v7.0 (chr-ID Gm12; pos 6423802 to 6424599 reverse strand)
ggaaaggcacaacttgttactccccagctactcaagtaatgtataattaaaccatctaggttttatataactttaatttttatataaatactttttacatttcaatatttttggaccagtgtttggaatttgcatttacatgaccctgttagtggtagaaataatggtttgaaacccgagtaggttgcttggataagttactgtgagggcttatatgtcattgtagtgacatggaaagtaaactttgtctctgtgaagagctcgtttgaacatatgatttatatgtgtgtataatctgaggaaacttttaagaccttgtggatttgattggagatgaacagaaagatggcttagagttattcattaagaataaataggaagttatttttattccatccatgggctttgatgttttgggttggacagggtttttgtgttttctgttaagtgtggtggttcctgttgtatgagttcaataataaatgctcatggattaccaaaagaaaaatttgttgttctctttcacatgagattgcttttgtgcgtttttgatgatgaaataataaaagttccatattcgtgagtgtgacaaatctttcttttagtaattcctgcgtttctttgtttcagactctttctgtctgtttctattagagagatgatagttggaaattcaggactagctatttctatgtgcagtgagtgacatataaaacttgttgtttgccacagttttggactgagtttcccttgcattgtcttttgaactcttcattttaaccttctctccccagggaa

SEQ ID NO: 23529 - DNA, 835 bp, Glycine max
  Intron number 2 from transcript Glyma10g24270.1 (locus Gly ma10g24270) derived from phytozome v7.0 (chr-ID Gm10; pos 31412538 to 31413372)
cttctttcttcgtcattgttggtgacctcttgcaggtatatagctagaaagtagaaaatatatatatatatatatatatatatatatatatatatatatatatatatatatatatatatatatatatattactgagatgaaagaaaacaaataaaaaaagccaaaaatggaatataattgacaggattgacgggattggtgcaggatatatagtgacatttgggaaaagtaaatgataaaattgtgagtataaaatgttgtccgtccatagacaatagggcaggaatatgaacgaaatagagagaagagaaattaaaaaagaattatgaaagaatgtgagtacaaaaaatatacatataattatataaatgctgtgaccagaaaaataataataaaagaaggtatattggagtctgtagaaataatatatgatgtgattgcaaggggggcagaaaaataatttaccataaaaaatcttataaaaatgtaattcaaagaataatagaactctaaataaaatatcagttctctcaaaaaattaaataaaatatcagtttacaagaaaatggtccattttttaattaaattttggatgaaacaacattatttctatatccctagaaggcagtctttttcctcataatgtgccagcaattgatttgtggtttttcagtcactctttttacctctgtatgggtggacgtgaatgcgccaaaaacaaatactagtatattttcatctgggaattttcactgcatatattcagttactattcactattttttttgttgggctttcgtttttcttttctgattaaaagtctaaatttcaggtg

SEQ ID NO: 23530 - DNA, 646 bp, Glycine max
  Intron number 2 from transcript Glyma11g32970.1 (locus Gly ma11g32970) derived from phytozome v7.0 (chr-ID Gm11; pos 34690353 to 34690998 reverse strand)
acagaccctcttttgatttaactccagcccaggtaattttttttgtgatttaattactgaagcagtaatttgatagtactcattaggtaattctattaatttttctcttggcatcttcctccaaaaaataaataaataaacaaacaaacaaacgaaattttataatgtgactttgttgatgatgtgcttcttctttaaatgagataagcttcttttgaactatttgcagaaaccaaagccttttcagaatttcatacgataaaaacatagagctataaattcttattgaaacatctacctttttaccatatataaaaaataaaattcaattgtatttcggactatgtgttttgtttattgtttctggaaatttcactcattttgaaaaaaaattgtagtcacgtacaatttatagcttggtctgaacttgtaacggcttctttgacacccatgtttcacatgcttggtttttttgttgtcttataatgtttgcttgtgttgcataccttgtgagatcaaaatagcatttcactctctacttattctttctattaaatattgtttataactatggcatgactaattcttagtgtcgaatcttcaattctcaggaggagtgcttacagaggctacagaatcgcattga

SEQ ID NO: 23531 - DNA, 730 bp, Glycine max
  Intron number 3 from transcript Glyma10g32190.1 (locus Gly ma10g32190) derived from phytozome v7.0 (chr-ID Gm10; pos 40636452 to 40637181 reverse strand)
gctacatatcagctagtgaggtatacattttatttttcttttcggtggcattagttttctttctttgatgtcaacgtcatttcaaatattcattaacaaatttttttaaaaaaacatattcattaacatgcaaaaatttaataaagtgctgagggtttctgctaacgtgaacaatgcaggtaggaccaagtggccaggatatgcttgcaaattagtttacagctatttttttctttaaagtgtcagagctcttgccattttttctctttaccttaataatatattgacagagttttcaatttttgccattttttaaatataacgaatgcaatttgcaattatatatcaggagttaaaaaaggtcatggccttttttaccaaagaatcatttacaggagttttattttattttccacattttaaaaattatttaattttagtattatttactatttagacttaggcatgcaaaattttgcaatttttatatgtaaaaattaacaactaggacagtagaccgtacgtttccgcatgcaatgaataatagctgtttgattagaaaatgaattggggtattgacatttgagttctgtagagaatcttacgtttatctttctctctctacgtatataagtgtatacacacacttacatacacatagctaccagtatactatatgtgatagtaaaattaatatatctttctgtgttgtgtgtagttgagacacgta

SEQ ID NO: 23532 - DNA, 1035 bp, Glycine max
  Intron number 1 from transcript Glyma10g40030.2 (locus Gly ma10g40030) derived from phytozome v7.0 (chr-ID Gm10; pos 47566166 to 47567200 reverse strand)
ccagcacatcaggccgtcgcgttggaaggtctcaagtaagtgccttccttctttttctattttacgactcgtttccaaataggcaccaactgtattgattattctagttcgatggttattggagtgcactggctgggaaattgacatgcgttttttgttttaaatttttgaagtattagaatttgaattagttgttagttcgaaagtattgtattttgtgacagggagtgttcgacagtgcattctgtgactttttattactgtttttacttgaagtttctggtattgggaataaattgaaatgagaaggtgttcaacactttagtaattagtgatactgatcgaggttcaatcctttaagcttcttttacttgttaccgatagtcatttttagatggaaggatggactgatacaaattcagattgatatgaaagggtaatagtttgctggatctaaatatgagaaatcagaaatgccatggcaagtgttgtagaaagaaagatgtaatgggaattgttacatgggttggggaagttactattattatcttcaaggctgtatactttagaaataggtactggttgcttacttgatttttaattgctaaaacgtttgtacgtaagcaagtgaactatcttttgtatcaattatcaaaagagggtaccacttgtacctaatgctgtttttacttgaagtttctgtcactgtagattctatatttgtcctatgcatattctgctgaaacttttttttttgtgccatattaatttatgatatgtttgtcttttttttttttggtttttattaaggcaagatataaatttttcaaaatttttaatatagaccgggtcatgcgggttaataagtgacccattggttcgactactgatccaatgccttgactgggtcaatcaccatttggcttttaaaactatgcttcgtagttcctaggccaatgtttgcatttgcttccttatacactctctggaactgtcacaggattttgagacagctgacaagagacaacaagatat

SEQ ID NO: 23533 - DNA, 701 bp, Glycine max
  Intron number 3 from transcript Glyma12g10150.2 (locus Gly ma12g10150) derived from phytozome v7.0 (chr-ID Gm12; pos 7995657 to 7996357)
ctccaagtgcagtgggtaagtgaattcggagtttgttttggttttgattggtgattagtttttcaggggaagaaatgcttttttagtttttaaagtatgatattgattaatttgatgtagcatggtcctaaattgtggtggcagcctttgttgcaattcttgatattactgggaatttcagacaaatgtggttgatgttcttgtggaccacaatttaaaatcatggagcatagactagtttttttgtgtgtgtattttgagggtttggtttttgacaataatctttaggggaaacatggtttttttgggcttaaaattatgaatttgattatggttcaatatatctttagcccatgtagattgggcattgtttattttagtctcttaaaagtaaattttctccttttgtttccttgcttatgtaaatgtgtgatatatagatataatttccataaatgaagaaggatcaacagaaggaaatttttttgtaaaaggcaagggctacatctgacatattttcatcaaggagggaccaaatgatgacaaattattttgagagatatattttgcccatttgattatttctccagcatagacaaaaatattttattttctgggtaatcgttgctggtttcacaaatgggatttacattggttgtcgtttgtgaatttacagcaagggttctaagtctggtgcttcg

SEQ ID NO: 23534 - DNA, 730 bp, Glycine max
  Intron number 1 from transcript Glyma11g17960.1 (locus Gly ma11g17960) derived from phytozome v7.0 (chr-ID Gm11; pos 14431308 to 14432037 reverse strand)
atcgtactgttccgttatcaattctcgtgtttaaggtttggttcccttggaccctgtatttttcaatgtactttgatcacttttttctttcgaagtttgtctctttttttgcttcttcttctttgggtctttgactgtttgctgggtccgcttcaatttatgtcttcttagatgtttgtgtgtgtgttttttttaccagtttttccatccctttggaataccctttattttggattggtcaacttgctcatttttgtattaataatgaaaattgggttctctattttctttttctttgagaaaaaaatttggatgttagatgaagggtttaattccttatatttggttggtggatttttttttttttcatttggaccacctgctttattatctggtaagttatgtgtctcaagatggggttcattttgtttttctttgatggtggcttttgtgctattttatgtgcagacaagttttttttggtttctttcccaaaatttcagatttgggtgagatattgattatggagtttaactggtgtgatctctcttagatgacactgtaatgtggcttttgggttgtgtctttatatcagtttgttggacaatcaattagtatcagtttattaagtacctttgctatatgattctaaactagattttttctgtctcttaccatctttggctggttccaagattcaggacacaatttgcttgatacattttcaagt

SEQ ID NO: 23535 - DNA, 997 bp, Glycine max
  Intron number 1 from transcript Glyma08g45440.1 (locus Gly ma08g45440) derived from phytozome v7.0 (chr-ID Gm08; pos 44823624 to 44824620)
tcagtgttttccgcaatacaccgcttctctcaaatgtcagatactcactcttgttcctctcctccttcatcctttacagttttttttttttttttcctttttactttttacttttccaattgaatgcatagggtacgttttctgatgactgattatgaaatggcccaagaaagttttaaccttcacagatatgtgggtattttaacctaaaggttaacgttatggtgtaagttctcgatgtgttttcacgagtgagaacaatttatttagtgggagaagaacccgtatttggttttgactgtgtgtaaaattctcctgagtcagcgagcggaattaggttaacccagtgcgttggaagacacctgtggtgacttacctagaataaaaaaaaatgtgggtattttccatacctaagaaatatcttatatatatatatatatatatatatatatatatatatatatatatatatatatatatatttaataattttggtattaccgttttgcaactgtgtataattaagtgatttcaattggggattagctgattgtgtcaagtgggaatcaagcagttatcttttcaaagatgaaataagaaagaaaatagatgtaaaagaaaatggaaggacttgtggacttatggcttctgacttcaaactttcatatcatactgtttatttcaacgagtgccatcttttgattgatggttgaattaagtataaatgtggagtgaatgttggaccagggcaactgttgttggtatactcaagtttgatagttcatagttatatgattaatttgaatgtttcacatttcctctatgggatcatgactaatgtctttaaatggttgaaaattctatgccactgcttgggaagtaagagaaagcctggtaactaatgactgaccttgggctattcagccaattattagtgtatcttacattgtttttaaacgtttccaggtttagaagaatttaattctgataagagtaa

SEQ ID NO: 23536 - DNA, 891 bp, Glycine max
  Intron number 1 from transcript Glyma09g40520.1 (locus Gly ma09g40520) derived from phytozome v7.0 (chr-ID Gm09; pos 45440896 to 45441786)
ttggtatgtaaaaaaatagtttttattttttatttttttttccttttgtgtacttaatttttccttgagtttcagctttctgtcttttaaaagtttaggtaaatgccagatacgaagcgggtttatgcaaaagggtggagttttttttttattatttgtttttttattttgctcttttagaaaaatctttggtatttctggttgcttttgctctgttcagagttcggggcttagaaatatttgaagtgaatgagtggtttgttaaaaaaaaaaaatttatgatactgagtttgaatttgctatttttaaacatgttttcaaaattttcttaccaaagtatgttttgaagttgtaataatatagcaaaatattttcctatttttgtatttattttaatgccctcttttttcgtccttttggttacgaatcaaatttctagtttcagtacttgaaagttgaaaacttgataactgagcatgtaccgatttttcagagatggaaacaaaaggaaaaaaaatgaactttgttagaaaataactgcattttttcctcatatgattttctattcaaaccctagagtgatgtgatttttgcattttagtgcaaagttaaaagttttaaatggatctgctaattcagctaaacaacttaaaaactccaaagtttgtgtctttgttttctttcttcctagtttgtgggaatcctttgatgggttttcactttggtttccttgcatgtttaagaatggttcaaatccttggttttgctagaatgctcaaatttttgcaatggcatgtgctttaatgagccattttccttactaagtatgattgtacgactcatttctgacttgcagattttggttagattgtgtagacttaggagtgaata

SEQ ID NO: 23537 - DNA, 553 bp, Glycine max
  Intron number 2 from transcript Glyma12g03050.1 (locus Gly ma12g03050) derived from phytozome v7.0 (chr-ID Gm12; pos 1958053 to 1958605)
ttctttggggacaggtaagcaagtgcaacagacagggattttgagttcttttggtctgttcaccaattttcatctgcctaagttaatgattgcagtacctatacacaagtttcctaattaagaccatattaagtttttcattattatttgacaacattgcctttatttatcattattactctacttcaaatatatatgtatcatttggtttgacaatttactttcatgtgaggagatcaataaacttctcaataagtatatatagtagaagaaaataagaagataaaatgaattaaatttctccgggaagttaaaactaacttatatacacctcaatttttataaaagttttctcatgtaacttcttcaaaaattgaggtgtgtatgttaattttaacttatgaaagaagtttgatttattgaaaaggttatcctaacaaaaccagacttaaccatacatggctcttcaaaagtattattactctggttgaacgttaagcatgcttatggtaatgtaagatatttcttttctatgagaaatttcaggtgggag

SEQ ID NO: 23538 - DNA, 692 bp, Glycine max
  Intron number 1 from transcript Glyma08g43790.1 (locus Gly ma08g43790) derived from phytozome v7.0 (chr-ID Gm08; pos 43588811 to 43589502 reverse strand)
ggtatgaacgtggctagatttttaattattaattattattcattatccatatgctatctcttttcttttggggggaggggttgttgatcggatgaggattccctcaaaccttaatcttgtttttcaacttttacaaaattgatatagctagtttttaacttttaatgggtgtaactttttacctttttgggcatttgattgtttctcagcatattttatattcattttcaaattaggaaaaaggtcatttatatgctctatcttgaaaatacattcttttttgaagaaaatctagtgtagcatgaagtttgtttttcttgtctagaaggctgcatttgtgtcatgataggtagacagttgcttataactacattcatggactagctaggataacttttggttgaagaacatcacttttgttttgttttatgggatttattgaatattttgatcatcttgttattttttatatatatatatatatatatatatatatatatatagtgtttttttgccatctttatcatttagattggatttgtaattttttcttcttatgttatgactccttttatttttattatttttaaattatgctcaatctgcaattgtgtttctttatgtttattttctcaacagtgtttgttcatttctgttaaggttgttttgacttcttgcagtgacgaaaagct

SEQ ID NO: 23539 - DNA, 779 bp, Glycine max
  Intron number 2 from transcript Glyma09g12330.1 (locus Gly ma09g12330) derived from phytozome v7.0 (chr-ID Gm09; pos 12981562 to 12982340 reverse strand)
atcttcagaaactcatagattgctctaacgtgcaggtataactctatacaattaagtatttctttcattcctaattataagatacttttaagaaaattatttgttttttttataagatttttctctagatgcattgatttttttttcatacatatacttaattatattctctaaacattcataagaagcaattgagttgagagataagaaaagggtgattttgaaatgataatatgattaactaatctaattactaagatcttataattaggaatcaagaaagtactagctagtagtattccataaaaaaaatagaaaaaaaatactagctagtttattacttcttctgtccctaatcataatattcttttcaaaaatttgtttatccttttttataaaactattttttaattttttagtgtattaattattattttttcttatatattcttagttattctctcttcaaacattaatgagaaagaataaattggatagaaagagaataaaaataataattttaaaaatgatagtataaatagttaataaatataatacaataataattactttttttaagtagcttaatctttataatgtgataccgagaaagtatatgagaagttaattgattcattagaatattaatatatattccaattcaatgtttcttagctcttactaaagtaataacttgacaatagtatgtggtttgctaattcaaaaacttttcaattctattagccttacaccatcaatagtgccaaggtggtgttcat

SEQ ID NO: 23540 - DNA, 595 bp, Glycine max
  Intron number 2 from transcript Glyma09g02450.1 (locus Gly ma09g02450) derived from phytozome v7.0 (chr-ID Gm09; pos 1638817 to 1639411)
actccacgcgaccccatttccctatacttcaccaggtatctatttcctcttcttatcttcaattttattttcctagatgcagcctatgaatgtttggtagtgtattgggtaatcaaggttcaaattttcatttagattattctgttatgaatttaatgctacttgatggatggacaaagcaatgaccctcttaaacataagaagaataaaggcagtagggattgaactctcgagcgctgagcacttagttatagagggtcaagattcatcccccaaactttgctcaatcaatgtctcaataagtgttgtagaatgcatgtgtaactatttcgtgtgtgccttgtgtttttctgtgagaaatatgttggcttattggatgaagtatatacatttttgccaaaccaaagtcaaagttgaaatatccaatcctcatatctagtatcatactatgccctactctcagtaaaaaattttgccttgatgtctctatgcaaagtagacctggaattcacgagttgcatatctggcatttggtatgttttttttggtacatattatgaagttatgatactttaactccctccacaggaagtaa

SEQ ID NO: 23541 - DNA, 196 bp, Glycine max
  Intron number 1 from transcript Glyma09g39440.1 (locus Gly ma09g39440) derived from phytozome v7.0 (chr-ID Gm09; pos 44524220 to 44524415 reverse strand)
ctgcggagaaagctctctctctgctctcaaggttggtacctctctgttcagtcttcattccacccaattttttttttcaatattttcttatttttctttcaattttgtttttcttttgctctttgaattcacaagaatgctaaatcaagctcatgattaatactctgtttggaaatttgcaggctgccaaagtgag

SEQ ID NO: 23542 - DNA, 396 bp, Glycine max
  Intron number 2 from transcript Glyma10g02220.1 (locus Gly ma10g02220) derived from phytozome v7.0 (chr-ID Gm10; pos 1542261 to 1542656)
ttctgcaactggtgagtctcgtaatgttttcaatgttaacctcgtctagtagttgcattttgttgtatgtgagatgttgtaaaaattcattgttttttgtttgccggtggttacttaggtcctgtttggataaactttttacggagtacctataggagaagaaaatgagaaggcaaaatgaaattaacttctcccataataacatcaaatttgctaagcttatgctaatttcaacttatgcataagccaacagaaactaacaagtagcatttgcggatcaaaaaaagaagaagctaattttagcttatgcaaagtttatccaagcaggaccttaataataggtttaagactcacgtgtactggtatgcttttcaacaatgcagggtggtgacgtat

SEQ ID NO: 23543 - DNA, 268 bp, Glycine max
  Intron number 3 from transcript Glyma10g02220.1 (locus Gly ma10g02220) derived from phytozome v7.0 (chr-ID Gm10; pos 1542711 to 1542978)
tcattcaagttctcggttaagtctcaattccatctacctattgatgtaactggttatgaatataatgattcttcgtagctgcaaaattttgaatgatctgaactatggtttagactaatcagttatatccaaccctaaagtagttatgaaaatttgttgcttgagttgtataaagcatgttatgcaagttgcttctccagcagttttttctgtttattcaactggttttgctgattgcatatatcaaacttttttgcagaatcagata

SEQ ID NO: 23544 - DNA, 866 bp, Glycine max
  Intron number 2 from transcript Glyma09g30080.1 (locus Gly ma09g30080) derived from phytozome v7.0 (chr-ID Gm09; pos 36988704 to 36989569)
tcctttccccgactttcgacgtttccacgtaaacggtaaccgttttggatttgtttcatgtttttagaccagttaggttagtttcctcactcagcagttagttacaaaagatacaaataaaaaattatgagttatgttataggagaacactattttggtcaatgactgtgtaatatgctgtaacttaagttcatgaaactatggaaattcaaaataaaagttcttaattttaacttctttctcttactttagtccttaaacatacgttaatattatcgtttaagtcagatgactttctgaaaaaagtgatttataaattgcactttcagttatttttttgaaatcttcttacttctaggactaatgtcactgcactatacactttcagaactataattgtgtgtgttttacccttatgttattcatactacatttttaaaacaaaaagcgatatgtcaataccaaaagattttagtttatctctttctcagtcgtatgatttgttgcatgagttttgtataaataacatttctaaaaaattattggattagctagactcctaaagaacttggcaactaacttgacaagtttttctaactaattgaaatgcctgtttggatcaatttgtttgattctctataatataataacttcccctaaaatttaagctagatcaaacgtgcactaacatgaggcagtgaaagaggtgttagtatagttgataataactcttgagatgttaatgtatattttaaaagatgggaatgagataatgttgacttttgtgtttggattcttttttgttggttctaagtgcctatttttaacctgatttctaggtctctctgtgtgtttgaagtcaggac

SEQ ID NO: 23545 - DNA, 1059 bp, Glycine max
  Intron number 2 from transcript Glyma12g08600.1 (locus Gly ma12g08600) derived from phytozome v7.0 (chr-ID Gm12; pos 6356567 to 6357625 reverse strand)
cgaaggttttcaacacttttcgtcttattgctaaggtttgttaccgtcgatttctgaatatcgtgcatttgggtcgttcgcttattcacattacttcttgccatccccattgcctcaatcttgtgttttgttgttttaaatattagtgtctagttttgtctcgacaagtttggacctgttttgataaacttctcaataagtatgtgtagtagaagaaaaataagaagctagaatgtattaagtttctcccataaattgaaattagcccgtggttgttgttttaaatattagtgtttagttttgtcttcacaagtttaggtcctatttggataaactttttgataaacacttagaaaagaaaagaaaaaagtaaaatgagatgagtttctctcatacttaaaacctacttatatacttcaacttttatataagttttctcatctatcttcttcaaaaggtgacgtgataagttgatattagtgtctagttgattttaatctaagttgttcaacttgcacatggagtttaatttgaaatagtgatattacattacaatattgagtgattgaagaaaccaagcacagcatggccacgggcctttgatttgggataaccaggtctcgtgtattctcacatggtggtagcaaaggatttgcaaatatgaattctgagataaactgatattggtgacttggagtgtgttattggtacccttatcacatagtgttgttagaagtttgttggagtttaatttgctgtaccatgggaaggaggtttatttatttattttttctatttggcagggacatatttttttgctgaaagctatgttatatgttcgttttgatctttaaattccttgttatctgtgtggcgggtatgttggatgttagtatgcttggtctatgttctgtaagaagaaaagattattttgtgttgggatttgaaacagttttttgtatagagctgaatattgttaaattttgctggtacattgtctttatttctaaataaatgtctacaggaatctgggaaagaaagtcaagagaagaaaaagaa

SEQ ID NO: 23546 - DNA, 753 bp, Glycine max
  Intron number 1 from transcript Glyma08g44320.2 (locus Gly ma08g44320) derived from phytozome v7.0 (chr-ID Gm08; pos 44010009 to 44010761 reverse strand)
ttcagacaacccttcaaaaacagactctctcaaaggtactgctacctacttactgtatatttttatttcctctatcacttttttcccccacattttttctttaaatatttctggctattatgaggggtgagattctatgttggtcactaaagactcactctttattagtaacatcaacatgagatttatcttatgataaaagaagccaagatgtatgaactaacaaagcttgattagttagtacatatagccgaatccttaagttacacttatttatgaagaaagttggaagatgtcataaaaaactataaaaattcttgattttagttcctaaaattcttgattttagtccttatatttcatcatttaacctttaggttattaaacttttaaaaataaagtatttttagtcccttaggacatatattattaacagcatttcttatgtagtgtgtgtcctaagtattagaaatactggtttttaaaagtttagagatcaaaatgttgaatgataaaatataagaattaaaacatattgttttacaaagtacagggattaaaacatatttattttccatttttttgacacatttcttgttataaaccatatattatgcttgtattatattagtcttattttctgttttagctttcatgccttgtaacatttattaggggtaatagatgggtatgatcgtatgaaaaagttccagagtgatacataattggaaaaaaatgtgtttctgaacagat

SEQ ID NO: 23547 - DNA, 802 bp, Glycine max
  Intron number 3 from transcript Glyma11g19930.1 (locus Gly ma11g19930) derived from phytozome v7.0 (chr-ID Gm11; pos 16738167 to 16738968)
ggctccgcaaaggtttgctttttagctttgtttttttgtgacttggtaatttgtttattttctattgatttactattgttagtgccagtgatattttttaatttctcaattttttgggtagtgtcaggattgagaaatgtgtgtcaaggtgatcaccatctaaaatgtgtttcttgaaataacttccttagttgtgacttgtgagcagagttgggtcctaaataggggtgttcaaaaaatcctattatataaaaccaatccataaccaaccatattcaaaccactttaaatccattttagtggattggttgtacatccaaatccagttttttgaattttaaatccaatccaattatttggatatggattggatgttattggattttcaaattttatagcattcctccaaaaacaaccttggtcaaggtcggccaaaagcagtcttggtcaaggtcggctgaacatagtcctgggatattatttgcctaaatgccaggaagaagatttaatggcgtcttcaggtgtatgaaatacattttcatcttgtttgttgcacttaggtgtgtaagatgttatttgcctttggttgggatattttttgtaagtgggacttgttaggactagtcattcaataaactaaaaatttgtgctagtgtatgaccttttaggaggtgatttgttttagctgttgtgtttccaaggttaaaagcataaggtcagtattttgagaaacatttctccttaatgtgatactgtgcaatttgtaggcacttactaaggaacttgtgagatctaggaaaac

SEQ ID NO: 23548 - DNA, 465 bp, Glycine max
  Intron number 4 from transcript Glyma12g37100.1 (locus Gly ma12g37100) derived from phytozome v7.0 (chr-ID Gm12; pos 40094195 to 40094659 reverse strand)
ggatcaaatttatttaaagctccgcacgagcacaggtttgttgatttgttttagttaccttactatcttcaggttatgcaatttgatagaattatacagctttgaaaaggttaattgcctgatatcgtaacatgtttttttggattattcatgcataaccacacaatgaagtttgtttgtcaaaaaatagttcttgaaattacagtagccttcagtccttcacaatactttttgagttttttgttgctgtgtacaattagtatgttatgatatcagatgattactgaaagttggctttcaattgacccctgaaagagtgaatcagtttatttattgacatgatccagttatatgtgtcgtaccatttttatttttttaaactaaatttccaaattcctaacattctttctatcatcttatctcttcccagcaccgcctcttaaattggttgatttacctgggttg

SEQ ID NO: 23549 - DNA, 923 bp, Glycine max
  Intron number 2 from transcript Glyma09g37860.1 (locus Gly ma09g37860) derived from phytozome v7.0 (chr-ID Gm09; pos 43390370 to 43391292 reverse strand)
ccttcttctgagattttctgtaagctttcaattgctttttatgctagttattattgtgactactactggattagtggattttgtttcctataacataatgttataatttttatttccatttttggtgtttttctatttagttacatctcctgtcctagaataataatagctacatgttttattctctgtttgaggtcttgactgtgttggagttctgtaatatgaaaataaaaagtgaaacaattactagccttatcactttgaatcattttgcctctctccctatgtgtaataatgtatgctttccccaattccccacacgtagaatggttgctaatttgcaggtttatcatttagctgtccaatacaataatacatgtaacatgctatagttattcaagaaaatataaatatataataaacttttggtaggtattttgatatgaactcaattttagagttgaaaatttagggagatcaaactccttacgagcataggtagccctctttgagactgaaattgcagaaaaaatgaaagaagattacaaaggatttcagcactgcagatgcactgaatcctcatttatccttattcctagtcaaacctctcctgttgaattatgctgaaagtgacgaggttgtgtctcctattgttggttttgttgtgatttgaacaagtgaatttggcctttggagaatgtctaattaaaaaataagggtgaaaaaaaggaattattaacctgttttagttcatttatgtgacttaaaaagaaagcctatggctagtgtcatataatatttttctttgacatgtagtctattttttagagattctgatagtcatgtcacttcactttctaacctaatgcagtactttggattaacttgatatcttgatgataatttatattttatgctacagg

SEQ ID NO: 23550 - DNA, 851 bp, Glycine max
  Intron number 1 from transcript Glyma09g37860.1 (locus Gly ma09g37860) derived from phytozome v7.0 (chr-ID Gm09; pos 43391312 to 43392162 reverse strand)
aatcccgagtagtacgttccttcattccctttacttcgaatcatgtctgatttcagcgaagttcgttcctttttcgcttttttcatgttccctgccaaaaggccatgtggggttgcatttaaattggtgaatatgagttgggttctgtctgcagcaaatcttgttggtgtgtaaccctagattgattggttttcatagattttgacccactgggttttttattcttttattttttgggggagattgaaatttattgttttttaatctcgagttcgcctgcgaatagcgatcgcttgtgtttgttttatgttattgattttgaagtgaagagttaccctgatcttgtcccttgtttatttcaaagagttgaactgcgcatactgtatggtagtttgatttgtggtttgcatgatttgaacggcagttcattgggagaacatcaaattattctaaacaattaaacataagattaggggaaacatgagatgctgtttgcaaggttgttacattgatatgggagttgacttcccgcattggaagcatgggatttagatttggtacttatatggtgttgggctattctacttagatcaagcaataagagaaaaagctaacgttttcttgtgtttagagaaaaagctaatgaaatattggaaatattggtttatagatcttattgaattgagactttatggttggttttctatttaactgttatcttaatgtttgtgtgtgaaagagagatggttacttctgtgtctgattcacaatctattataagagtcaaagttgatatgctgcggttattctttgcagtgattatctgttcaagctccttcttattggagact

SEQ ID NO: 23551 - DNA, 550 bp, Glycine max
  Intron number 1 from transcript Glyma12g31060.1 (locus Gly ma12g31060) derived from phytozome v7.0 (chr-ID Gm12; pos 34675766 to 34676315)
cttcactttgctattgctgcttctcactgtttcgggtttgttatcttccactaacttttcaacttctgcatgattccatggaaagtgaataaattttagaatttgctatttgagttttcttggcaaatggaatggaccattctaaattgtgatcagaatactattccttttgattagcttcttgtaatgaaagagggacctcaatgtgtgctcaaaggaatcaaattaaccattaatttagctttcttgttttttcaattgggtttgagtatctattctccaacctccatataatataagctttttagtttgtccaatatcttatctgaattatgggttagccagagtttcacaattttcttcagggtttgactccctcaaagctttttttttttaatcttctattagagattgattgttaattatggctattgaacattgtaaaattggagattttagatttgttgctatctattcttatatattctgatgtatcaaactatgttgttcttcagatttgtttgtgcaaagccgaggcctaaattttgga

SEQ ID NO: 23552 - DNA, 669 bp, Glycine max
  Intron number 1 from transcript Glyma10g36360.1 (locus Gly ma10g36360) derived from phytozome v7.0 (chr-ID Gm10; pos 44551426 to 44552094 reverse strand)
tgtataagtgggatcctgaggatttgcctggtaattgatcaaccccttatatcttgtgtctttttttgtgggtgattgttatgtcgttgacttggatttgtgtttattttgatttggttgttttgtttgatcgtttagaagttgttggtttcgagatgagggttgagatcttcatgttgttaatattggtaatgtttgatgctcatatggttaagtgatgttttggatgtgttttttcaggttagagtaccaatcgttgacttgggtttgcttcaataaggtgttgtgtgttatttgggttcttttgatttgttgatctaagcagttcaggttattgttgatgttttctgttagggtgttttcaggagtttgttttctttagcttttgaggtggatgtaagagtgattccatccgtttttttttttgggctttttaagtttcaatattgtcaatgctttggagttctaaagttttggctacttttaggaaaattttatacatataggatatggggtgcatctctaaccatctgtcatatatactcccaaaatatctttaatctgaaataaaactctgattacccttcaatttcttcttgtttgattactaactaacaatggcttgtaatattttgcagggcaatctatattgaaaactggagataggca

SEQ ID NO: 23553 - DNA, 935 bp, Glycine max
  Intron number 1 from transcript Glyma08g46170.3 (locus Gly ma08g46170) derived from phytozome v7.0 (chr-ID Gm08; pos 45347001 to 45347935 reverse strand)
gcgataacagcgtcgttcttcaaagaactcaaacggtaacctttctttctttattttgcttgaattattgaatttattgagattagtgtgcgattgaacagagggattatgcttgtttgttcaaaattcaccattgttagggtttgattcgaaattttgggacttctgttaatgcgtaatttgaatttaggtttttatggtttaatgtgagtagtgggaagttaaaaagtggaaattctgaaatgaaaatcacttcacacttgattcagaacaaaaatacgttaatgtggaaagtgaataagggaggtttatttaacagttgccaaacgagaaatgtaacgcgcgaaatcaactaggatcacagactggtggtttcttcactaactctgttcttatgttttgttcttaatgtacgtgttactctctctctccacaaccaacaccaaagtgaaattccaccttgtcttttttttataagtccaatgttttctttttatgtttatttattcatttaataattttttttatagtcttttgtagtttaataaagattttaagttatgatttgctgtacccactttcttttttttttaggagagctgtacccactttcttgtattgtcaaatttagtactacttaattatgcccttcattatgaattttcatatataagattttgaaatttgatacttaatccttcgatctatggttgcacggttgagtattttagctctcaccctttatgttttgtgcaattctcattcatttcccatcattaataaaaaggtagaacatttaattttggatcaatatttaatggggtccattcttttttttttaaaaaaatgggtttgcttcactttgcatctgcagtgtttgtccactgttttctgcttcctatttggcagagtttttatctgatctctggagaaat

SEQ ID NO: 23554 - DNA, 914 bp, Glycine max
  Intron number 1 from transcript Glyma12g05680.1 (locus Gly ma12g05680) derived from phytozome v7.0 (chr-ID Gm12; pos 3792244 to 3793157)
actaacctcgtcgtgcattcattccccgggatcaggttcgctctcgatttccccctcttattcgcgtccttttctgtttccaattctcacaacaacactcgcatcactgtcaacttcactgataactgtgtttttttcccacatggattttgggttatcttgttccttgttgttcgcttcacttttcctgctgcgaaaaacgttgttttttttttcttccttatattaaataattttgttttttttaatttgaatgatgaatgcggtgtttgtttggaggttagtttgaggattgcatgttggaatacgacacttgtatttatggtgaatgtttaatcttaatttgaggatggtgtttctggtttttgttgcagcttctctgtctgtatccttatgatagacaacattctgtattaatgtaaaaaaaaataaattgaactttttaatttcatgtttatgtagttttttcacctaaattgtcttggacatacatttgacttctcaatgttccgtagagcaatgattttgttgtgattcttggactagtattcaaaattttacccatgcaagtgggaaaagcctttcattgttgttgttgttgttgtttcctttagttagtataagttttaaacggttttatgtgaacctgtggtgaagtcctttaattgtttgttttatgcttatgacataatcaatgtcctttttatcaagaagaaaatgttcaaaagcaactttaatttttgatattcctcatgcatttaaggacgaccttggtgtgagatatttgatgcccttggcttggtgtttttggttaaccttgtgttatttttttgtactcccgtgtgttgggaaagttttaagtgtcgtagattctgctgatttctgcaggtgttgctgactgagatctgctgatc

SEQ ID NO: 23555 - DNA, 604 bp, Glycine max
  Intron number 1 from transcript Glyma09g29400.1 (locus Gly ma09g29400) derived from phytozome v7.0 (chr-ID Gm09; pos 36287243 to 36287846)
aaaagtaagattcatctcttttatcctgtcattaaacagtgtctttcaatgcatctacctgtcttcaatattttagaatagatagagcttgtcatttcatatcttacttaaatgattatatcatactgaataattttaataagatcatcaaatttttgtcattatactctgtaggaattaggaggagggggaggagggtagttgaatagatgactaagacgagagaaaatgttttcacctttttttctgtccatagagtcatagatgtttcaccgctataagaagcaggtttgtcggttgaacacatgcatgatttgattttgatcttcttacaggatacaagaactggttagaggctatataccaatccgatcttcaacttatggggacccaacaaaactggattcaataaacctgcgagatcttcaccctagatcttggtaagtgatctgcatgccaaatatgtttcatgtgctaaagaaaatgtgattgtatctgccttaagatcagataaccagaaataagcattatcttgacttaatttcaactgatttttcaaatggtagtagcactaagaccacctgatttccaggttctcagtagc

SEQ ID NO: 23556 - DNA, 1007 bp, Glycine max
  Intron number 2 from transcript Glyma09g29400.1 (locus Gly ma09g29400) derived from phytozome v7.0 (chr-ID Gm09; pos 36288005 to 36289011)
cccaggtatgaattttcttgcttatcattcctccatgcattgagatgaacctttcaattggtcaagcaaaacctttcgagacaagtcaattgcatataatatgttgacacatttacattattctgtttatgtggctgatttcgagataattggaacttttattagtatattcaatcatgttaatcacagtttattttgaggcaatctttgccaggggtgggggaaataaataatgtaaaaggtgaattttctaatccccactatttgtgaaaagatgaacttttgcagtttgctaaaagagaagccgagggagaagttatttacattggaaatattattggaagatgttgtaggaagcatgttgttgattgaagttgttcaaattatacttagtttgtgtactttgattataagctctgtttggataaacttatcaataaaaaacttacagactggaaaagaaaataagaaacgataaaatggattaaactgttttcataagttaaaatcaatttatggccctcaacttttataacagttgtctcatttaacttcttcagaaactgatgcaaaaattgatttaattttatggaaataagtttgatttattgtgctttatattttcttcttctataaatgtttatgtagagaagtttattcaaatagaacatatgaagaagtttaaaataccatccatctaatttggtttgcttttacttttacctgagtaagtttataggtgaaagatagaagcaattgcactatgtcttcaaataattgtgattgtattaacataacatactctactacctttgttccttattataagaaacaagttataatgtatttttacactataagttgtttcttatgaaaagaaacagagatagtaattgttaacatttgctgataaaaaaagtcacttgttgttttgcaattacacttttgataagtaatgtggatactttttaagcagttaagcacttaatgtgatatgagcagggtga

SEQ ID NO: 23557 - DNA, 972 bp, Glycine max
  Intron number 1 from transcript Glyma11g34600.1 (locus Gly ma11g34600) derived from phytozome v7.0 (chr-ID Gm11; pos 36380635 to 36381606 reverse strand)
gaaagcttctctttttgttcttagtaagaaatttacaagagtttttatgcatcaaacaattaagcaatgttttttagttaatttttaaccttattaatggctatttgctaaccatatggcctcaaacaattcaaagggtaagtttgaatctccgttgagattataatcatggtaaataaaaaaaggataaataactttttactctctcattttatatgagttttcacttttagttcttaaaaaatattttgatcagttttggtctcttatattgtccgttttattttcatttcctactgttaacggttaacgtgaacagttaatgataatgtaatactcgcatgatattttagaaaaattaaattgtccaaaagatattctgatttttggcctttgaaaaaataaattgattgtttttagtctctaaaaaaatgaccgctttctatccctacaaaaatggtcaaattattttttgagggaataaaaacgaaaattgaagcaaaaaggtgattttaaaataatgtcatgtgcaaagattaatggaatagagaaatttatgagagattaaaactggtcaaaaaaaattgagggactaaagaaaattcaaataaaatgagaactaaaaagttaattaatccttcccccgtaaaaaagacattcagcaaccaaattttagttaagaaaaaggtgttcatacaatgtcacgataggcagtagaaactgccaaatgatcttcaaagtaaaggtgcattgcattccaaaaccagataaaatcaaatttccatctttacagcttggtactccacacaattttagcataattaaactgtcttgagatttattggagttagggagtagtcacgaattaaattgcataacagatgtatttaattaacatgaacttaactttgtgattctgtttcaatatatggagcagtatttgaatttagtgaaaggataagctactttgcg

SEQ ID NO: 23558 - DNA, 918 bp, Glycine max
  Intron number 1 from transcript Glyma11g13570.1 (locus Gly ma11g13570) derived from phytozome v7.0 (chr-ID Gm11; pos 9627407 to 9628324)
ccaagtactcccttcactctatgtccatcttctagttttttttttttttaaaaaaaaaatattgttgtgcttgaatgaatggactgtttaattctgcctctcaaatagatatcagtatgtgtttgtttcaaatgagaagcaactaggatatctaggatcgtagctgtaatcttggctactggttaaatttaattatcaaacatagggatatataaaacaggacgccagatctaagttttattaaattgaatctgtttgacatgtatggctgtgcttttaatggatcagtcaagaggttgtttaagaaaacttcatagcagtttagtgtaaggattgtaaaatttcattccataagccttctagttagtttatattgtcttaatcctatgatatttctttatgctacctgaagcctcgagtttatgttgttttaaagcactaagttcatgaaaaggctaactgatcgttaaaattgtgtcataacatatgcttgagactggaagatgttagagatactctactgctttatcaaaaccttattgatctttgattactttgttggaaatccctcatatcattagtccacatgggatctccaacactccccttaacaatgaggactgaacatctcaagcgtgaaatttgcttgaccaaaaatatgttcatggtcagataatagcccgagtgatccaataggttcaacaataaccactaggatagattttgatgccatcttatatttttgttattctaatttcaattggatctatttaaacagagtttttgttttgtcttttgaacatttataaatcaagtagagtatgagttgaaatctgtgttgaacatggatattaaccttctcttatatgtaatgtaactgtaggataagccagctttcatattttgtgttgaggacag

SEQ ID NO: 23559 - DNA, 991 bp, Glycine max
  Intron number 1 from transcript Glyma11g08300.1 (locus Gly ma11g08300) derived from phytozome v7.0 (chr-ID Gm11; pos 5877571 to 5878561)
gaggttagtcctcagacattgaagcggattaaaaggtgggttctgaatcaatttcagaaattcactaatactattattatttgaatttaatttttttgttttatttttcaaatgatttttacattatcaacttggagtttagtttgtatgtatttttagggtaaaaactagtatgatttttagggtagttgtgctagaaggcactatacttatcatgatattttgttattagataacagtgtgaaaattctttacacactatcagtacatagactatttactctcacttctgaaatgacttttaacataagagaaatggtagcaatatactctaacacacttttttgaattcatccaatgttattgactaaaatttgttacaaatttttataggtctgcttcttatttaatgattttttttcttctaattttataattttcatcatataatagcatggtaatatatgatgactttaatttttatgtattgtaagtgtaaattttttaatgtatcaacaatttagaaattattgttggtatgatttttaaggtaattatcgtaaacgttaataaacttatcatatacaacaatttatgattgaatgacagtgaaaaacattttaaaccattaatccatacattatttattctctcatgtatgcttcgagaatagtgttaaatgttttttcgcaagtagtgataattatcaggggacatgcctcttgtgtcttcagtggcaatttcctccttaaaaaatttgaaaatattaattaacttaaataaaatgatctttttcttttaccctagctcttcccggcatattgctgtcatatctatatccaatgtttattaaacgaggaagtcagagtcaactactttaagttgttatagttatcttttttatttgatcagttcgagtgattatttaattgacaatttggacttttggtttgatatgtatctcttttatagggttaaaagagttactaaa

SEQ ID NO: 23560 - DNA, 480 bp, Glycine max
  Intron number 5 from transcript Glyma09g17250.2 (locus Gly ma09g17250) derived from phytozome v7.0 (chr-ID Gm09; pos 21087090 to 21087569 reverse strand)
aggctgttgtaactgattacaaccctgctgatgtatgtttacatcttaaaatagctcttagaatctttgattatcacatttatattttaccagggtaaaacctttcaatgctccctgtaccgattgtcttttgatgtttagggtgacttgtgtagacaagtctacttttttttcacattaagatgccttttcctttaggggtttggtttcccatcatgcacagattacagaaaatgaaaagtatgcaaaaaaatcttagttatttcatttaggataaatgtgtttctctttaatgcctgtaacctcttcaagtatatgtaataagtattcaatatgtcatccagatggaaataaaaaggcataaatgtgattagggcctaaacttggaagagcttggcagcactatattgattttttcttaaataacttctcaaacaaaaaaaaattatccaattttttggattgtgttgcagggccggc

SEQ ID NO: 23561 - DNA, 777 bp, Glycine max
  Intron number 2 from transcript Glyma11g19820.1 (locus Gly ma11g19820) derived from phytozome v7.0 (chr-ID Gm11; pos 16593511 to 16594287)
ggaaaagcacaacttgttactccacagcttctcaagtaatgtataattaaaccatctaggtcttatataacacattaattttgtatataaatatttttttacatttcaatattttggactagtgctcggaatttgcatttgcatgaccctgttagttgtagaaatagtggttttgaaacataacagtaggttgcttggattatttactagtgaggggcttatatgtcattgtagtgacatggaaactgggaaagtaaactttgtctctatgaagagctcggtttgaatatatgcatggatttttaagaccttctgaatttgattggagatgaacagaaagatggctttgagttattattaattaagaatagtaggaagctatttttatttcatccatggggcttttgatgttttttggttggacagggttccgtgtattctgttgaatgtggttgttggttcctgctgtattagttcaataacaaatgctcatggattaccaaaaggaaaattttgttgttctctttcacatgaaattgctttcttgcgtatttgatgaaaaaataatactttaagtgccacatttgtgagtgtggcaaatctatgattttgtaattcctgcatgttctttatttcagactctttaggactagctaattctatgtgctgtgagtgacacataaaactgttaaaataaaacatgccacagttttgaattgagtttcccttgcattgtcttttcaactcttcattttaaccttctctctctccagggaa

SEQ ID NO: 23562 - DNA, 549 bp, Glycine max
  Intron number 1 from transcript Glyma10g43870.1 (locus Gly ma10g43870) derived from phytozome v7.0 (chr-ID Gm10; pos 50426539 to 50427087 reverse strand)
agaccttacctcctgcggagccacatctgttcgaggtaatccatgaagcatgaatgattctgtgtcttaattaagtagtataaatgcttaaattcatggtgaagtttgtgaatctagcagtgctatttattgtaatatgagcttcaaaatgtgttgtactgattattattgatcattcaatcttcatcttttaaaagtgtgatccatttgttactgagagcctgctacaatcattgttttgatattttgaatggttcataactctaagcattttcttgagagttttttgagcctgttctatgaaacacttatcttttagggggaaaaaaagtatactaaatgtcgaattctcttccgatagactgtaggtgtaagtggatacctatttaatttctattgtttctacacctgaatttttctgttttggatattttttcctgaatgctttcagctttctcatccctgtcactcaatgcactcatggttcaattgtgtatactttgatcatgtaaagcgtaatacacaatccctttattttgtagaatcgac

SEQ ID NO: 23563 - DNA, 559 bp, Glycine max
  Intron number 1 from transcript Glyma09g09850.1 (locus Gly ma09g09850) derived from phytozome v7.0 (chr-ID Gm09; pos 9772346 to 9772904 reverse strand)
gcacctggcagaactcaatttaacaaaccaagaaggtatcacctcactcaaacacaagcttggtttgaaggttttatgtggggctggggttgctgattagtgttttttttatatatatattttttatttcttttagtggaaagaaattgtgtatttttcttggtatttttctttgggtagcaatagcattgaatggtgtgctcatgtgttgtattcttaagtcattgatgtttagctttccaattctttttttttttcaatttttatttggtcccaaaaatcattgaggcttcttgtggaagctgtgtgtttttggtaagatgaaaagtgctggttaaatgattgcttaacatctatagatgataggttgtttgtttgaaacgtattattatatttgttaatcgttaatgatgttctcaattctcagtattgtgcttcatcctttctttttcttttctccttccaattttgagtgttttgaggttgtttgtgaaatctggtgcaaaaatttgatatatgtgatcctatttttgttttattttacttttgttttgaaggt

SEQ ID NO: 23564 - DNA, 508 bp, Glycine max
  Intron number 2 from transcript Glyma09g39610.4 (locus Gly ma09g39610) derived from phytozome v7.0 (chr-ID Gm09; pos 44653773 to 44654280)
gaagatatctgagcttgtgattctcaaacactgtaattaagtttggatttttaaattttgaccttgtttcctattgaattggattttgtgtcatgaattaagtggaaaaatgttcaaactttgttcaaataatagtagctttattattatctttatgagaaatgctagaaacacactctaagtcacattctttccaacatcttctctctgattggttgaaatttattgaaaattacaaaattttgtggggctcatatcatatcctgattttgtagtttcaataaatttcaatcgatagagtgttagaaagagtgtgttcctactagcctccctcttactgttattgttattatttttggataattggagtattttagaagatttccagttatccagaatcttgacaatcaattggaagagatgtttcatttatggaaggatgaaattaatatatgcattaatgttttcaattcttggatgatggattattgtgtagagccgggagagt

SEQ ID NO: 23565 - DNA, 599 bp, Glycine max
  Intron number 2 from transcript Glyma10g37840.1 (locus Gly ma10g37840) derived from phytozome v7.0 (chr-ID Gm10; pos 45724185 to 45724783)
aggaattgcccccacgcccctcggatcgtaagggggtaagttttttcaattgtaatgagtcagtttttttctatttgcacttcttttttatattgtaagttgctatttgtgttttataattttccgttccttctattgtatgtattaggtttctgattaagtatagtagttttcttatacaagtgtaactcatgtttttttatgacaattactttgcctattcattagaagaattgcaatatagaagctttcagttcttactacaggtgttctttgtggggagcactaagattttgaactcgtatttgcgccaatttttatttccaaactgatctcaatctttggagacctattttcccttccttttatcaatgcattcactctgaataaaatgtgttcttggttgtgaaaattggactatttatcatgttagaagtgtattgatggatcattcttaaattgttttaaattatgatgctgtattggataaaaataattaagacatacagagattttgtttttatatcttatatgtggtcctaaaattatattgattcaaaacagaaaacaagcaagagggtgcactttgtgaggaacct

SEQ ID NO: 23566 - DNA, 164 bp, Glycine max
  Intron number 3 from transcript Glyma09g12390.2 (locus Gly ma09g12390) derived from phytozome v7.0 (chr-ID Gm09; pos 13032546 to 13032709 reverse strand)
acacactttcaacaaagtatttttttcttatcctatacttgattttgaatttaatgtcagtaaagaatgagaaattcattttttttgtttgtattagaagacacagatgcccttaatactgtttcctttcactgtttgcagtaatattgctcttgtaagggcag

SEQ ID NO: 23567 - DNA, 707 bp, Glycine max
  Intron number 2 from transcript Glyma11g04720.1 (locus Gly ma11g04720) derived from phytozome v7.0 (chr-ID Gm11; pos 3248177 to 3248883 reverse strand)
gacaccggcgctgttgtaagttactaccattttgttttcatggaaattagacctgttttcataggagaatcaaataaaaaagaaaaaattaattaaacttcttcataaactaattttagtttatacaaaagctaaaaatcttctttttgagaaattaacaccagggcttctaaagttagcttatggaaaaaacttattatatttcattcttattaactatcactgtaaaactttttacactttcaaccaatacaagtttattctctaaatgactttcaaggtaaagtaaataatatatgcactaatggaaatagaataaaaggttttacatctaatccatcaactgtcatatacggtgatgagtgcattaatttttccaatagctacttataagttataccaaccatgaattctgataaaagtgcgtagaaactgaactctttaatgtaattactataaaagtcaataaacttcttatgcatatcgatttgtaattagatgaatttataaataaaactctacattgctggtgtgtgagttaatttcaattaataaacttgctatgtggattctgatgggttggttaaccttgtggccacagtctagattagtaaagttaaattgatcttcatttttgtttgcatagacatgactagaagttttggtatttaggttcgaggatttttggggcagcagcagcttgagga

SEQ ID NO: 23568 - DNA, 334 bp, Glycine max
  Intron number 1 from transcript Glyma12g34380.1 (locus Gly ma12g34380) derived from phytozome v7.0 (chr-ID Gm12; pos 37526166 to 37526499)
ctggtacctaaccatctttttttttttcttgtcagttatttatttattataactttttgacattcatggttttctactatgttcaagtggataaggtccacattcttcttgccacaaactttcttgccacgtctttatcagacataaatggtttttgtttttatcttgtggtgaggaagcttttgaactaccaaaattactcctcttaaatgccttttatttgaattcaagtttgtttatagtttggtgttgttttcacacatgttaagaattaaagagattttttttttgttggacagttactgaacttgtggaaggagattcatcaaggaaa

SEQ ID NO: 23569 - DNA, 581 bp, Glycine max
  Intron number 1 from transcript Glyma10g39720.2 (locus Gly ma10g39720) derived from phytozome v7.0 (chr-ID Gm10; pos 47350903 to 47351483 reverse strand)
ctccctacccatcatccgaggctgatcaaaatctggtgagctctccctctctctttaatttcttactttctttctcttaattaaacacatgtagtacagtatggtacgaacattaaactaacattctcatatactatttataaaagatttttggtaaagctttttaatttcttccttgtttatatactccatcattatgtatatatatggaactttttttctttttctccatatcctaattttactaggaggttgctactccaatcagtggattttttaacctcaattttgcacaataaaagcttccaaatgaaacccttcttggcttttttgtcagaaaggcttttgcaaaacaacttgttttatttttggccatcccgatatctcttttgactgcgagactaaggctgcatggtgtgtttttcattgttaaaaatcaaaataaaacatttacttggtactacccttttgtataaattgcgtgacgcaggttgagtgtttaattttcacttttttttttcattaatttctttttcttgcatgcagattgaagagtaagagcgtggcttttggaacacaag

SEQ ID NO: 23570 - DNA, 940 bp, Glycine max
  Intron number 2 from transcript Glyma09g39830.1 (locus Gly ma09g39830) derived from phytozome v7.0 (chr-ID Gm09; pos 44830304 to 44831243)
tgttgtcaagctcaattctggtgttgattacagaggttcctttctttcatttaccacattttcatcctccctagatattcacaataagatggtttgctaaatgttgatgaagacaatgtccacttgttttggtttgttttctgttacatatttatgttgggtggctttgggtttgcatgcttgtacagtgctttgtctgaaaatcctttaaaattgcactgacatgtacaccggacacgacatggacacggagacacctgtaatgtccaaaatattagaacgtggacacctgtcgtactcgtgtcggtgtcggtgttaggtgcgggtgcgtgtcggacacccggacacggcaagggactggggtgtccgtgcttcatagttaaccggtatatgagggtggcggtggtgatgcattgatgttttaatgtttggtctatatttgcttctcacagttttttctgctttgttgagggaaagtctgatgatttggttgattggatgagaaagaaagttgttgatttagtctactggtgattgcttttggattttgatctcaaatattgttttaatttggattcctaagtaacctgtatttgagccctgcccaaaattgttggaaaaaggagggcatatgcttatcctttttgatatatcaaatgctgggtgcttcttttcatatagacactgtttttcactcatgttttaagatcatgattatgacttatgatatgtttctgatatttcttgtttcttagagtatttgaaaaggaattgatttcagtttattacccaattccatatttgatagtttacattgtgaatttgcatattggtgcacttgtccactgtaatagttgcatttgttatgttatgcttctctgtatgcatgaagtaggctcactcgttttggctaatcttgcaggtatacttgcttgtctag

SEQ ID NO: 23571 - DNA, 776 bp, Glycine max
  Intron number 1 from transcript Glyma08g46970.1 (locus Gly ma08g46970) derived from phytozome v7.0 (chr-ID Gm08; pos 45916334 to 45917109)
caggtcaaatcaccacttgatcatcaaacaaatgcaataaaaacttaattaatcttataaaatcaatacttaaactcacggaaataaatattttatttaatgtcacattaatttttaaattattatcatgaaattatattttttttataaaagtataaatataaaaatataacacattaactacatacaagacaaattcaaataaaaatatgttaactccaagcaccacgaggatagaaaaatctagtttaattaaattcaagggtccgctcatgattttcgaacaaagatggatcagagtcattgattttaaaagtctctggaagacaaaccacggcaagatctcaccatatagagataatacaagaattgtttttcttatgtacaaatattcactcataaagcatccacaaccactgctgcaacacgtctttccaatttccacaaccactgctgcaacacgtctttccaatttccacaaacaaattgattttcaacacgataactattcattttttattgtgcgttgcaccgatcaaattaattaaattcaagggtcttcacattattttccaacaaagatagaccagagtcatcgatgttaaaagtctttgtggttttcttcttaaaatagtcttctattcatacagcaatagctcttaacatacttagaataaaatatgaacaagtggggttggcgccataccatttagcattatcctttttcttacatacaaataggggcatcattcacattcgcacataaatcatccaga

SEQ ID NO: 23572 - DNA, 603 bp, Glycine max
  Intron number 3 from transcript Glyma10g38930.1 (locus Gly ma10g38930) derived from phytozome v7.0 (chr-ID Gm10; pos 46663463 to 46664065 reverse strand)
atttctccagttttgtcaggcaactcaacacctatgtcagtaacttctctttctacttcacaatcatacataacatgatgctaatttattttattcttctcctactgtgatgagatgaaatgttgttgacattatagattgtatatttagattcaatgatatctaaccttaattattttcttaatttgaagttcatgaattaatttgtcagtattaattcttctatcttcatttatcatatttggtttggtatatattggtaggtttgattggccccggtttctttcgtttattaggttccgcactttccctattttgtttcttgaaaaggaaaaagctagcagaaaagttagtattgattaatttgcacctttaatctgcagtgatgttgttatatttttatatatttaaggcttgataaacttaccacttatatctagctaggtgctttagctaggtacgtaagagttttatcatatgctgtatttgtcaaaccattattatcagtgatattttatatatagatttgaaaatgaagaaggaaatttgatcgatgacatgactgtaggggtttaaaaaggttgatccagataagtgggagtt

SEQ ID NO: 23573 - DNA, 807 bp, Glycine max
  Intron number 1 from transcript Glyma09g15750.2 (locus Gly ma09g15750) derived from phytozome v7.0 (chr-ID Gm09; pos 18604653 to 18605459)
acaaaaaattattcgataaaggtattaattatcattattatttgcaagtttgttgttttttcaatactacaattgtgtccatatattagttgttttagtttaacttaccatgctttattgttctatcatcgtctagtgaagagttaaatgtctagggtttaattatgagaatgacagtgtaaatactctcattagtttctctttaattatttcaattaaattcttttcatttttaaaatatattttttgggataaagcaaattaagtatcttgtgtttaaaattctttgtttagtactacttgatgttttaatttcaatataatttacaactatgaaaatatagttgaaaagaaaaggaagaagcaaatattgacagcttctatgatacatggaggtgtaaagtgagagaagggagagagagaaagagaggtggagaagagggaatgcatcaaagcttcagaatgagtgtttgttcagtgagaacatgaaaagataaagaatttccaaattctttcattttggttcgggaaaaaatcccctataaaattttgattatcttaaaaattctttagatttgatgtatagtatttcaaattcacttacaaattgaatttcctttcttaaaattccccatccgaactcaccattaaattttgtctgcttttatttgcattccatgttgtggtgacatgattatttggtcttactagagacatttttagttttgttctgtgtatttcattctaatgctttgatgttgtgcatctcaagtcactcgcattgaagcaagaagtgaaaagtttgac

SEQ ID NO: 23574 - DNA, 760 bp, Glycine max
  Intron number 3 from transcript Glyma12g11250.1 (locus Gly ma12g11250) derived from phytozome v7.0 (chr-ID Gm12; pos 9310773 to 9311532)
tgctggttgagatttcacgcgcgcttcaaatcgtctcttcctaacccttcatcttgtgtgcttgttgttcttcttttaggtatagcgtgtttgagtgtatgtaaaattgattttcaagtaatgcgaacaaggttttaaatagtagttgcggtcgttttgcggttatgattgtgcttttgtcctaatcttttattgtgtggaaaattgttctcatactgctgatgaggctgcaattgcattgcaatgcggatgttgcaaccccaaaaatcttgatgttgtggctgtattgcagttgttaatattttttaaaaaccttgatatatataatttggtaaaaataatatttatgtggttaactccagttgatgtgcttatttgtattagcatcatatgatttataccttaatcgatctacttatcaatatcttgctagaattgaagtatggttttaaattgtggttgcggtaactgaaaaaacctgtacattgtgggaaaatgtggctgatgtggccacaattgcaatgattcaaaatacctttacgttgcggattgtaatttaaaaccatgaattaaagcatatgatcataacatgtttgtttgctttaattgccctgtttatccgtgttactatgttaatctcataggaaatcatgcattccgttttggttgttatagtttgctgttttgctttttcactcttttcacctttttatattttttgcaattgaagatttgggtgtggccacagcggttgcggact

SEQ ID NO: 23575 - DNA, 339 bp, Glycine max
  Intron number 1 from transcript Glyma12g36210.1 (locus Gly ma12g36210) derived from phytozome v7.0 (chr-ID Gm12; pos 39295473 to 39295811)
ccctctggttgtgatcttccaaggtaatgttgtttattttcattcaactttacttttgctcgtagattaattgacacgggttacttttcgtttatccagtaatatcgagttttaatcttgtgttggcttcagaatgattgttttccatgaaaaatatgtggtatggtatctttgtactgtctaatcacatggaaatttgccatatttgtttaaacatatttttttctgacttgcaagatggcatcttgaatttcaaatttgaattttttttcttctctctccaaatgatatcattattattattttacaagaaaatggtattaatggttaacaggtttg

SEQ ID NO: 23576 - DNA, 439 bp, Glycine max
  Intron number 2 from transcript Glyma09g02330.1 (locus Gly ma09g02330) derived from phytozome v7.0 (chr-ID Gm09; pos 1547324 to 1547762)
aacaatcggaaattgatcgagtccttgcccatcatgtaagttaattcccactttccatccctctattcaatcaattttagttttttttttttaaaaaaaattcaaatacaagacaaaaggaaattgttcatttatgaatccggatttcctgctgtcggcagcttttccgcattcacatgttacctcatttaaaactgttgagtgaagatttgatgactcgtatttatgagtcatttgattttcatgcaacagttatttatgactgactgtgtgaatgcgtgaaaagaaaaaactgagtatggagtaacaaaaagggagagtgataaattttcaaaatttgcctagtaaaaattcatgggatgttcttattatttttatataaaaaaaaattgttctaattaatttgtgttgtggatttgagcagactgagaaagtgaga

SEQ ID NO: 23577 - DNA, 1039 bp, Glycine max
  Intron number 2 from transcript Glyma11g19100.1 (locus Gly ma11g19100) derived from phytozome v7.0 (chr-ID Gm11; pos 15753795 to 15754833 reverse strand)
cttcaagaagatttctgtggcacggcgcttcttaggtatatcctgctcctgccttttgtatttttttttccttcttcttttagtcatgcctcttttaatttattaatactctcttttggacatgctaaattgtcgtctcttttgataagttgaaggagtaaacccttgtcagtacttgagattattgttagcatcacttgttttggtccctcgcattataaattcttacctttagtatcaggctttgcaaatagtcgttcattagtgtgtgtttggaactgcattacaaactcacgttagggtgccatgagacggaatctataatatgtagcagatgattggtcgcttgtctctctaaacacagctccaaactcatggttcttttctacttcattttgtactaaaaaagactaaaagtgaacgacattttgcaaagtcaagaacttgagtaagaattttgtaaagtcagacctaaagtgatcaacactcaatctaatattagtgaacataacgtgtcttgcagagattagcatatttagagaaaaatactgtgcagtgcactatgactaatattacaggcaaaatctatgggttatgagttatgaccacttgccatatattatcatgagttgcgtaaattatcctctttcattattatgtgcatataaaattctgatttggctttaaataatgtggttgctttgtatcctggatgacatcctgttaattgggattttttgctcctaaatttcttattgttgattcatttatggttctaaaatctaaatgccagattgggaaaatctatttcaaagtgggattttattcattcagtgcgtgttttgaactgcatttagagagggagaggccatccaattgtacactacatattgtgactttgcgtcatggcaccctaacgtggtttcgtaacacagttccaaacacattgttaaccattttctcttttgatgtctcttgactatttttttgtcagtcccaatgtacttacatgacagtgatttatgtttaacagtacaga

SEQ ID NO: 23578 - DNA, 526 bp, Glycine max
  Intron number 3 from transcript Glyma09g40400.2 (locus Gly ma09g40400) derived from phytozome v7.0 (chr-ID Gm09; pos 45327680 to 45328205)
agttgagaactgaattttcttcacttaggcacgttttccacaatggagcctctttttttctttttcttttatttcttttggtttaaacatataatttagccgctgttcatgccatggattctcaatctggtccttacgcataacattttattaaattggcccctatatgtgcaaatgttaccgttttgatccccatatgtggaaacattgccagtttgatccctgttgtcatactttaacagttaagcttcttatatattcttaattcggtctacacttatagggaccaaattaagaatgcgctacatttatagggaccaaattaagaatgtgtaagagagttaatggtggtaggaaccaaattccgaatccgcagtattggaacgaattatatgtttaaccttttcttttttaatttttttttctgttgtggattttaaaggaatggtttgttttgtttgtttactcaaatgtgttactttaaatttcagggctgccaaagagaaagaggttgcggattatcaaa

SEQ ID NO: 23579 - DNA, 781 bp, Glycine max
  Intron number 1 from transcript Glyma09g39090.1 (locus Gly ma09g39090) derived from phytozome v7.0 (chr-ID Gm09; pos 44258133 to 44258913)
ctcgcgcggtaccttcttcttgttcttcttcgatcagtttgtttaattgattgaaaaacctttttccgttgaaattttaagtagtaattgaggtttctatgctttaattttgtgattagcatgccaattgtttgcgagacttggtgattaaaaaaatgtcatcattgtagcattattgcatgattctgaaggatttttttttttaattttgtggaattgcaactggtgtttaacagtttggatttcatgattagcatgtgtagtaacggtattgcaaccgtattgaagtataacaagaaaccagacaaaaaagtagaattactataatagaaatgctatttggtatgaaatcacttatacgggaaaatgctatttcttaattttgaggagatacaggtccagcttttgttaagggggttgggggatcgagccttcatatttcctcaaacaatcatgcaatgttatctttattttgggtttttttttttgtgccttaaggtttctgtttccctaacgaccgtgcacaagcgtgcacgtacacaatcaattgactaccagtagcttaagtgaaaggggattacagaatataaggcctggttgttctatttttctacttctgaatgtgtatttcataatctgctctttgatttccattattcttttgtttctttggaacatactaatcccaaacagctgactggatactatatttttggctaattttgtcttcaaccttgcactcacaggaaaaaggaaaagtaaagttccctcctgcagcacg

SEQ ID NO: 23580 - DNA, 668 bp, Glycine max
  Intron number 2 from transcript Glyma12g16560.2 (locus Gly ma12g16560) derived from phytozome v7.0 (chr-ID Gm12; pos 15931669 to 15932336 reverse strand)
tctgacggtctcaaagagtctggctcaaagaaaaggtacacattgttctattccccattcatttttattgaataaaataatattgccaagtaaaggaaagaaaacaaagaatcagcatgtttagtcacttggcaatcttacctgctcttctgatgctctcttttcactttatttcgtaatctctgttttgcacttttgcttgtgtgcctggctacttgctattactgtcttcatatggtttactgttctgttttgttttatttctttttataccataataaattaataatgattgaaaacctaagttaaatctaaaggcagtgttaatttaatttttaaataatttaaataaattttcttggcaccactagcaacaagtgattttaaaccaactgacagatgtctataatatagttaagtcaaaggatgaggttaattagggcaagtgatgttaatcaagaagaaataatcacaaatcctattgcattgcatatgttatcttgttcaagtataacacttccctgtctagtaacatcaactcctcttctttatatcaacattaaatcaatgattacactccaaaaatgagtgtacccaatccagactgcttatccctggaggaagtttattttcttgttgatttcctgttgcagagttaggtctgaatc

SEQ ID NO: 23581 - DNA, 735 bp, Glycine max
  Intron number 1 from transcript Glyma12g33060.1 (locus Gly ma12g33060) derived from phytozome v7.0 (chr-ID Gm12; pos 36430951 to 36431685)
gcgacggtcagatttattttcactacattcttctcatttcaagtgtttttgtttttgttattatgtattatatgtgtgcaagttaattggtgcagtgatgtaagattcattgggttcatatataagaatggtttatttagtggatgagtttgattcctcggtgtgtagaaattttttggattaagaacagttatacactaccagcaaatgagttgggagacactaataatgtccttgactaaaatgtgtgcaaggggcaacattctttttcacatttacaatatttttagatttcatgttttttttattgcgaacgtgggcatgttttggttttgttttagatttttttcccatcacaaggaacttgttccataggtgatctatttaattcttctttaatatttttttttattgagtttttctattttgtggattagattgtgttgaaaattgaaagagtgatgtagatgtttaattgttctttgaattgcaagaaaattgtatagatttagtaatattgtgctgtaataatggttgtctttatgtatctcactcattttattatgcctttgaagtattaaagggatcttgatttttggggtggtgagaagagtattattttctagtttgtgtgtgagtataggtgtgtttctttattgagcattatcaattatgtaatattgcatttgcttttctgatattataattttcatgacttccgttaatgcagtctaa

SEQ ID NO: 23582 - DNA, 586 bp, Glycine max
  Intron number 2 from transcript Glyma11g33100.2 (locus Gly ma11g33100) derived from phytozome v7.0 (chr-ID Gm11; pos 34861762 to 34862347)
tgcgctttgtcaagggtcaatttctcgaatttcaggttatttttctatccttttatttgatttcgttcttctgattgggaaattcttcgaattttattgggtttgttgtgtatgatgaaaatattgcctgaatttcacgttttttcatcacagacgtgtgtttagtttagctaatttatgctgattcggctgtgaaattggccgatcagtaatggggttatgttgtttcaaatgtcttttttgttaaaaactatcatagaatgtgaagaattcgggttggtcacaaaagggtacaacctgatttgatcatggaggttatgatggcagtgattagtgagtgttgattgttataactttggagctttgaatgatgcctaaatagttgtggtgtggcgggggaaatggtatttttcttctgtttgtagttgtgtgttgatggttttgggttttgacttttaagagctgttgttttgggcctgatgaggagtctttaacttatggaaacgtggcaattgtgttgctgaatttatgttgtctttttgtggtgacaggaatcaacaataggggcagcgttcttttcacagac

SEQ ID NO: 23583 - DNA, 883 bp, Glycine max
  Intron number 1 from transcript Glyma11g14110.1 (locus Gly ma11g14110) derived from phytozome v7.0 (chr-ID Gm11; pos 10129455 to 10130337)
aagctctaggtcagtctcacttccttcaatttcacctttcgaatcttaatccttctctctctctctctctctctgcttcttcatctcgttccttttttttatatatacatatatatataaatatatcatttgccattgtcgatcttcgcagttgctgcttttctcgttttgatccgtacattttccctctgccgttgcgatccccgaagctgcgagattcttctgcctcgattgcgttcttcatgtgattctgcttctctctctaaccaagtattctactcattcggtttgtgccttgtttggtttccaaaaatagaaaataaaaaaaatataactataagatttatagtttgttgaggaatacgctgtcattgcgttgcttgaatttttataggctaaggccaaatcattggttcagattcgaggacaatttctctctctctcgcttcaaattctcgtcattgaatctctgtttcttccagagagatctcgctgattttcttactttcgtgtgatcttagaatgcactattctgatcagccgataagaaacacattttgatataatcatataagcttattagattgctaacgatggttatggctgattgctgactaaaattttgcaagttttggtattaatgccttttcaaatttttttgtcatttttctttactgcatttgttagtccttaaattttcttattcttgatgtaaaatgctagattaggcatgctggattgttctttcttttagaatggatggacttgagcaattaataattgtagataaaacagccttggttgagttattggcattttccctcacaaaatctgtgtgattttttctttctgcaggtttacattttaggagtagctgaatcat

SEQ ID NO: 23584 - DNA, 482 bp, Glycine max
  Intron number 1 from transcript Glyma09g04330.1 (locus Gly ma09g04330) derived from phytozome v7.0 (chr-ID Gm09; pos 3178723 to 3179204)
ttggcagcaagacctcttgtaagtatatataattcgtccctacaaaaccgatttgtaaggtgaggattgtcttatgagtgttcatgtttgcttttcaggtgaaaaattacttttgagatcagaattcttgtttttgttttcattttgtttttctttgttagatttgacattaaaacacgtgcataacatttctaacttcaatacaaacatgtattatttctggtaaatgtgagactttttactaacatttatttgacatatgaatcatgatatcacatatgatatgatcattcgtgggaatgaccttatacttattttgtttttcaatttgttgaatttcatgatcttagttgcatgatctcaataatttggacatttcaagtgagatggagttatatacatgattaggtgtgagtggagatttgtttaaagaccatgaaattgtatgataagaaattgttggaataatatttcaggtggtt

SEQ ID NO: 23585 - DNA, 488 bp, Glycine max
  Intron number 2 from transcript Glyma11g08160.1 (locus Gly ma11g08160) derived from phytozome v7.0 (chr-ID Gm11; pos 5777507 to 5777994 reverse strand)
cttctgttgttctcaaaaacccactaattcctcaggtttgtcgattctttaccaatggaaaatgctaacaaacatgttcttttgacgactagagtaactagggcgtgcttggttggaattattttcaaagaaataacagcttcattttagaatgagacgaagaagataaaaggtcattattatttttaaataatctgaatcaaaccgtattgaatggtttattgaaacccatatgtttgaaaagagtataagaaagaaacccccaaaatatatattcaatgtttcttctacaaatccttaaacctacgaaacaagttaaaaacaaggtggtattttataattatctttttaattttgatgcatcataacatcatgatttttataattaatgttatgtcataactttggtggcaggtggtgaatcatgtatttgatggttctgaatctgaaaagagtgtaataagcaggtcccttttatttgacttctc

SEQ ID NO: 23586 - DNA, 1031 bp, Glycine max
  Intron number 1 from transcript Glyma10g25500.1 (locus Gly ma10g25500) derived from phytozome v7.0 (chr-ID Gm10; pos 33418997 to 33420027 reverse strand)
cttaccctcttgttacgcaaggtatattatatacatatttgcacgctatggttctcatgaatgaattttcaattttttggttcgaggagtggaaatatgaaacgcatacctttttgatccctgaaagatttgaagctggtagtaatagttttgaaaagatgagaaatgtggatggatttagttgttttttagggactaaaattgatgctgaaatgaaggactatgttgatcgagttttcttatggtttggggagtgaaatgcttacccttttggtctctgaaagatttgaagctggtagtagtcttgaaagatgaaaatgttagttttttgtagggagtaaattgatgttgaaatgaaggaatatgttgatcctttttttgagggatgaatatagtaattagtgatgaaaatggtgattttcatctttttggactaatgtgactaacatgaactcttcccgtaaatagtgtttgcattgataatgtaaatggtttttagactgtcaactcaatcataagctgccatatatggtacctatatgacaaatttgttgagtattattataactattttaaaagttatatcaatgatgattttttattgcttgacttttacattgatagtacatagcaattacgttctaaatcttttaagtactgaaaatgatgttttgctccctttatgttacatgaatatgttacttttaggtactgaaagattcaaagtcagtagtagtagtctttgaaagatggaaatctctgttttaatcttggaaagatgaaaatgtggatcgaccttttcaatttttagggtctaaattgatgttgaaataatggactataatgaccaacatcttcatttttcagcaatgaaagtagtaatttttttctttcaggtgctgaaacgatgtttttctctctttatgtgatgtgagtattttgcttataatcacgtgttttggtgttttgatgatgaatcttttgtgggtgtgtcagatcttctccacatattgtcgtttctgcctaaggat

SEQ ID NO: 23587 - DNA, 566 bp, Glycine max
  Intron number 1 from transcript Glyma10g15950.1 (locus Gly ma10g15950) derived from phytozome v7.0 (chr-ID Gm10; pos 18723657 to 18724222 reverse strand)
cttaaaggtgaaattgtttttttctctctaactttacttgatttgatgctttctagcttctagtttttctaaaacaaaatagttttttttattctgtagaattctctttgagatttgatttttttctgagaaattaagttgattcaaaaacgcatttaatttatgaggctttgtttttattgttttttattacatattaaatgataaaagttattatatagaaatagaaattttacctaaaatgtttaaagattttaatattgatatgctgttaatgtaaagtcttactttattgtttagacatgtttggaatagaacaaaattctaatttcatctcattcttttcaaactatggttacaaaaatgcaaggaaacaataaaatatggtgaaataattctcatatttttctttatattccatcctcaattttagcaatccaaacattaatgaaatataactcaatttcatcttattccaccaatccaaatgcaattgccacccaacaaaacttatctactttggatgggcaggatttagaaaggagaatttgagggttcaaataggc

SEQ ID NO: 23588 - DNA, 570 bp, Glycine max
  Intron number 1 from transcript Glyma11g08140.1 (locus Gly ma11g08140) derived from phytozome v7.0 (chr-ID Gm11; pos 5742600 to 5743169)
gcagcattctcgtcatctcgtggaggcagacctccgtatgctttctctccccctctatctgcagcaattgttgcttagcattttactgtttgattgtgaattgaaatggaaaaaagttgcgtgatgattgaaacattaaaaatggatgctttactcgttgctttcggctttactttttatttttctccttatttccatgttctcttgcagctggaaaatggatccaactatgcctgtgttgtgttgtgttggcatttaagtgccttcggtttttgttgttttgacatttgatgcttattttcatcttctcttgccgtgggaaaatggattcaactatgcctctgttgtattgacatttaagcacttccagtttttgttgtttttacatttagtgcttattttcatgttcttttgtcgtaggaaaatggattcaactatgcctgtgatgtattggcatttaagtgctttcagttttcgttgttttgacatttagtgttttgtttttgcttaatttttttgtttttgtttttgtgtttctggttgaaaacagcgattccggcaagactgcag

SEQ ID NO: 23589 - DNA, 716 bp, Glycine max
  Intron number 1 from transcript Glyma10g11610.1 (locus Gly ma10g11610) derived from phytozome v7.0 (chr-ID Gm10; pos 11803237 to 11803952 reverse strand)
gaaagcgccagaagaagtataaacaggtcgtcattttcgccctcaaagtttgtctcttcgtttttgtggggagtgctagggtctaatttttaattcgcaacacttctgaggtttttgaacccccaatttggagcgaattctttgatttttggggtgttgatgtttgtgttttatgattggtgacatggtttgggttcttggttagattagaatgttaacgattgctgtttcttcaattttgggtctgtctttgcggtttatttgctcatttgtctcgattgtttttttgtttcagtaaatgaatctagatacatcaattattaattctgaagttttttttttctaatattttgttacgcttttactttaatttagatgaaatttgttaattgagtatcctgctagggtttatgatactttgatttgattgttttcctctgttttacttttgggaattgaatattttcatgttctaggtagaagtttgtatatgaatctggttttttcctcttttacttgaattagttttaatgtgctaatttaggattctgctagggtttaatgatactttgattgtttccttcgatttattttttggggatgggggagtttacaagttttgggtggaagtctgtatatgaagctggatattgtaatatttatgggtgttgctgatgggattgattggctgtggttgaaaggtgttctccgacaac

SEQ ID NO: 23590 - DNA, 712 bp, Glycine max
  Intron number 2 from transcript Glyma12g27320.1 (locus Gly ma12g27320) derived from phytozome v7.0 (chr-ID Gm12; pos 30835447 to 30836158 reverse strand)
cgccagaacaccaccaccaccaccactatatacaagtcgctgtcgtggagcatggccaataacttatcatcctgcttttgaattattaatgctattgcaaaaaaaaaaaaaaacggcgaagaagcgagagttttattcgtcactgcaaatatagtacacaactataaaatccctaaccctcttcaccccgcacctttctccttcgccattttctgttagaagacaatgattacacagcacggcaagatcgtcgcggtatgtaactcttcatcttcacggattttattgggattcaattcatcaacgctgaatttttgtgcagaaagtatgcgaaaacctatttagccatggacccctcactttggatcagttggttcgctacaccgaccttactaaggaccaagtcagaaactccctacttgtcttagttcaacacaattgtgcccaagcacttgtttctgctcctcaagatgatggtaacatacataaccctattattttctctattacattcttttttattgatatctacattcgacaaacatgttggagtaaaataaaattaataaaaacgaattcctagctgtagtagtggttttgatgccatgtcttgatttcatagattcatgtaatgtaatgtttgcaatgaaatactgctccattagtgggtaaagtgacatgatgatgatgttctgaataaatataaatgcag

SEQ ID NO: 23591 - DNA, 456 bp, Glycine max
  Intron number 1 from transcript Glyma11g27490.1 (locus Gly ma11g27490) derived from phytozome v7.0 (chr-ID Gm11; pos 27297142 to 27297597 reverse strand)
gagacccctcaactgtgacctccctaggtacccccaaaagctcaaaactaagacttttctcacaaatattacatttttgttgtttacaaaaacattgcaagtttcttcagaaaatggggtgtgtttggttttttgttttcggaaactgtttttggtttttaagatgtaactaaaacaaggttgttcaaatagatgataaagggtgatgtaagacacaatgaaaaaaaatatttcctagttgtctatgtttcttcttcttcttttttttcaaaccacttgttttttaaataattttcaaaatttattagattttttttatgaaaaattgattgttgaattgtgtggaattgttaaagatacggtttttaaaaccaaaaaatagaagttaatgaaaaaagacctcagtatcctatgtatgcctctaaatggttttgtagcatgttcttggtaggttca

SEQ ID NO: 23592 - DNA, 788 bp, Glycine max
  Intron number 1 from transcript Glyma10g22670.1 (locus Gly ma10g22670) derived from phytozome v7.0 (chr-ID Gm10; pos 28694741 to 28695528)
caacttcaatatttgtctttggtgtgactttgttctaagtgttatcagtagcaaccatttcaacagcaggagaatttcaaaatgcttacatttgccattgttggctaaaaggttcttaagttgctcttaacaaaggcaggacaatagatagatatatacaatactatatactaattggagccaacaataggtaaccaagtttagtaaatatgaggttaaatgtgatgtttttttaatttatctgattgaagaagaagaactgtatttaatcaaattaattaatattataataaaatgactgccagcctttgcaaaactattaaattcatcatcactatatgaacaattcatgtttggataggggtagagaaatcataacagtttaatatgtcacagtattacgtcataaatgaagatgaagacattatagcattgggtaaggagttgatgttaaagaaggctgaatttttggtgccttgtgattctagttttcttgttttttgtttgagataacttaatgtttctgatagaccctattagtattatcatgttacaagtaaatcttaatatgacttaggttttataaacttgtaataagtgataacaggaataattgcggatagtgatagtaaactacatatataaaagggagaaaaatggctaactagtgtattttcctcaaattagctacaatatccgatatacttatattcaaatccatgatctcatgctgtactctgattaacaaagtgaataactacacttgcagaaagaatcaaggatattgg

SEQ ID NO: 23593 - DNA, 428 bp, Glycine max
  Intron number 3 from transcript Glyma11g21650.1 (locus Gly ma11g21650) derived from phytozome v7.0 (chr-ID Gm11; pos 18786873 to 18787300 reverse strand)
atctgctgagaaagatcaaggtacaaaaaactccttggatatttttagacggataaaagccgcctgtgtttctcttctttatgtgattgatctagtttatatttcaaaaaaatatttcactatttcctcctcaattccaaaatttgcgtacatcataaaatttttcccaaattataaactaaatttgattaatttttttctccgggtatccagtataaaatttgaaataatgggatctgatttcagaaataacataatcaaatgagatatttgccaacctttcatgataacatctcaaaccatttttgtgatgtcataacaaccttcaattacttgtatatcttccctggtttgattttagaaaaataataacatgaagttattgatttgcaggaatctaaatctcttaaagacataccagtggtgat

SEQ ID NO: 23594 - DNA, 673 bp, Glycine max
  Intron number 1 from transcript Glyma11g03160.1 (locus Gly ma11g03160) derived from phytozome v7.0 (chr-ID Gm11; pos 2095117 to 2095789)
agcactcccaggttctttaactatcctccctctcttcatctgttactgtgtttcctcacctctcttccgtttctattacttgaacatatgttttgaacctttctataaatttcgcagctgattttatgcaaatctaacatacagtattattttgtttattcttgtttttgcatcgtctcatggacacactatttcatttcctaccaattttatttactctttaatctatcggtggtaaccccctaccctgttaatttgaaaacaattgctattctttatgttagtttttgttccagcgaaatccctttttgtcagacaagaatttttcgtgtctatgaccactgcctttgctcctccttgcatcctatccagttgcaataattcagtttcaaaacgtgaatacatttcaaaggacaatcactttttttcccccaagtcacaccgacttttgaatgtgatttgtccgctgctaatattttaacgatttttttttacttttctttccttattgcgtccagctttctcctcctctggaaagtctgtgttcccattagtttattctttatattttgatgtttggaagagaattcgggagacaaggcaattttgctaactttgaccttttttctatgaaacagggttgtcattgataattccgtttgctcctcagcta

SEQ ID NO: 23595 - DNA, 973 bp, Glycine max
  Intron number 2 from transcript Glyma09g37410.1 (locus Gly ma09g37410) derived from phytozome v7.0 (chr-ID Gm09; pos 42996120 to 42997092)
ttcttaaggttgagaaccagaaactacaggcagaggtaattgttctagcttgcttcaagttaattattatcttgtgtgcttggatcaataattgaattttccatagtggtttcttttttcttttttcttttttatcaaagtaataaagtttttggagaaatagataaaggggaatatgaacttattgatcaggatctgttattaaattgctgttcttgatcttggttcagataaatatttaatattaattaaagaaataattaattagccatttgtatattgactgtgatgggagaataggctgcaattctaatattcgttctttgaaaataaaagaatgaggtttactcattccttttacatttttttattatttaaattttgttctctacatattctcgtccttaacttgctggaattgaatttgttatattttgtgagtaggacgaagtttccctactccttattgttctatacgaaatttcagtgctgttcctttagcggttgtaaattgagattttcatgttggaagaaaagaaagcatacccttgtttgtttgacttttgtgagcttacttagctagaaggggaacaccttttccttgtttgagttttggtgtgtttcatttacttctaaaactccatttcaattttattagtgactttttaataaagtggtggattcccacattaattaactatttacttgattataagttggtcattcttgtgaagaatctgtgtcactgtcagaccacatacatgtttttttttttttttaaatgtgtctaaatttttattatgaacaataaacacagttacactagatccaagtaatgctttgacacataccagaatcttatagtaccaatggcatgtggatactttgatcatgttgacttgttattacattttttttctactatatgttgtttgcagttacaagctgtaaaaagtagggattggtgtgaagc

SEQ ID NO: 23596 - DNA, 948 bp, Glycine max
  Intron number 2 from transcript Glyma12g00880.1 (locus Gly ma12g00880) derived from phytozome v7.0 (chr-ID Gm12; pos 459341 to 460288)
tattttctaattgtgaagcaaactggaattgtaagagctttagttatactgagccatatattttgatctttactttacttattgttcagcagaaagtcagtactttttctgttatgcttggaacatgctaatgactaattgattattggactgacttctattttgctagttactgttgtttcagcaaattactgttgattttcttttttgtttactaacatttgttcatacatattagaccattgaaacaccagaccaaaggttatattcttttttgctcatttaaataattcatttgttactttcttgaatcttgatgaattgaaggttgttcagatgaatcagacatgtaatccaatcacagaaagtaaatgttgtagaaaatagagaaaacaactacttcactaaaaatataaatcaatttggatatagatgttttcttcatgtctagaatttccaagggactttttggttactgcttagaggaaatgttttctgttttttattttttagtttcactttgttttctgtttttttgaagtttgtacaggaaaaagtgaatacaaaaaacaataaaaaattgttttcattgtttgctatactaacttttgaaaacatgagggaaaacagaagccgttttcttaaaccaaacagcccctgatattagtactattgaaatttgatttgaatttttgctgacacacacacatagatatgtattagataaaaaaaaaagtccaaataaaaaacctattaaaatgtttaatattacttatgataatgctataatggattatggatcatctctcctataagcttatgctattaggtggagactcaataaatgttttatatttctaacagatacatccatgtaaatgcaactgattcagagttgaatgaccattttcaggaaaaatcaatcatatttgcattgtcacagtctgc

SEQ ID NO: 23597 - DNA, 314 bp, Glycine max; identical to SEQ ID NO: 17911
  Intron number 1 from transcript Glyma09g05380.1 (locus Gly ma09g05380) derived from phytozome v7.0 (chr-ID Gm09; pos 4168671 to 4168984)

SEQ ID NO: 23598 - DNA, 669 bp, Glycine max
  Intron number 1 from transcript Glyma11g07530.4 (locus Gly ma11g07530) derived from phytozome v7.0 (chr-ID Gm11; pos 5279140 to 5279808)
caccagtcaccacctctgaactctctctctcatctgtaagttctttaaccttttccaccccaataagccaaaaagctttaccatgctactatttttttctgctttccttttcatgattcgttttttcattctctgcatcgctctcgttgattgttatgctccttcttttcctttttcttgtttctcgatctaatgcaacctgaaaaaaaaaaaaaaaagtaatcaccatttttcagatatgctattttttaagttcccgaggtttctttttacttgatgctgtgtttgtcaatttcggtctttattcttcaataactacgtctaattgaatcatttttttcatgtgactatatacctcgtacacatagattcataggtcttttggaatcaatacttttaagaaactgaggttgattcttcttattgtttttttgattgcaatgaatcaaacgtataaggttgacttggtggttggaaagaggtcttaagggtggagggagaaggggaaagatgtcctgggtttggattctccaatagtccaattgacatttctaaccaaattaacaaactaacgtttggtgtcaaaaaaaaaagagtcctaatgattttgattgatagtgtcttattttgtgtgtgtgatattttttatgcttatgtagataagtcaac

SEQ ID NO: 23599 - DNA, 988 bp, Glycine max
  Intron number 1 from transcript Glyma12g04940.1 (locus Gly ma12g04940) derived from phytozome v7.0 (chr-ID Gm12; pos 3284267 to 3285254)
actggcactcagggtggaggtcaagaaaccacagcgtaagaaggcctttatttctgccttgattgatgcatgcataaataagagccttggtgttgattttattttctttaatgcaagttcagaagtttatctatgtttatagattagttgatggaatctaaatataatgcaatttttttttttacactgtcatctaataacattattgacttttacaaaattactaagtcatatttattaagttatttctaactggttgagtgtaaaaaaatttacactaagagagtatataacagttaaactctaattgatatttcattgctacagttttatctgctctgaacttataactagtgtgatagaaaacgggttctaaagtggctataacagttgttctatttgaatttggtaaaacttgtttcaaaatgtgcttgttctgttagaaaaaattgtagttcatcaaaaccgggagagttagttttgtataataccatatgtgctgttgattagtgccaatcagtggaacttaaaaaattgtagttatgttagtgaataatttcagcgtatggattgtttgatctgggagggggagggtggattggtggttttagaaaaataaacaaattgagcgattgaaaattaaagacacattgacttagacaaacttgccaatggggttagttgggtctagttaaaggagctagtccttcacaacatgatgaatcaatattcgaattcttactgtccatattaagcgtttgattctatctcgaacaggattgtctttgaagaaaaatataattgaaaaagcaaaaaaagagattggagagtctccacatgctaatgaagtagtattgttgttattttgattgtaacataatgctataatggtcagcattatcatgattgggagacagagcagcaatgagtaacatggctttttattactattattgtagttggacagcaatcacacagctagttcacc

SEQ ID NO: 23600 - DNA, 976 bp, Glycine max
  Intron number 1 from transcript Glyma12g28640.1 (locus Gly ma12g28640) derived from phytozome v7.0 (chr-ID Gm12; pos 31973520 to 31974495 reverse strand)
gtcttcctcttcactggatcaatattcctcccgctgtaagctctctcctcatctccttttcttttctcttcgctttttcctttctttcttcaatctttgcgtcgatttctcctatattatttgcttcttttcttgcctgaaaccatctatttatcttttaatttcgattatcgaaggacgccttctgattttcttccattggctttactagttaatgtgccttctcaaataccctgctctctacggaccaactctgttattactcactgttcattcttttgttgcacaacgtcatatattttgtttcgccttctttagttatcagaaaataacacaacctttttttcttgttcttgttgttgtaattgcaatcaagtcttttttactgttttcaacttaatgtttctgttgctgaggacaaatccccagtttgaagcaatggtggacggcctaaattcttccatataaacatgccattgaggcctatggtgccgtcatagcgggcctcccttctcaaattgccttttgttaagctttttgatgattcaaaagattttcccttgagtttggttagaatatttcaagttctgaactgtgataattataagcaaagttgttccagttttccatttaagtattcaacttccgttgttgcttattatttctttcttctctattttaggtgcttgaattggataatcaaccttaaagctatatgttctgaggttgatgtgttacgtataatcttgttactgttctgagcgtatggaggggtgatacctgattgatctgggatgttgcgtagtaatctattctgattgattatgcatatctggaatgagttcaatggtcatattcttttattaatactgtgaactgtgctttatactttagtactggaaagaaggtacaaccaccagaggatttcctgtatccatgctgtcagagagcatgcgtggaatctgtacatcgggta

SEQ ID NO: 23601 - DNA, 576 bp, Glycine max
  Intron number 1 from transcript Glyma11g11900.1 (locus Gly ma11g11900) derived from phytozome v7.0 (chr-ID Gm11; pos 8488382 to 8488957 reverse strand)
agctcgttaagaccgcggtatgataataataatgcacttaacttttatacatattaggctttcccatttaatttcttcaaaagttaacaagcaagcataagttcattttagcttatagagaaactgaatatgttcaatttagcttctcaagtacttatggaaaagtttttaagattcaaatattaaaagtttcttgtaacaaaacttaattgaactattcatttcacacccataatccattttcttcttagcgctgctgagttatttttgttttcacattggctttgtaaaaatttagaggataaagtgtagttataattgtcacaattgagattatgattaaatacatgcataagtagtgattatgaaaattttctaatcatcaattataaccacactttattcgctgaagtatgttctctttatcttagaagccaaataaatctttgctgtcctagtttgccccctaagtaatggttttcacattgttgatgcaataatattttgctgtgcgttttcttgcttgtttgtgtggaaacagaaaacagtggcttcaccagggaggggtattttggc

SEQ ID NO: 23602 - DNA, 401 bp, Glycine max
  Intron number 1 from transcript Glyma10g41450.2 (locus Gly ma10g41450) derived from phytozome v7.0 (chr-ID Gm10; pos 48519225 to 48519625 reverse strand)
cttcttcttaccaacacgaactcgtccaaaccgccgttagtaccctccttttctttgatcgttttttttcttgccctttatcacttctcttcattttcaacgttttcgtgctctaaagttttcatctttgctgttatggggcacccctttggttttggttgttgatttacgttagtttactgtgagattcccttgtgtttgactttttactattactttagcacttagaacatgcttttagttgttgttgttctgtgttgatttagattctagtttagatataaaaacattatacagatagattaatttccttagattggttattgatttgtttcttgtttttttgtttgttggttggttgtatagaaatccattgcatcacccggccgtggaattcttgc

SEQ ID NO: 23603 - DNA, 623 bp, Glycine max
  Intron number 2 from transcript Glyma12g32220.1 (locus Gly ma12g32220) derived from phytozome v7.0 (chr-ID Gm12; pos 35763330 to 35763952)
catttttctttcctcaagactcaaaccagccaaaggtattgccttctactgatttttcatcttggttaattgttagcaatatacatgcattggatgtttttaacttataaaaatattgcaccattgtttggtatataattagtgtttcattactccctccatttaaaaatatgtcatttaaagtcaaccattgctcaagattaagattaagaaagctcttaaactgcattaattataagatgtatagttgtacttgactaaattatcccctgttaaagtattcgaaatattattactctactaattctcttccattccattttgtgaagaactgaagatccttagaaataaaaatataaatacaagggattttttttttgtcttcttagtttcttaaagtgacccttcactaaaacaacaaatattttgaaatttaatatttcaccgggaaagaagaactataatattgacaaaagtggttagaacttgcattatgagaagtagtaagctcttttcatattcctagcaattctctgttgtccttcttaaccaaagctgatacactcatacaagtttcatttttttcccctgaattttgactttaactcaaattagctgcagga

SEQ ID NO: 23604 - DNA, 814 bp, Glycine max
  Intron number 1 from transcript Glyma09g37610.1 (locus Gly ma09g37610) derived from phytozome v7.0 (chr-ID Gm09; pos 43144686 to 43145499 reverse strand)
ggtgacaaggtcatccttgaagaaccaattgagaggtatacttaattgatatcagttttggactctacattttgaggaactgtatattggtctatttattgtgctttttaaaagctatatctatttgatcgagtacctgcttagtgttttataatagcttcctatgaaacccggacactacaacacggctaatgtctaaaatataggatatggaaagacacggctaatatctaaaatacaggttacgaggacaccacattcacacacaaagagagagtctctaataaaagaagaaaatatgaataatatataacaaaatatttaaattgatggtatatttatctttttaaaccaaccttctatgtgtttttaagtgtttgagttgtgtaatggtgtccgcttaagtgtctaagccaacaaaaattcatttttaaattgaaaacctaataagtgtccggatgtatcgatgtctgacacgatgacactttgaacatgagaggtgtctgtgcttcatacatagcttctgtttttagttcttttcattgaccagtggaacaatttattccctcaccatgtttttgttcttctatcataatcataatacatccaaataagggatcaaacagtttttgccccattattttccaatatgtttgttggatgaataatattttcatttgagactcgtaagttatggctgaaatattccttgcttcaacattttaggtttttagagttccactgttggcatactaaatttatagattatgttgtttcagctggccagtgtgcgattgtttgattgcttttcatt

SEQ ID NO: 23605 - DNA, 574 bp, Glycine max
  Intron number 1 from transcript Glyma10g17590.1 (locus Gly ma10g17590) derived from phytozome v7.0 (chr-ID Gm10; pos 21364961 to 21365534 reverse strand)
ttggtgactggggaacacaggtataatttaattctaatgttgtgctatttttgtgccatgagtttgaaacagtgcatgtttaatctaatgataaatgatttatgccatttcttgtcactacatgttagctatacacttgttaaagctaggtttcttcgtatatggcacaactttgggtaattcatttgcaaaagtcatttaacttgtcaagcttatgtcgttagcattgcgtggcttgagaactaattatgtttgagaaaatccctggtataagttgcttttataattgttttcatgatcaagtacatttgcatcttaatgtgtgttctctgttattcttctttgttgtgtaaccttgaaaaattgatttcctaagacactgctgccctccctcccaataaagaaaatgctttacagtttacattgtttcaaatactcatcaaattagcgatgtcctttgatttcttattgaaatatttgtttgaatgataaaacattccattagtttggatgttttcatttcaatattggtaatataaacctcaaagtacatgcatttgttttgtagtttggg

SEQ ID NO: 23606 - DNA, 334 bp, Glycine max
  Intron number 3 from transcript Glyma11g11960.2 (locus Gly ma11g11960) derived from phytozome v7.0 (chr-ID Gm11; pos 8530175 to 8530508 reverse strand)
atcgtgattggcacttttcatgtgagtgagtcattctttttgcttttctttttttaaaataatttcttgccaagataagattcaatacaatttgaacaaccttcttccaatctgttgtttttttagatgtaagtattcaatttaaccacatctagcttgattggattttaaactacgtacccatagcaattgcttgtaatgatatcaaagacaacctttatcaatcatcaggagaatggttttattgtatatgtgcctcaaaatttattgatgctgatctgcacattaattgtttctaatgtgactaggtggcacaaaggagtacaaagttcta

SEQ ID NO: 23607 - DNA, 562 bp, Glycine max
  Intron number 2 from transcript Glyma11g11960.2 (locus Gly ma11g11960) derived from phytozome v7.0 (chr-ID Gm11; pos 8530575 to 8531136 reverse strand)
attttatttggttctgcgagctctcgacaccgttggtttgtattcgtatcttcgatttgaagcctcgcgttgtatttcataacttgcgatgatgaacgatagatatttcggttttaattaactacgctgtgttgacgtggttgttcggtgtttaattttgacttatttctttatttgtttgttttattcttagcgttgaatgttgttgagtggggattgatgttatcgtcgaacggctttgggaaataaaatgtgattttaagattcacctctttgaaaaagcttttgaaaatgaaaactcaacagaaaagcagtaacacaagtttttttttctttctttttttgttctaaaaatcataattattatagaaggcatgcaaaatttgcttacactgaaactattcaaagtccatcaatctgctggatatttattgtgtctattgtctttgaaagatttatgtttaaaccttaaaattattctattgagcaactgttctattcttcagagattaaaaaggctatctatattgttgtgattttttttcttttcttttgacagagg

SEQ ID NO: 23608 - DNA, 561 bp, Glycine max
  Intron number 2 from transcript Glyma10g39050.1 (locus Gly ma10g39050) derived from phytozome v7.0 (chr-ID Gm10; pos 46777589 to 46778149)
gcaaaaccctcgtctctcgtactcagggtaccaaggtactgcttttcgaatattcaacagggaattgggattttccctttttaattgaatattattggttttgtgttgtgggtcagttgcataaatcttgaaaatgagaaatttgttttgatatagcttggccctatgtgctaattgttgagttggatctattataaatgtatgctatcatttgccagaggactttgtttctctactgttttagtgcgtttagttttttatttactgtgtgaacaaagaagctaaacagaattgtagctccttcttatgaggttttctgttctcgttaaatctctataggatatgggaaaaaataatactggtttatagtgtgtgcttattgcattttgtttctattggagaacgagggtttatgaatcttccaagggtctgcttactgtcgcttattttcaagcatattatggtgtgtgacttggtgttatgaactttgtatgctcatgtagactgtgattgtttcaaataacagattgcttctgaaggactcaagcatagagtgtttga

SEQ ID NO: 23609 - DNA, 974 bp, Glycine max
  Intron number 1 from transcript Glyma12g34140.1 (locus Gly ma12g34140) derived from phytozome v7.0 (chr-ID Gm12; pos 37278714 to 37279687)
ccctgcacctagtcgaagaggtatatatatatatatacgtctttctattctctcactctcactctcacgtcgttaatatttcatgcataatcagcttccaaaattgtgataaactgtataaaaaaataacgtttcaaattacaaagctatttttttaattttcaaaattattaaatataatttgtttagtttataaaaattcgaggataaaattttaaatgattgatgttgtagttttaaagattaatttaatatattatttcaagcaaaatgctttttgctacttatttttttatgaatttttaagatgttattttcttgtgcgtaattaactaacataaaaattgtgcaaggaaatatactgaagtttgcacatttcttatataaaaaaatgttaatttctttcacttcttactctgtcctccttaatttatacctcttaatgcatatgataaaatgataaatgagagggggtgaagaggaaaagagactcttcataaggaataaaaaatgggtgttaaagaattgagtgaagtaattaggaatgttttttttcattttatttaaaacactagctagtatggcatttatttacgaggtaaatccacgagaaaaaagaatgataactgagagtaatactagcattagctacatgcaatatgaaataaacaacagaattgacgttgaggattatgaatctttcatataaaaaaaaatgaatacaaggaaaatagaaaaagagaaacgaaaggttattgagcacatttcgaattgaactgttaaatttatccaaatcgaatgaactatacatgcattataagaggatatgaacaaacaatttctatatctagaagaaaacgatgtagctgttacacagcatggagaataagatcttctttataatacttcttacttaacatgatatgcatgaattgtttttgacatttgagtgaatcaatgttgcagccacgaga

SEQ ID NO: 23610 - DNA, 626 bp, Glycine max
  Intron number 3 from transcript Glyma12g07160.2 (locus Gly ma12g07160) derived from phytozome v7.0 (chr-ID Gm12; pos 4890815 to 4891440 reverse strand)
gacatccaggccaaaaaagtgaacaccttgatcaggtgagcatctatgcaatgattgcagttttgatagtaatgatttcatattgcattattgctgatgaaatttgttgattggtagtgatttccgtattcacttagtggtataaggtattgatgttgttgtgaatttgatgcatgatgtcatgatgtcacatgacgtcacatgtaatttctagttttgatatctttttgaagaccctgttatgttgatgcatgatgtcatgatgtcacatgtaatttctagtcctgtctgtacactctagcttttttttcctacctttaaacataatggaatgttcctgttctctgttttgttgtttaattaccggtgtgggaattggtggtggtttggtaccatgttatgagttgataatttagaggactaagtctagggttgtcaatttcgacttggattgctgagaaagtagggaatcctctgaatgtttctattagaaaatagaaaatgacgggtactgcctgggattggttttgagatgccgtttttttacattggtggcattgtatttagtttagtccaacgtggtattttttctccaatttctgaatttgaattctgttgcaggcctg

SEQ ID NO: 23611 - DNA, 722 bp, Glycine max
  Intron number 3 from transcript Glyma08g43690.1 (locus Gly ma08g43690) derived from phytozome v7.0 (chr-ID Gm08; pos 43469590 to 43470311 reverse strand)
agagtgcagcagcttctgtcaagaaggaaggggaggtacaacaagttgaattgaactgtgtactaaatgctaatacttgtttgtttgttatgtacagtttctcttttagatgctttagaagatgaatgcttgctgtgagattagaatagcttttgtcaatgttggttgttgaaacttggaagcttgaatcttttgctttatttctgtggattatacttcaatttcaacaatatgcactgtgcactttatttggttacgatgcacatattattgtcattccgccaattctctatattttataagaatttattttatatgcactacttttttacacaaatatccaatgagatttgatcattttaccacgtcatctatttcattaatatgatgtgaccacactgcagcagggtaaattcctgttggatgtctatgcaaaaatgttttacattgagcctgcgtataattaaacccattttggaattctagttttgaattattcaagagctgtaaagtcttaatgcaggaaaaaaaatctctaaaatgtgttctggaactgggttgctaaggctacatatgaaatagtttttatttttttaaattagaataggtttatatttttttgtcaatggtgatattttttcttcaaattctgtttttcttgcagttttgatgataaccttggactgtttctttacattattcaatatttctgttttaacagg

SEQ ID NO: 23612 - DNA, 300 bp, Glycine max
  Intron number 1 from transcript Glyma10g12700.1 (locus Gly ma10g12700) derived from phytozome v7.0 (chr-ID Gm10; pos 14237834 to 14238133 reverse strand)
acgactaacaacatcaaagctttgatattggtaagtaaatgcctcaaaacttctattatatttcctgtttctgaagtacgttttttctcactaacatctctttttataacattaatctctttaatcctctcatttgtactaattactttatcttacatttttcttccttttctattaaaaaagttgcccgattttgatatataaatgcaatttctcttttcattttaccaaactttatataaagatattttatttgattcaccaggacatatttgctgctggaactgatacttcagcatc

SEQ ID NO: 23613 - DNA, 569 bp, Glycine max
  Intron number 1 from transcript Glyma09g39660.1 (locus Gly ma09g39660) derived from phytozome v7.0 (chr-ID Gm09; pos 44709435 to 44710003)
atcaaacattcgtgaagagtttgatcgtaagatctatcttcatattgtttctacctatgtatgtatattgttgatctcttagtttattttttatcaagtgttagtaatatattctctcgtactcattttttaacactattctttattagttaaaattcggatagattttaatactagttaagggtgaaaaccatcaaataataagtggcacacacttattttcttagaccaatctgtgtcggagtaatctgatcggccaactttagcaaaagaaatcttctataaattgaaaaacttgtgtgtgtcggagtaattacaaatattttgatagattgatttataagtttataggatgatatatacggttaacaaattcacatattttataagtatttactatatattatattctccctaacctagctatataccctagcttgcttgctccacaaattaaactgtcataatctgggaaatatttgtagtaaagcaacatcaatatgctagcatatgatcgatatacttgaatatatattaacgattgatgtttgtttgattcaattcaggat

SEQ ID NO: 23614 - DNA, 369 bp, Glycine max
  Intron number 1 from transcript Glyma10g09650.1 (locus Gly ma10g09650) derived from phytozome v7.0 (chr-ID Gm10; pos 8928258 to 8928626 reverse strand)
attgtagctggtccaagaagtggaaaggtattcttgtactttagggtcttcttggtccattgcatgttaacattttcttttccctttgtgttttttattttcatattggagctgatttttattttcaatttataccagacatcaacaatggtaaggcgtgtattgatgatgctcaacgaggtgatgcaaaataattgttcctaagagatagatactttttacttacttatctttgatccctgtccatctaaacctatctttctaaatcaagtgtttttacctgttaaatgttgttgctcaatacattgtttgtaatttctattttttgctaaatacaagcagggcattagttcatcaaacattcttgca

SEQ ID NO: 23615 - DNA, 603 bp, Glycine max
  Intron number 2 from transcript Glyma11g36810.1 (locus Gly ma11g36810) derived from phytozome v7.0 (chr-ID Gm11; pos 38141434 to 38142036)
actaaaacccttgaacatcgttattgctggcgcaggtattaacctagccatgcctatgcttgtacccatttcgttttatgcatcaaaattgtattttttttatcgacaaatgctggttgttcgtattgttatttcgttttatgcatcaaaagtgtatctttgctgccaaatttgtgtttttcttgctcttgttgttctgggtgttttcaaattaggacctgttataccacccttttcatttcatgtatggtcttctattctaatgttagtgtgtgttagaaaacaacttagaagcctgcttgggctacgcattaggaattcctttctttgtgattaaatagatgtacacatctcaatgcttgattacattgtattgtgacagtcctcctgtgtcggtaaggaaaaaagttatggaattttaggatcttcaatttttgctgaaatttcaaataaaaggtatcctgatatcatgttggatatttaaagacaaaaaaatttgtaaactaatctttgcacattagttttggcctctctgcctattggattgatgcatgtttcattattgcaggattggctggtttatcaactgcaaaatatttggct

SEQ ID NO: 23616 - DNA, 733 bp, Glycine max
  Intron number 4 from transcript Glyma09g00630.2 (locus Gly ma09g00630) derived from phytozome v7.0 (chr-ID Gm09; pos 316247 to 316979)
gaaagaagtgacattcctgacattgataagaaaaagtgagcgattttcttatgctatttcgtcccttttgattagtttcctggtctggtgattttgttttgctgcctgaagggttttatttgggggtgggtgggggttaggttcataatttgtcctggaagtgcgtaataactgttgagttgatactttgatgttcatataaaatgctggtattgatggtgatcaatcaagatttaatgattttgtattgttgttaaagctatatcatgttttctatatagttttacataccacatcataacttcatgatcaaaatgtggtttgttagtaatgtaaaacagtctctgcttaagaatgtttgattatttgatttgttaataggggcatgcttcatatgcatgtgcagaatggctacgaatattgactgttgttttttttctaaacaaatattctcttttgaactatccatcatgacagtgaagctgcttccaagtgagattctagtttgatattgttttgaacattgaagcatataagctagagataagacaagtattgaaagttggaggaccagacttaattttttcccccatattcctgctataaagtattggttatattaatcttgattaatgtgtatagttattctgtgcattagtggattctcaattggttctcttcttgttgtgatgatgtagataccttgtccctgctgatttgactgttggccagt

SEQ ID NO: 23617 - DNA, 944 bp, Glycine max
  Intron number 1 from transcript Glyma08g46530.1 (locus Gly ma08g46530) derived from phytozome v7.0 (chr-ID Gm08; pos 45609760 to 45610703)
atcaaagaagacgagagcaacaagaaagaccgcaggtaacatatacaaaagaaaggaatagctgcctagctccacaggctgtagtttctaaattttattaatggtgcttaatttttctgttctctataacttcatttatgatatgatcatgttttttggttaggattgggtatactagtagttgttttataacctcaaacaggtcaaataatgacccaattggatggtgtaacccaaatattattctcaataattcggctcgttttttgttcaaactcattggtgctttaagtgtccttgtaaatcagttttcttcttccttttgatcttcatttcattactactattttcgtattcttggtggaaagtttttttttttgttacaaaacttgtaaaaaaaaaataatccttcgaaaaatactagtaattatattgatttacttcttcaagtttttgtccttaattaactaactaataatttggataacatatacatgttatagtattcataagaattgaaacaattattctttgtttagaagaaattttttactttaagggatatgtttagtgagaagtaaaaaaattaaaacttaattttagtcatatgataatacatgaatctttaaaatcattttaattaatgaccatcttaaccataaaatccactcttttaatgttcttatacttccattactgaaaatttttaattttacatttatcactgaagatttaattcttttagtgaaataataaaaatatgttgataatatatgttatacagtttattcatgttataaggtgataaattttatatttttaatttttaataaaaatcggactcacaaaaaaaattaatattgtagaataaatcaataatattgactcagtgaataatttacttggcagatcttggaaagccttcaaggacaagcttcggctga

SEQ ID NO: 23618 - DNA, 903 bp, Glycine max
  Intron number 1 from transcript Glyma11g38060.1 (locus Gly ma11g38060) derived from phytozome v7.0 (chr-ID Gm11; pos 39013949 to 39014851)
ctcttcttctgcactggctgagcttgattcacaaggttcaatcttctcttcttttctcttcatctgccatgctaagctaaagctatgcaaaatttaactgcactttttatttccttcaattcctttgtctctgacaggttcgggatttcaacttaatagaaaattgagattcattcatatttagactgaatagtatttttgttatgcctctcttaataagatttaatttctttgtaatcctttctggtacactagtgtaactgtttgggttgaccaggaggcactttgatccatcctcattttgctcttttagcaaaatcacttggatttttttttaatttatttaaatatgctccatatgaattaatgatcattctttcaccttagaatgaactgtttagtggcagtgtatggaaattaatgaatcttttgacctcggataaagtactttacctttgcaaacttgtgttagcaaactttatctttgcacatcattataagttatgttattaacttattattgaaacaggcatgtgtttgtgtattccttaacaacattctctttaagtaacatgtcccttgtctcaattagaaattacaatcaaacaacagtaaatatagctgagagccaaggtgatgtactcttcagtttttggcttagtttagagttagccatgttcttctcaaactttaatttttaattcattttatgaggaatacatagataaaaatgcttgtcgacaaaatctgataatcttatcattttataagatttcagtagaaaattatatagatttgacatttatctgcctttctagttttgtcaaagttgcaactggagttggacttaactgtcaatcttaaactctaatagatgcataatgtttatgttcatttcagaag

SEQ ID NO: 23619 - DNA, 521 bp, Glycine max
  Intron number 2 from transcript Glyma09g01300.1 (locus Gly ma09g01300) derived from phytozome v7.0 (chr-ID Gm09; pos 792186 to 792706 reverse strand)
gcttcttggaagtgttgacataaattctgttggaggtaattgcgtgtagaattggcttccatttattcaatttctgtctgttcatgttatcttattatataatgaaattattcgaaccttttgaatcatagtcgtaagaaagaagaaatatcattctgccaaacttgaattaactatattggtcatcgatttgagaaaagaaatacaaaaacaaatctgtaccgtcttttggaaacttgaacatctcatttcttcttcagttgtttaacattgatactgttaccattttaacactttatcattatttggtaattgtaaatttgttaaaatcctactactgttaggttcttttaatggtttatacatgtaagtggtaaaatttgaactgagaatattcaaatcattacatttttccattgttccgtcttgtaacttgctctcatgaaattctttccctatgtaacttttcatcacctaatttattatgtatattgtgaataattcagaaactctggagccaa

SEQ ID NO: 23620 - DNA, 522 bp, Glycine max
  Intron number 3 from transcript Glyma10g43730.1 (locus Gly ma10g43730) derived from phytozome v7.0 (chr-ID Gm10; pos 50316190 to 50316711 reverse strand)
ccctctctcgtcactcctcctgaatttgcctccgtgtatgtttcatccatcagcctttctttttcttatttcaagctttactttttttgctgcctggaacattttttatggtgtttcttttgtgtttgactttagtgtgtgtgtctgtttcaatgttacatagaactgattttgacacttgaaccggtaggggctcccagtgttgtcactattgttcactttaggaaatatgtttttcaagagaatgttgattcatatactcagttttatttgatgcactatttatattacccataatcctttttgagttttttgtctttttttgggcggtgagtggattatgatttgtggttacctgaataattgagaagaaaaagggtacttaacttatacattgctgtctcaattttttcttataaaatattatttgaactaagttgttcttaagcactgaatttgagtatactcaatatgtttacatttgcaggggatcaaagatatttgggtcttttgtgagttttt

SEQ ID NO: 23621 - DNA, 518 bp, Glycine max
  Intron number 2 from transcript Glyma12g33230.1 (locus Gly ma12g33230) derived from phytozome v7.0 (chr-ID Gm12; pos 36571297 to 36571814)
catcaagtcctagcattaatttttctgaaccacaggtagtgaaaatatctttttattcttacgttcttctgttttacatggagtcaagattcttcttgttaaaatgtaataaaaccattcgttggccttcacatgacaacttgagctttaggtataattggtcattgacatggtaacaaagctttctaaacaaagttgctagaaatttgatcttttctccccatgttcttctaaactgaaaaattgaatttccacacatggtaaaatcgggcctgtgcattgtccttaattcacgcatgttaaagatgtaattataaaaccagtaatgaacctttgccttatagcttaagctttttggataattgggcattgacacttctgtatactgatgtcagagttaatggtgggaaacatttctccttattagctatgtgaattctttttgaaataacttccttgctctcgaatatgcttagatgtctaaaactctaagtggtgtttcttatatatcaggttaa

SEQ ID NO: 23622 - DNA, 548 bp, Glycine max
  Intron number 1 from transcript Glyma09g04950.3 (locus Gly ma09g04950) derived from phytozome v7.0 (chr-ID Gm09; pos 3730585 to 3731132)
ttggtttaccaggacctccttacaggtaaactaaactaatctctatttctttcgtcgtagcttttgcttgtagatctattgccatcggttttggtttcgcttctgtgtttagatctgtttcgattgcgcctctgattttgactttagagtattgaactttcgtcgatgtttggatctggcatttttttcgatgtaatttgattcattgtggacatgcgttcatttcacgcgtatctgattgttttattattttaattctgtttgttaattatagctaggttattgatttaattaacgcaaaacgtttttattttcagtagtttctgtgtagtattgtctatgattcgagtgataatttagagctaggctaatggtctgcttgctttacaaatttagctgtagtgtataaaatattattatttatgaaggaattttgttttatgccattcttcgaatttatttatttttttgtgtgtttctgtctcgcccctgttttatctttttaaatgtttctgttaatattgactgtgtgctgccttgtgtaggtg

SEQ ID NO: 23623 - DNA, 281 bp, Glycine max
  Intron number 1 from transcript Glyma12g06370.1 (locus Gly ma12g06370) derived from phytozome v7.0 (chr-ID Gm12; pos 4324951 to 4325231)
aagttctcaaggagcttcaatctgtaataatcactcttctctttcctttaattaccgttcatctgattttattttatttccctgccttggttttgacattttaggttagtaaatttctagctaaattgaaattatgcgttgatttggtttgaaagaagtcttgttgttttgaattagggcttcgatcatttgcgcgcttttttttttgtttggtttatgagttatattatttttttcttcaatcgtttgtgttgtactaaatttttttcttatgattagat

SEQ ID NO: 23624 - DNA, 561 bp, Glycine max
  Intron number 2 from transcript Glyma09g35780.1 (locus Gly ma09g35780) derived from phytozome v7.0 (chr-ID Gm09; pos 41694550 to 41695110 reverse strand)
ggtatgccattcaatcctcacttcttcttttcttttttcttttttctttttttcctgtttttccgatagattttagcacatatttcacctctgcttaatgatgcagaagtcatatgactgatatgagcctagcgttacttagtactcagtattgtttgacaatgtaggacctatgaatgttctttccacaagtaccttttaggtacttagtatgatggacagctataagatgggatttttaagatcatgcataattcgactcaccatccttactgctgaaactttatcatacttgtgagacaagtagattagtattcccactagtttttttctttagggtctgtttcattcagtccatttagagcctttttaagctcatgtactttaccttcaacagattcaaaccgagggggtacctccatatcaaatatgtcattgaatgaacttgagctttttttttcctagattttgacagctattgcatgttgagatgtatattgtaaaaaatgtgtttcttgggattcatgtgatgttttttcaggtggcgggcttggcatcttc

SEQ ID NO: 23625 - DNA, 320 bp, Glycine max
  Intron number 1 from transcript Glyma09g35780.1 (locus Gly ma09g35780) derived from phytozome v7.0 (chr-ID Gm09; pos 41695273 to 41695592 reverse strand)
cgtcttactcaccttcaacgagcatcaagcattaggtttagcttactttatcatctgttagtagtgttttcgaagaaatttgcttttctacctgtctccatgtgttactcgtgccaaccacattctctatctccctctgctttgccttacctctcatatgattcattataacgttatgaatccttttatctcaattggattcattaattttcgttttaatacttgacaactgactctgctgtatctgtattgatagatattttgagtatttgtgctttataataaacattatttcttcattacatagctctgctttacca

SEQ ID NO: 23626 - DNA, 1026 bp, Glycine max
  Intron number 2 from transcript Glyma12g07280.1 (locus Gly ma12g07280) derived from phytozome v7.0 (chr-ID Gm12; pos 4980207 to 4981232 reverse strand)
ctggagaggcagttgaagctttgaaagctgggtaagtcattgcagtgcccactgatacactctatggatttgcttgtgatgcttggtatgctgctatttcaatctctgctttaaacctattaaatagcctttgtagcctgtatatggtttaaatgtttcaagcttcacttttgtttctggcctctagttttgtttttcatctatgtcgcatcttataattttcattgcttcttatttagctttcttgggtatgtgcaggaaacagtggtggctgtgggtttactgtcttgtttttcaattgtacatgtttgaaaattaaaagtcaagctacaagataacattgaccgataaacagaatctttcttcttgtataaaacaccatagtatagtgttgagtaagaatgatgttgtaactgcaccactacactagtgaaatttcaatgagtttcagtatttatattttataagtctagagattgtcaagcctctcttgtgcagagcgttgtgtggccgcttgctgttggttctatttgattcgaagtggactatataactgttatagcctttaccatttattttgttttaatttgtgggcctaatattcagttattcaaaatatttcccagcaaaatagtgtgtaattataaaaaagagtcgataaagtttatcttcaaagactgtttattgcagtcctccatgaaagaaagcagataaataattgctttatgatatatcatatcacataggttttgataagatatcaatttttctacatagacatcagatgtgagaaaagttagctccacactatacccatccttctgaatgcccacattatacccacatagaaataagttgtgttttaatcaaagatgtttaaaatttcgttcgcactccagtctccacatatttagacctaccttgtgtctctcccaattgcataccgaatgattgatgattacctgttaccttctttgtggcatgttggcagctcattggaagcagttaacagaatttacgagatta

SEQ ID NO: 23627 - DNA, 739 bp, Glycine max
  Intron number 1 from transcript Glyma09g34670.1 (locus Gly ma09g34670) derived from phytozome v7.0 (chr-ID Gm09; pos 41003679 to 41004417 reverse strand)
actcagttcatctgcaacgttgtccagagccgcaagtcagtccaacttctctttttcattttgttttattttagtgtcttttttttgtgattttgagttaagtttatctttttttattcaatgttaagcgttttatgttttgttttaattttcttgggaattttattcaatgtttgtgctcaaggttttaaatcggggtcgccgtttagttgctatccttgatattgttaacaaatggtttagaagtggctgcaattgcggttgagttgccggtgaaattgtgatccggataatatttttaacagtggtttggattgcttttaatattttgcaatctacattgatgtgatatggctttttttcattttagtttggatattgatatatattgtcattgatgcctttgatgttaaaggttatagataaaattcatttaacttgtgttctctatattatgtttgtgttttttaagacttctaaatttgaatgctccaggagaaagatttttggaacatgggtggctatttttgtgatggttgtagagtttcataaaagaagaatgtattctgttgtgcttttgttggtttttactattgtaaactagttgagtgctggtttgcccagtgggaggcagttttgcttgtgattataagattaatttcttttcatatcaggggttagttgatgttttggtttgtctaatttgttgtgagcaggattattatcatcgttgacctag

SEQ ID NO: 23628 - DNA, 1023 bp, Glycine max
  Intron number 1 from transcript Glyma09g20270.2 (locus Gly ma09g20270) derived from phytozome v7.0 (chr-ID Gm09; pos 25110588 to 25111610)
tcataaacctcgcctttaacttggagcttgttaaggtacagtgcttcttggaagcttcttctttattttgaagtttaattttagggtaaataatgaaattcgttcactaaagtatgagacagttactaactcggtcttaaaacatgaaaaatataaatttaaagtgcaacaaattaattatgtaattaaatttatgatatcattttgtaatatttaaggattagtttaacaataaattatatttttagaggattaatttaacattaaattataaaatttagaaaccaatttgtcattaaacatgctttatacatttagggactaaagttgaaattttcatctttcaatgaccaatttgttaacgtctcacactttcagaaataaatttatttgtttgttcttaattttaagagtatctatatataatacatgtaattataattttaaaaaaattgcattgtcaactaataataaaatcttatgtcaactaataataaaatcttatttgtaataattttattggtctttataataattagctaagaaattatatatacataatttctgattagttgacggtaaatcatacacactttggcgtatagaattaaactctatcattaaggtagtacaatatgttttaacttttaactcataaatgtttgacctagtttttttatagtttaaaagttaatttaaaatcaaaactcataataagagtttttttaaaaaatagaagttattcggtagtttgagcttaaaaatacttttaaaactgagtttttattttttattttttgtcttacattcattagttcaagatgagagggagagagactaaaatgagcagtttatttttagtgtgatcttacaaaaactattggtgccattcagactttgttctaaagtaacaagaaagtttctctcccatgttagtttctttttgttcacatgccagcttgtaattgtgatttaaggacttgacagaatattaatgaaagagtcatgaaaagtgttgcaggg

SEQ ID NO: 23629 - DNA, 1006 bp, Glycine max
  Intron number 2 from transcript Glyma10g24060.1 (locus Gly ma10g24060) derived from phytozome v7.0 (chr-ID Gm10; pos 30875816 to 30876821)
aattggaacaaaagaaagccgaacgcaaggaaagggtaattgttgttctttccttcattgaacacaccgttccatgtattttttttttaattcccgcacgtaatatgttttgatttgtgatgagatagacagtgaaataaatgaaaaataaattgtagaaatttgatggagtgatggaccttgttcttatggaaattaatgggtaaaccgccatactggttgctgaaagtgtaaagtcatataaatttttgaatcatggaccgaagggagtgacggattgcactttcaggaacttttttttttttaatttttattactgagggtctaaagtgactacagctcacactttcgaggacaaattggttatttactcgaaaaacaaattcatgggaacttgggttctaactgacacctagagagagagagagagagagagagtgaagtgtaggaatgatgggtgatgtgatgtgatgggaatagtgagacaaagatacatcgtagatgttaatgaggtgttcgattattgataaatagaagtgtttgcatgtctttattcttatcagtgctgattgacatccacttcaaaatggggtgggaagataaaggaattaggaagaaaagagagaaggtagagggagagtgatatatgtgataagtaatgtgatggaaaaagaagagataggaagaaatgaggtggaagagaaagtgtgtggatatttgtaatatttgttttcttatattatatgaacccttcatgttttctcgtaagtcatgatttgtcagctgtattgttgttgaagatctatttttattaatttattagaactacgagatttaaacctgcaggcaaattgatggtgtggatgtgtacaaaaaggctgacatgaactctagaatgcttctgtgttatgcttcagtcttgatttctgtttttcttgtagttagaaactttactatgttcaatgcttgtttcaggctcggaaaaggaaattgggcttgctagagg

SEQ ID NO: 23630 - DNA, 853 bp, Glycine max
  Intron number 1 from transcript Glyma09g03830.1 (locus Gly ma09g03830) derived from phytozome v7.0 (chr-ID Gm09; pos 2767321 to 2768173)
aatcaacaataatttctcaaacagcgttgtaaaaggtaaacgttttgtccatatttcttttctcaattccgtgttttcgttgttttcgtcaatctggtgttttgttcgattggatttcattcgcaattttcgattgtcgattcttagtcgattgagttattttctaaacatgtgtttcttacgattctgtgttgaattaaattaatagttcttgtacgtagcataatgttggatttaaaatttcaattttagtgttctgcaaggtattttagctcatggtcctccaaaccctagatcgtagcttttaactttgattgaatagtaattatgttttatttttattttttttaccatgtgtatgttatataatatgatatgatggtgttttctgcttttatccttttattttgttaggttttctatggcgtagaaattttatttggacagattatctgtgccaattatgaatgtccaggtgggaatgagtagcattgagttatgcagaatttgaaactaaacagtttgggaattttgagagttattatagttggcttttgggaggatttgggttccagttgtttaattttaattaatttcttttccccattgtttgtgtgtctgtgtgtgtcaagtgtcttacttgttaatgactcaacttacttgggtcagagtttgtggtcagtcatgttcatctccaactttccctttgaaatcagctgttgctaacttcagcccaatggttctggatattgaattaagaattcaattgcatgatttcgtttatattatttcttcccaaaatcattcaattctgtttctgtttacagaaacacattagactaggcagataact

SEQ ID NO: 23631 - DNA, 352 bp, Glycine max
  Intron number 2 from transcript Glyma09g03830.1 (locus Gly ma09g03830) derived from phytozome v7.0 (chr-ID Gm09; pos 2768273 to 2768624)
aaaattatctattacaggtttggtttgcctgctggttattaatactatttttttaatttttattatataaatatagcttgaaacattatatttggaccatggaacagaaggtttttttctggtagtttttgtatggatgaaattgtttgattctatcttcttgaaatagtcatctgagtccatggtattagatgttaatcactcttactgaaaggagaaataggggtgggagtgggggcggggggatgaaaacaaactcctgtataatgttgtctaaggcttacaattgaatcttcatttctttgtctcttttgcagccgaacatttttatctataattggtggagttgttg

SEQ ID NO: 23632 - DNA, 614 bp, Glycine max
  Intron number 2 from transcript Glyma11g26210.1 (locus Gly ma11g26210) derived from phytozome v7.0 (chr-ID Gm11; pos 25075909 to 25076522 reverse strand)
tttacttcagggacactgatagagtaatttccttttctaactataaaaattaggcaatgcttaagtcccattttgtagtttttttttttttttttatgtaatcatgggattagttgtccttaccgaaagcagtgacaaattttcattggggaccttgagcgcatatgaggtgggtattctcttcctaacatgatttattctatatccaacggccatcgagaattcaaacataaatcactcggttatgggacacaaatccctatcacttgtatcaacagttgttgagtacaacatctttatttcccataccataaaccacatgcctcttttcatttaatcttgacattttagtatgctagtgttcagattcattctatgctaatgtgtgcatggatggaatatggtatattaaactccttaagatagggatatgtggttttgtggcatgcacatttcgcaatgttaaattactggatttgttttatctttgtattatatgcatgcatgattgcagaattaaccttgaaatcacttataaaaagtagtttattgataagtttgtgacttgtgcaaatacaggaagaaatacaagcacataggcctacaagcaataa

SEQ ID NO: 23633 - DNA, 651 bp, Glycine max
  Intron number 1 from transcript Glyma09g03740.1 (locus Gly ma09g03740) derived from phytozome v7.0 (chr-ID Gm09; pos 2728890 to 2729540)
aagtactaaatagcagagaatgtttgtacaaagattactagtttgatggaaaatgggtgatgccttccaaggtaaagaagcttctcctttttataatcactcttttcttcggcaattgcaattgatattattaactgtttccaaaattgatttaggggatagtaaaacttcaaacacaaatgtttgctaaactctcttagatttgattagaatatcctatatctggttactttagattatgaatcagtttctccagaggagttctagcatcaattgaaacttgagatttcaattgaatgatcccaagataaaaaagctttgtaacaattttccagcaaaaggaacttacaaaagcaaatcatttgcatcatgcttaacttgttatattaatttcatggttgtcacttgatataaagttgcctgttttgtttcaataaattaaattcaagttcaatgctactgaaatattttcaaactatagtagcagttataaataacataatattatgtgtttaagtgtcattttcttcctaatctctcttgcatccttttttcttcttttttttttttggcggaaatgcttaaatgtattggacaatatggattttaaaatatcagaaatcaagtgagctggtaaagaaatttggagat

SEQ ID NO: 23634 - DNA, 674 bp, Glycine max
  Intron number 2 from transcript Glyma10g16100.1 (locus Gly ma10g16100) derived from phytozome v7.0 (chr-ID Gm10; pos 19023453 to 19024126 reverse strand)
ccatcaagattcaaagcacgtaccgtgcacatcttgtgagcttcctcaaaacctgtttcttcatcttgtgttaagcactaaattttcaatatgtttgaaattttaacttgtagtttgcaagagatttgcatagacaaaataaacaaacaagggacagtaattatgagtaaacccatcccgaaattagataaaatgttcgtttgtattccttttagtaacataattgtccatttaggcaggaagaggagatgggtgaactgaatgaaaaagggtaattgtgtcttgtgtctagtaattagaattaatttgtcttttgcttccatattcattgctagctttgtagtgaattctattgaagattggttttataactttcgaaatttgcaactaaatatcctgttaaatcatataaagagatgttgtaatgttgattttttaattggtcctcatttgtatttttctttttccactgagaatttgtgttttgagtttcagttttgatcaatttgattctctattcacaaatgtattcattcaaatcaacgtaatctatgtggactcaccaaagatttcagagcatattcatttaaacaattctaaactcatttgaacttaaacttgaaactgggaacgtaacaggctaggaaagcattaagagcattgaaaggagttat

SEQ ID NO: 23635 - DNA, 986 bp, Glycine max
  Intron number 1 from transcript Glyma12g06310.1 (locus Gly ma12g06310) derived from phytozome v7.0 (chr-ID Gm12; pos 4285874 to 4286859 reverse strand)
acagctctcgttaccggtggttccaaaggaatcgggttaccacctctccttcttccatatttattcatttcattttctgttcctccttcttccaaatttgaaactccttactcaaaatacatgttaattaatatgcaaactactactatcaattaacagaacaaagctagtggctataattaatgctacttcaaagcaaacatgtttgtaggctgattgaggaaagagggttaaaatttacaaataaattattaaaataaggctctagttattttaaaattgagtaatcacaaattattttaaaaaaatagttcaaaatcaattcaattcttggaacaggttcaagactagtttacaatcaattcagaatcaattttttaaaatcaatttattctaaactgattttttgaactaatttgattatttaaatacataattgaattgattaaaacaatttaaaattagtttgattatatatttttattgtattagtttttgtacaccctaatcataatatatagacctctatgttaggacaaaccaacttatgtgtgaggagtatatatagtaatatagatattagaattgagtgttttatatattgacacaccttcttttattttgttgtcacaaaattaaaattcattatatactatattttattcaaatttcatatttaccaagatgaggtggtcaaagaaaaaaaaaattagcttaaaagagttttaggtgtcatgttaatttttttaaaattttgatttaataatatcacgtgaaacattgtagtgtcagtttattattttttttaaactaacatgacactaaaaactttagtttaactaaagtttttcaacgttgactaccccggtttgataaaatatttcaaaagagccttaattcttgtagaaaataagtgggttttgcaagacgcttgtttttcaccaatattgattcctgtgatataatatccttactaatcactagat

SEQ ID NO: 23636 - DNA, 842 bp, Glycine max
  Intron number 2 from transcript Glyma11g34490.1 (locus Gly ma11g34490) derived from phytozome v7.0 (chr-ID Gm11; pos 36310205 to 36311046)
tgacgactcaacaagcagaacggccataatagcaggtattcattgcacttttagatttttaatttctcctttttaaattcataaaatttcctcttataacatactattacatatataatagaatagaaatagaaaagttaaattattttatttgtgggcaccgaaaagagtattaggatttataataagtcatggatgtattgctgaattcagctaacccagctaaatcctttaacccttccgctaaattttatatatgaatatcgtattgtttagtagtaagccttttttcttcttctaattgttaaaggtgttaatgttttgacatcttttcaatagtctatatagtatatactagttctaacagactaacacgggcttgttaaaaaagtaaggctagtctcatgcggaaaaatgggctgtgcaaatgtgaaccagtactgcatacaacgaaattgtgacagaagcaatttaacatataaatgatgacatgtgaaccaatgaaagtcttcgtcaataatgaaggtctgagtgatataaattgcctatgacagttgaaacttaaatacaggtcaaaggaatcatctacctacccaagcattgtgagtttaatataagggatagagttttaatttatatgaaaagaactcaataattgtgtacttttttatgtgaacttggagttgataaattgctcatatttcatccattgaggggaaaaaaagtcttctcaatatccttgttgaatgaaaattggatggctattctgaacactggtttcttgtggcctcttttgtaactaattttttaaaactttgattgcaacaatgtgcaggttcagt

SEQ ID NO: 23637 - DNA, 351 bp, Glycine max
  Intron number 1 from transcript Glyma09g12480.1 (locus Gly ma09g12480) derived from phytozome v7.0 (chr-ID Gm09; pos 13291581 to 13291931)
actgatccttgcaatttttttttggtttgtttttttaaagtatttttgtttcattatttttctttaaagtgttttacataatatttttttcattattcaaaatatttttttacttttcaaaacattatgtaaaatattttaagaacgaaaaataaaacaaatatatctttaaggactaaaataatttttttaaggataaaagtaaaaaaatagtaaaatacagaaacaaaaaatgtatctgagtttttttttatcaacatatgttaattattaataagaaaaatcaaattcatgatttttttttctttttcttctttcttaacctctcaagtaaccttatatgtctaggtt

SEQ ID NO: 23638 - DNA, 241 bp, Glycine max
  Intron number 2 from transcript Glyma09g12480.1 (locus Gly ma09g12480) derived from phytozome v7.0 (chr-ID Gm09; pos 13292176 to 13292416)
cagtcctactaaaggtgaaaatatatgtccaaatatttttttaattatttttatttgtaaaaactgaagatattgtcagaaaatttataaaaattcacacatccttgggatttacaacatgttatgtatttttgttcaacccataagattttatttgaattggaaaaagaatattacatatatataaatacatatttatcaatttttcctcttttaactttgtttttacagtgggttttac

SEQ ID NO: 23639 - DNA, 282 bp, Glycine max
  Intron number 2 from transcript Glyma12g11090.1 (locus Gly ma12g11090) derived from phytozome v7.0 (chr-ID Gm12; pos 9100620 to 9100901)
aagcaacttagagtgggtttccttttggcaacttggtaatgtatctttctctcttctaggacaaatttttaagatttttatttggagtactattcagtactatgatttttaatatttctagagattttgcttattttaagactatttaggacagagaataatactttatggatgaaattgatggtttgttattcattaaacttatactcttttcttttctccttttgattgtgttattgatgatcaggatcttgtgcggcattgggttgagcacgctggtga

SEQ ID NO: 23640 - DNA, 324 bp, Glycine max
  Intron number 1 from transcript Glyma09g29710.1 (locus Gly ma09g29710) derived from phytozome v7.0 (chr-ID Gm09; pos 36535850 to 36536173 reverse strand)
ctttgccaggtactatatatatgtctatgttagtattgttcttcaatcaaaatttcacctcgataacttaattgtataataaaagttggattagaagttaacatagattattaaggtaaagctccaattctgatcggagaacaatatcaaaagcacctacaaaattgtattagttttgtcctatcacctatgtcaatagttcatggtcatactcaaatgagtttcatattttttgtattccacactttggctctttcatttccataaggtttttatatgggtggaaaaatgtaaaacaggtttgttgcaagtgggaaaaggtta

SEQ ID NO: 23641 - DNA, 601 bp, Glycine max
  Intron number 2 from transcript Glyma10g15850.1 (locus Gly ma10g15850) derived from phytozome v7.0 (chr-ID Gm10; pos 18518686 to 18519286)
gccataagtgggttggaagattgtttgctttaaaggttgtcatgcataagtatttttaattgcttctatgggtagatttgcttgtacaattattcatctcatctcttgttttaagtttgacattgtgtatatttttcatctcatctgttgttttaagtttggcatacttttctttctataataacatataaagtcatgcaaaaggacaccatgatattggttttccagttgcttttaacaaattgttgcaaatgtcttgggatatatgtgaacatgtaggaagtactataaataaatgtgttaatttttatatagaatatataaatggagttcgagttcagtaaactcaggaaaattactttctgaaaatgtgatttagaatatttttccaagcatgccgaagattgtatcccactttaattttgtttcaactcctttgatgaaacgctttaacattgtgatcttgcactgcttttaaatattgccttttaaaaacaaagcatattgttttgaaaataattttcagcattatgaattgaattcttttttttttattttgtatgacggggaaacatctttggacttatcgcaggttattcag

SEQ ID NO: 23642 - DNA, 699 bp, Glycine max
  Intron number 2 from transcript Glyma08g42640.1 (locus Gly ma08g42640) derived from phytozome v7.0 (chr-ID Gm08; pos 42625154 to 42625852)
gagcattaaaccattatacgggtacggatcaatggtccttttttcattgattattcacttgtaaaaacacttaatacacgtagggagatttgttcatgaatacaaagcacaaaagtaatgtatccttatcttaaggcagatttgcaaattatatcggcctgaataaatttaatgtgatgcttttttgtgcttatgtttctataattccgtcatctgttttcagctttcatatacaagtattgagaagatatgacagaatgatagaagttatcttttgattttgaataatgaaaagggaaagaacatggaaaagtatgagatagaattaaattatttatactagtagttcctagtatagtttttaaaatgacatagatattcccatcaaatgggaaaagaaaagtgtcataaagggattagagaatacaagatcttaaggggtctctggatgaacaagtaaccttttcattcagcatgaagagtttctgcataaacagaattttaatattactttccagtaattctccaacccacataactgtgttgactattaaaatgtgctgcttaatttttgtagttttttttttgtgtatctgtatctgtttgtttactaaatcaactttataccgcttgcttgcaatctgattttgttactgatacacagaatactttctgattgtattccaattaaaggaagaa

SEQ ID NO: 23643 - DNA, 766 bp, Glycine max
  Intron number 2 from transcript Glyma12g07000.1 (locus Gly ma12g07000) derived from phytozome v7.0 (chr-ID Gm12; pos 4773286 to 4774051)
accgagccaaaggtaagtttgcaattaaaatcaatgcgttattcaatctgaagagtttcgtcctgttgctactgtgagtcttgtgattgattatagagtacggagattcacgtggcaacatgtgctttgagcatgttattggagttaaaatgtttgtggtatgccctgcttgcttacatttctcacggtttatatatagagaaaaaaaaaaaaaaaaaacttagatgcagttttgtatgtttttggtaccgttcttcagctggaattggagtttcatctcggtaatttgcgtaataattgtttgcattaaaggtcaatatggattactgaagtaaaactctaattctgatagaagaatagcaccaaaagctccaatggaactgtatctaaattttgtctttatatataattcttttggaatgaaatgaagctttaatccaaggttaaactagcatatatgtggctaagaaaatagtattattatgtcttgctaacatagttagctgctctgttatgttatggtgctatatgaatgctggatattcttcatcacgtgtgattgggaactttattgaacaaatgagtataatacaggaggatggagttcacaagaatcacaactaaaatgtggatatttgaattgaatctaataacgtgcaggaacttcttttttctttcctagaagggggaggatgtatgtgtattatcctttatttgtcaaacaagagttacaaagtgcacattttctattttttacaaataacag

SEQ ID NO: 23644 - DNA, 758 bp, Glycine max
  Intron number 3 from transcript Glyma09g01810.1 (locus Gly ma09g01810) derived from phytozome v7.0 (chr-ID Gm09; pos 1174907 to 1175664 reverse strand)
acttgaaggtcaacaatttcccatcacaaaacaaggttcctcgctttcttttcttttcttttttatcttctcccaagtcataaacttgttttattatttcatctcttgccgcgtaattaatagttaattatgaatggagaacggcgagtgtgtagtggcttggttacacttttgttgatgtttttttttaatcggccaatattaatttttagtttgttagttttttgttatccgagagattcacttgtgttaatgtgattgctgctatagagttgcttggtttttataaagatacactgcttttattgtttttttatccgtaagaatccaagaagatagtgtttttattgtgtttcctgatttcaagtaatatttgtttaggattaacacgcattccactattgcttgaaatttattgaaaattatacaatcaagagaaagactcattaaatgactaaaatttgtgattttcaattaatttcagcaacaatagtgtgttcaagagaatatgttagagagtgttgctagcatttatctgtttaggaatggtcacaacattgtacagtttttggaaacaagaaaaaaatcatggtatttgtagttattagtgaaaataaaattgtcaaatattttccttatatcaaacaggcccctggttttcagtttcctcttagacttgtgctgtcatattaagtcttctgcgtatataaagttatgcaatatttatgacatttgtgttcttctcaatgtttaggttt

SEQ ID NO: 23645 - DNA, 997 bp, Glycine max
  Intron number 2 from transcript Glyma09g38960.1 (locus Gly ma09g38960) derived from phytozome v7.0 (chr-ID Gm09; pos 44166067 to 44167063 reverse strand)
ttcattcctcctacagtctacattggctctctcaggtcaaataaattaactcttttttgttttcctctaatttgattgagatgttatgctcgactaaaactagccagcatattgtgtttgatttttttttcttttctatttctaacttttatttaagttaatgtccaatgctttttcacttaatttatttgtcttttgggtttaagaaatagtgttgaaacaaactaaagtaaaatacaacgatatttttataattactattaaaaatatgacaaatgctaacaccactcttacaaatatattttttttgaaccattgtctattataaattataatttattgaaaatcacaaaaaaaaattaggttccactacttattcattgagtcttgtagtttttaataaattgtaatcaataataataagatgagtgttaaaaaggagtgtgttgaataatgtgttttctttttatcaattggataatgtgttgttagcattgctcttaaaaatatgcatgttaaaaatgaaaatagcaaacaaaacactttttacaatatgtatacatgttggttttacttaaaataaggcatggcgatttgtttgctttgccatatttggtctatatggtcacgtatatatatatatatatatatatattttaactttgaatgtttgtttgagttggctaaatttagatagtgggcatgactatccatccaatgggatttggaatttctctttctgtatgaatggtcaacgaatcccattcatgtatgtttgatgggattgtagggtgaaaaacattgcatagttggacttactgtgtactttaatttgtataagggttgagatatccgtgtacttcctaatatagtatacttttttggtaaaaaaaaacatattgatcaaatcatcttaacaccctctaaaatgtttgaatttatttattatattgtggttgtaggatccattattggggtctagcgaggcatcattact

SEQ ID NO: 23646 - DNA, 748 bp, Glycine max
  Intron number 1 from transcript Glyma10g35300.1 (locus Gly ma10g35300) derived from phytozome v7.0 (chr-ID Gm10; pos 43539028 to 43539775 reverse strand)
tttctttgctttctcatccttttccttttcccaaggttcgttttttttttcattttttttttgctatttttttcttctatttctctcttctctttcttccaatttttatttttaattgatttttccccttttgggtgatcggggatttttgtgtctggatattggtttagggttttttcttcagtgatcattggtgtgcatgtttcaagtttgatgtgttggcagtggaaatcaaaggttctttttgtgttattggatgcaaaagtttcaacttttagtctttgtgatttcatgttaaacaagcatttgtaatgggtctaatggtggatgatatccccttttttttttttttttttttctctcttgtgggtttatgggttcgattgagtgttttctggagtatgtggacaactgggttgatgtgaagccctgatctaataagatatttttagggtgaatttgatgaatgatggctttatacttttagttttcaatatttccatgatgaattgtgtttcattagttagataaaaagagcatcatttaatcatattaatattttcgctccttgtataaagttcattgttttttatcaaactatgttctgcaacacacacatatgaaagcatttatttagtttgactattattttttgtccattttcagcaattgtactctttaggggcataatacacgtaaagcaagttggtttctggagtagttagagttacatgtgttttgcaggcac

SEQ ID NO: 23647 - DNA, 825 bp, Glycine max
  Intron number 1 from transcript Glyma11g20930.1 (locus Gly ma11g20930) derived from phytozome v7.0 (chr-ID Gm11; pos 17757719 to 17758543 reverse strand)
ggaagctcgactttgaggcctctctcacccctaaggtcccttctatgcttcatttttataattttttttttaaatttcattgttccttatttgtgactgttttttttggttctgttctggctagagtttgaagcaaatagtagggatttcaatttttcttttctttttattattactaccaatatttggggagggttactattttgtcttttcccccataccatggcagcaatttgaagaagaaaaaaaagggggttttcttcatggtggggatgttattttgggtttgatccatgctgagagggattttgagtaaattgtgcaagttctagtggcttaggttgtgcgatctgtgtgttttgatgggacttttataaatggggttgatttgggaatttttgttggtaagattatttttcgagcagttttgttagctgtagtccgttatattattacagatcttgtaggaaagttgattttagttaatgatagatagctagctgatgggtttgattgaatttgagcaaacattgttaacaagatctgtgtgttttattgcttttgtgatctgtgctgggtggattgtttgtgaattgggatgatgtagagatttttttgatttgtttgaaaatatgattgatagttagtgttgttatcctttagttatttttatcgaccgtaagcatttttctcattctccatatatcaatttacttcctctcggcggatgtaatggaagtatctatgttgccattgatttaatccacgttttttctttcttgatgtgcagatctgtgttacgactagtacatcagcagggcttga

SEQ ID NO: 23648 - DNA, 661 bp, Glycine max
  Intron number 3 from transcript Glyma11g12530.1 (locus Gly ma11g12530) derived from phytozome v7.0 (chr-ID Gm11; pos 8937028 to 8937688 reverse strand)
tcaaagatcttcttcttcaaatacaacaggggctggtacgtgtactaataattaataattaatatgaatgtttttgtcagtaaacttcttgggtacattgagaggaagcaatttgaagaaaaaacagagattttttttctttctcgggtgggggagagggttatcacttatgttctattcatttaggaaaagtaggaacttttatgaaaattgaagtggtgaattcttgagatataccaagctatgtaaaattattaattgggtagacaacagggtagtctcgttagttggtatcatccattttttaaatggagtgctttggctatttgcacatgaggtagcacttgagtttgaaataatacttgtgggaaaatggcaaggttttatatagattatcagactcaactcaaacttatgagactgttacaggaagtgggaaggggggatttgatttgagatctatgaggtgtacctggattctactacaaattatgtgaaagtgaaaaccatccttcatttgtttggaggggttattgttgttggcctttcctcctttcttatttttttatgggttgcttatcgttttctgtctcattagaaattttaccatattgttgtaaatgcagaacattggttcagacgaaatcaaagcactcaaagt

SEQ ID NO: 23649 - DNA, 899 bp, Glycine max
  Intron number 1 from transcript Glyma10g05500.2 (locus Gly ma10g05500) derived from phytozome v7.0 (chr-ID Gm10; pos 4289261 to 4290159 reverse strand)
gaacagcctcgttgatccgatcaaagccaccccaggtagccatgttgctgtaattgtagtgttgggtgttaaaacaagtcatcaatagtttgtgatagtgacacccctcttgtgatagttgtgttttcccctcaatttctgttgcttctttcttatgaagattaattggggttgaataataataaaaatattgcctgtgctaatttgtctctagctttatatgggatgttttttaattaatggaattgtgtgaattttaattttttatgtatttggtagacctgattgagtccttgatgagtgaacttcctaggtaaagatggctgcttttgtttaacttcattttttgtgtttttctccttcaaacccagggtggagcagatatgtataattatctgctatgcatggttataggatcttcttaggagaacacttttatgctggtcttttgtgttggatttaagaatttgtgtgttagcttttttgggggaaaaaaatgatttctttaattggtgtattactgacattcgttctggtaattctctatgtcacagcatgcaatagcccaagttaataaacttccctgaaattattgtatcagtttagccttgttatttgagttgtttctttcagcttaatggtttcttcgtttacaaagtatatatatcaagtttaaaattgtactactgatgatagtaatttgaaatgatgcatcctatgagacaaagtatgtgattctttttctgggaatttgaaaatgagtactttttgaatcctagactctgaagcaacatgggttggttttggatgttaaatctaaagctgctttaatttgtgcttcttcccacttaaataagtctttggaatggaatgcagggaaattgaagaggaattcatcc

SEQ ID NO: 23650 - DNA, 990 bp, Glycine max
  Intron number 1 from transcript Glyma11g34980.1 (locus Gly ma11g34980) derived from phytozome v7.0 (chr-ID Gm11; pos 36735897 to 36736886 reverse strand)
caaaggcaccgtcgacgtcaccaacagctacgccggtacggatctgatctctctctttttttctttctccaatacttagggcttgttttatttattcccttttcactttttgtttcttttctctgaaattacagttaactatttatcttactagatctattagttgaacatctgtttcgcttagtgtgctcgaaaagctttttcgaagagaagcttataatacacgccacattgagttaggttaggttaggtttggttatcctgaagtgtcacatgaaatcgactataacttgttcgatttaatttcttctaaggcttaaaacttgctgagctgactttgaaaatccgagctatccaatttagataccaattcatagtttgatacttctacaacgaatttttgaagtgcaaatttaacaacgtgtattggttagttaatcggattataatcaatttcattttaatagtaatacgccaccagcataacgttgataagaaaagttcgcaactgtttcgggtgtaagcgtgaggttgatagatagtgttcttcgctgaattctgccttagcttaaccgccgtggactttgcgtctcctagccgcccttgcttacacccaaccgacattccacacatgctatggatccaataattatttcaattttcacttagacatagtagggtagctttttgttaagtgcgaggtttaccatcttagatttgttaagtgcaaaaatccttcatgtgaagagctgataggagttaggactttctcaaaattaataataatggaattacccctttacactagttgcatcgttgttatgtttactatgttggacttcctatttgaatgtataagattgttacttccaaaatgaattttgttgaaatgattctatgtgcaatttagaaaattaacacctattggggtgtgtgaattgtctgtctctcactacttggttatctaattgacagtgccctttgaagaag

SEQ ID NO: 23651 - DNA, 552 bp, Glycine max
  Intron number 1 from transcript Glyma12g15020.1 (locus Gly ma12g15020) derived from phytozome v7.0 (chr-ID Gm12; pos 13787172 to 13787723)
ggtggcctcacaattccttgcagcgaagttgtcttccaacatataactttttgcttgaattgagcatagatctcccagtttaggagattgacatagattataggagacattttgtacaataggcgtcttctcaaaatgtatagacccccctttctcaagagagaagaaaaagaaacataatatgttttttttgttgttaattacaattaatgaattcaacaacacaaggatcaagcttctctatactttatgttgattaattagtttcaatctttactcctctctgtatgagccaggttgaattctgttaaaagatgagactttgttatgataaatttcaaattagtaatagaacacacatgatttctaaaatggtacgtatatatagcagaagtattttccattggaccaaggaaagataaaattatttgggagaaacaaaatgtattctaataattattatacatatcaaattaaaaatttgagctgcaaggacctaaacacacgatgcaccttctctgccaaagcaggtgcaaaataaaattggagtta

SEQ ID NO: 23652 - DNA, 667 bp, Glycine max
  Intron number 1 from transcript Glyma10g33290.1 (locus Gly ma10g33290) derived from phytozome v7.0 (chr-ID Gm10; pos 41679610 to 41680276 reverse strand)
taaggaaaaccctcttgaggaccctcgttggccaagtatgtcttccattttaattactttctgtttttattttcattacaagcacctagataacattcatcatttcattttcctttcataaacgtaatcctattttgggagaaattattgtaccatctagaaccaccatgggctcatagtcttagtcatccatctttagtaagtatccacagttctgatcaatcttaacctgataggtactcgaattttttcaatttaccaaaaggagataataaaactttgattaaatgtcacctagaaattaatcggaactatagatacatgatggtcccaaaccatgagataatttctagctcccattttgcagtatatagggtgggaggaagagagagatagaaagaaaaaggaaaaagaagagaggaagttgcatatgtgatggaaaaggaagggagaaataaaaataaagttaggtaaaaaaaggaaatgaaagtaagtttattgtattttaaatagtccaacttcgaactaatcacttgtgtactcctatcctatgtttgtttatgcaaacttgagtctagcaatacatgtgtttattgatgtatagaattatgtggtaactatacattgctattggtctaaatatttgtaattgtttattggatttcag

SEQ ID NO: 23653 - DNA, 773 bp, Glycine max
  Intron number 2 from transcript Glyma12g08480.1 (locus Gly ma12g08480) derived from phytozome v7.0 (chr-ID Gm12; pos 6226379 to 6227151 reverse strand)
ttaatattggaagcaggtataatagttactaacatttaatgcaacaacactgatagtatatatagtgcaaaacaaattacttttagcactttctcatcaatctaagctgaaatcaattatctatatccagaatatttctctgacatctttttcccctcttcttttttcccctttaatcgccatcaaccacttgctccggagaaacactgataaagtttctattagtgtgtaaagaggtaaaacaataagaaatgagagaaaaagggcaacataaactagtcctttttttaaaggaagaaaattcccttttttcaaaaaattaaacctttattgttgttcagaatctgcctatatagcacttcctcatgcaagccaagttgatccaagtccaacaccagcatccactatgtctaattaagatattgagtaaataatattttgttaattgaaaacttaattagcttaacttgttagagtcggcctagtggtgagaagcatgaataataatacacacttttgactctaacaagttaagagtgtgtattatttagattgtcgtgttttatttcttattttacaatttctattcaattgtcgacctagtcgtgagaaatctaaataacacccactctaaacttattatagtcggactagtagtgagaagtctttaatttatgaggtcttaattcaaaccatttacatataaaactgaactaactttcatgtatttattaacaggtggtcaattatagctgctcagttaccaggaagga

SEQ ID NO: 23654 - DNA, 536 bp, Glycine max
  Intron number 1 from transcript Glyma11g02950.1 (locus Gly ma11g02950) derived from phytozome v7.0 (chr-ID Gm11; pos 1927304 to 1927839)
ttgacatctacttccctcccgcttgcgttcagcaggtcatccccatcaactttcattttctatcttttcttctttctttttatgttttcaaaaaacaaccgcggaagctgtgttcgtttactgttactcacctccttcaagatgtttaagctaatcatgacctggaaccgaatcaaatcaataacggttttcttaggtgcatcatatcgattttcccatcattttttgttggaaactgatgctgtgactgtgaggtctccgatttgttttttcttttttcactttttgttagataagttgtcatgtgaaatcaaaagctctaccaaattattgatttcttctggattttcccatgcttcttttcttttaggctatacaatactctcgatgcttccgaagcgatgtgctcggaccttttttttttattgtttttattatctcactgatataatattgaagttgcttcaacctttttgacttttaattacggttttcattttcttcacataaccacgtgcaggaagcattggagactc

SEQ ID NO: 23655 - DNA, 574 bp, Glycine max
  Intron number 1 from transcript Glyma09g01790.2 (locus Gly ma09g01790) derived from phytozome v7.0 (chr-ID Gm09; pos 1151711 to 1152284)
cgttttccctgagatcaagctccttccgaatccatgtaacttctcttcctattttcccatgccccttttatttatttattttgttgttttggaattttagattgtaaattttcaatcactttttttttcttttgtttatatggtaggtctacctgtgaggttgaggtcttaaccaccatgttgtttttaagaccacaaaaaattatttcctctaaggatcaagggatatatcatatataaaatggttgatagtttgataaggtcaccaagtttacttcataattttttatttttgtattttcatttggttttcttcagtttaacccgggaatcaattttgagggcttagaggttataatgattcaaaagtcaatgattgaaggattgcgaattttaggacaaaaagtcaaaacccatgtgtggaattcttcatattagacttttcctttctaaaaatgcaaataggaatttcctcaagttgaagtatgaatgttatttctaagtaaccatatgcatctctgtgtttgtgaatgtgtcttatcactgtgtttctgtgatgacagtgggggtggga

SEQ ID NO: 23656 - DNA, 831 bp, Glycine max
  Intron number 1 from transcript Glyma09g39910.1 (locus Gly ma09g39910) derived from phytozome v7.0 (chr-ID Gm09; pos 44869931 to 44870761)
cccttccttctcctcttttaattgaccccttcaaggtacattctatatccacaattttaccccttttttttatttgctatcatttttgttaacatttatacgtacagtttcaattttggggtgttcaagattggaaaaaacagaaaagaattaaaagggtgtgtgagattcaatagggtggatcgtggttttggaaactgtactggttttgctggtttttgaagcatgcttttgttggggcttcttaatcacagtgatcactaatcagtccttaagaaagacataagcttgatgaatggtatgaattgtagtttttcttgttctttctggcttcctgggcgatgtgtttcctctaatttgttctgtgagggataaaatggatttttttcaaagataacttggaaattgggacacgatcctttttttaatatcaaaatacgagaaccttttgatatcaaatgcatggtggttaacggttattatggattatggaatgtgtaatcaatgctgactatgaaaaagctgtgtagtccaggcagcaccaatggttattagggataaattttctgtgacattatccctttatttttcaagctgttttgtctttaatgggtggtgctaatgtgcttgacatgtacttttggaggcttccagttgcttttaaacttgtaaatattataatatgcactaatgtgtattgttatacatttgtttcagctgatgtttagtttatttttctttcttatttgtgtcattatgtataaatatcggctaatattgtttttttgttttgcagttcaagtgatcatttagttatcctctaaagcagta

SEQ ID NO: 23657 - DNA, 701 bp, Glycine max
  Intron number 2 from transcript Glyma09g39910.1 (locus Gly ma09g39910) derived from phytozome v7.0 (chr-ID Gm09; pos 44871093 to 44871793)
tggtttcagcatacagttttatccaggaaaggtgataatttcttgtgtttgatgttttccattaacaggaaaaattggaagctttcccccaaaaacacagaaatatgcacatttccaaatgaagattgaagactaagtatataggactgtgtgctgtaactgtaaaatgtctgttgctgttaaatgttctgatagctgtagccaccatgtgatctgttagctgttgttggttactgtctgtctattcttggtaactgcatcggttagatgtatttgatcgatgccctatacagagcttacactttatgtaaatttctcactactaaatagttttgagtctcagcttctgtctgatattttctctgtttcttatgttatctctcattcaactcactgtttttgtgtaaaaaaggccatagtctaagtttagccataatgaaagaaatgccattttagtaaaggatttgataatgaggttttcaatgggaacttgcaaacttccattataaatgtaatggtaatataccaatatgcttttatgtaagctatttggtcatagatttgagcatctatcagcttttactcttaagaatcctctgatttctgttttatccaaaccttattgttatgtcagttgtgctaacttattctatacttataatgcagttttctagagataaaaggagcattcttgctgttgg

SEQ ID NO: 23658 - DNA, 1005 bp, Glycine max
  Intron number 2 from transcript Glyma09g24630.2 (locus Gly ma09g24630) derived from phytozome v7.0 (chr-ID Gm09; pos 30424128 to 30425132 reverse strand)
gacactggctagtagaggtgatgtatggtatggctgcaactgttgtgattgggtatatatatctgtttctgggaaaaattagaatggaaatctttagtatcatttgttgacaatgaattcacaggcctatcaacacctagacaatttcggattttttctagctaagttgaattacactattcttctctgattcggtatgtgctgttcatttgttatggctggcttgatccagtcatgtgaaataccaaattgcattgttctctgtattgcatgacctagaatactctagaggaatttaggacttgggaggaggtatgaacacatttattaggcatgattaatgctcaaagcaaggggacatgtgacaggagtagttacatattaggttaatataccttggaacgatgaatactaccagacatttttctatgaacataattttgtaaaataaaactcaaagttctttgtagacttttaatcttctttattctgagaagcacaataaactaagagtggtgtgaacctatgtttctgtgacttgtaccctttaatccttaatttgggaattttgtatggcaattttaactcatttacttgagatactaagtgtaggaaactataaaaatatgactcttctcattgttgatctgattatatgttaatttggcattcccagtctcagatagcaaaaggaacctatcttttgtttttactggcttctacatagtaaatatggtgatgaagtctgtttgtttatttattttttctcaagggagggtatcaatatttgcatcttcgttgatattgtggttctgcttaaacagaaactgtcaccttcatgatattacttttttgttgtttatctggtcatatagtatgcttgcatcttttaggtcatttttttttttcatttactcacttctgcttccttgacatatggtaggcctgctgttttatcttgtgctgacatatttaagattgttttgccattacaggtttttggag

SEQ ID NO: 23659 - DNA, 581 bp, Glycine max
  Intron number 1 from transcript Glyma09g24630.2 (locus Gly ma09g24630) derived from phytozome v7.0 (chr-ID Gm09; pos 30425185 to 30425765 reverse strand)
ttggtcttggtggcatcttccacagcgctgtgcaggttttgttcctcctctaaatttcgtagaaatcaatgtttctgtttttttttaggattcacactgtttattggatctggtttttcttgttcttgttttgtggggcacttgattgggggagtttaattgcccaatgtgtgactcttctgctatatttagaatttcatttattttaccttggtaatttttagggttttgatattttttttgggtgttgtttgcatgaagcagtgtaggaaacagcaaattaacttggtgtctaagtgattgttagttatgttagttatgatgggagttttgatattgctggtgtctgtggtgctggtgcagatattaatattcgttcattattcagcacgtatgaattacatgtatgctgtcggattgagaagatggtaaattgtatgttagagatatactagattctgcttctagttgtttctatctttattgtataataaagtggggtaccttggattattgtggcagttaagtgtttgaggtggtttttaggtcctgtggagtgtgtggttgtaactggctcgctg

SEQ ID NO: 23660 - DNA, 738 bp, Glycine max
  Intron number 2 from transcript Glyma09g06380.1 (locus Gly ma09g06380) derived from phytozome v7.0 (chr-ID Gm09; pos 5121204 to 5121941 reverse strand)
gcgaggaattgctttttctcagtaataaggtgtgtgtatgtgtgtgtgaatattggaacgtgttcgtttttcatctctcgctgttagttcattaatttcgttagttatgccattgcgttttagtttcaatgttcagtattcttttttctttccattttgtgttgttgtgatagaatgaagaaaataaagtactaattctgtactatagatctcgattggcttgcaaagcatgattttaaattgcggttgcggaccgcaattgcggtgacatgaagtttttattttttatttaccgcaattacggccgcatcagttgcattttctgcaatgtcaaggatggccgagtaacaacaaccgtgattgcaactgcaatttagaatcatgttgcaaagtcgcattttcctttgaatgcatttctattgtacattgagtgatctgaagaaataacttgacttataataactgtaggatctttctgtgattcaagatcttgatttgtttttatggaacattactactgaactcgtatcttattgtgaagaaggatttaatgtctctagattggcttgtacacgtgtgaatttctatcctgattataatttaatatataaaatgtatgaaccctgccttatattcatctttgatatgtctatgtgactttggttgtgatccatcttgtttactatacttgttccttatgcaggctatatttaagcctccaaaggcaattcgtggagg

SEQ ID NO: 23661 - DNA, 591 bp, Glycine max
  Intron number 1 from transcript Glyma11g19370.1 (locus Gly ma11g19370) derived from phytozome v7.0 (chr-ID Gm11; pos 16060147 to 16060737)
ccaccctaaagagtgcagtaagtataccttggttttgacatgtaccaagattttattagacgaaacttagatgcttacaaatcttagatgtatttctataggtgtttttggtgttcttttcaaatcagaattgaagttttatctgagtaatctgcataataaaggattgcattgaaggtcaacatagattattaaggggaaactcaaattctgattggagaatagcactaaaagtatcaatgaaattgtgtctaagttttctttatttttattttgctttctttttgtttttgagttatgaggaaactatttgatggtgttgttttcaaatcagaattgaagttttacctgagtaatctgcgtaataaaggattaaattgaaggtcaacgtagattactcaggtgaatctccaattttgattggagaatagcacaaaaagtaccaatgaaattgcatctaagttttgtgcatttttattttgctttccttttgttttgagttatgaggaaactatttgatgactctgactcaatgactctaatgacaattttgcagaagacaaggtcatctccaaggctgggataaaatct

SEQ ID NO: 23662 - DNA, 743 bp, Glycine max
  Intron number 2 from transcript Glyma10g31470.1 (locus Gly ma10g31470) derived from phytozome v7.0 (chr-ID Gm10; pos 39961672 to 39962414)
agttgaggggaatacaagaagagaaggaggttgaggtatttttatttgttgactttaccttttgcataattttctatctagatatctaagaaaataactatcgaaaatgatttagaacccatcattttagagtttaccttgaaaatttttaaacttaccatcacatgggctgtcctttgccaacaattattttttggggtcaaataagttccctctaaaacaaagaatggatcgaaatatgtttagaaagtctctgatctctgatctttttctcctgcttcccttcttttccatcaaactcgccattttaccaatctaattgggctgtgggaagtgcttgtttgcaagccaaaacctcaattgctgttgaccctatgttaaattatggtacagttgaattgtcattatatatgagatacttttatggttgagagttctgatattttaaacttgcccatctcttatctgcttgttggttgtattgccagatctgtggtttaatggacaattgtttccatttttggaaacaaatttcattttgatttgactctcacttgaagtagcatttctttttctcaagaaacagtaatggaaaaagaactggaaataatttaccgttgagaatactccctagatatgaatagaagtcatagaattaaacataatacttcattgacagtggtgctttttggaaactgatgctttcaggtactcaataaagttttgatttgtttgaatcgggg

SEQ ID NO: 23663 - DNA, 673 bp, Glycine max
  Intron number 4 from transcript Glyma10g31470.1 (locus Gly ma10g31470) derived from phytozome v7.0 (chr-ID Gm10; pos 39963031 to 39963703)
aacttcacagtaagaattacaattatgtttgaaccctttttaccatcttgcagtttttctcatgcttattttctgtgaggtttctgaattaggatgttaacttgttcttcaatttggtattggtacaatttagaaaaacattatgcgattatgatactgaaatttaatggcttattggttcttaatatggttctattggtaaataaacaagattataatctttagtctttctcttaagatgattctgttttattagttaatgaacattatcttattgcataaatatacaccttgtaataaacgtggtttaatattaattagtaaaaaatggtgattttggtttttaggcctgtttggaaaacccttctccataaactaaaattaacttatacgtaggttaaaatgaaaagctaaataaaagagtttatacaaactagtttatccataaggtaaatttgagataacttcatttcaatttactttcttattttcttttttaagtacttgtggattagtttatcaaaataggaccttagtcatgaacatatattgataggccacttgtatgtttgttttttcttgcttcaaaaacatatattcacatattctgattgtgaatgttataatacaagtattaaatggactggtttatttattaacagctcactctgac

SEQ ID NO: 23664 - DNA, 812 bp, Glycine max
  Intron number 1 from transcript Glyma09g31650.1 (locus Gly ma09g31650) derived from phytozome v7.0 (chr-ID Gm09; pos 38319497 to 38320308 reverse strand)
tgatctcaagaagtctgaaccttgggacctcccaggtagtttgagaacactttcttcaaccctattaatttctcctcttataaatatactttattactgtccatctagctctccttcaaaaatctagttatatatataactttgtttttctttgttgtcatggttgcatgattattaatttgcaagggcttatgttctttatatataggcacaaccttttggcatgcatattgattctttcggaaggactgtaacttaataatatagacaaattcttaattataaggaaaacaacacaaatggaaggaaattttgttcatccattaagagttaagtgcttaagtttatatcattctcactctcttcgaaatattttttcacttttttccctatagcttaagttcctcaactaatacatttataaaactttatatttcatcgaccagggaaatattaatcaaaaatgcatttttcttcttcttttgcttcctcttttcgtaatatacgtacatatagaagtttgactcgttcgatatacttctacaatgttatgcgtggtttacaactcatgcatatgataatataaaatatcctagtgaatatgcatatatatatttgtataaaaaaagtcaaaattgaatatacatacatacatatggtgtttcaactttaattttcggtctatttgaacactatgtagttgagtacaaattcattggaatgtcatctttgatactgtggacaaaaaataattaaataaggattattgacatgtttgtgtgatgattaattaattaacaggtaaggcctca

SEQ ID NO: 23665 - DNA, 626 bp, Glycine max
  Intron number 1 from transcript Glyma08g45410.1 (locus Gly ma08g45410) derived from phytozome v7.0 (chr-ID Gm08; pos 44806193 to 44806818 reverse strand)
tgattgtcacaagccaagcacctggaaattggggagtaagtttcttttgcttgtcatacatattcctttctcttcttgtttaatctacttcatatcttgttgggcattgaagaacatttggagtttgtgacttatcagaatatcatatgacaaatggtttgaaagattttacgaattgagaatttctggtgaacatcgtatattcatatagatgttgatttatagaaaataataataattcatttatgtgacttctccattgcctagccgtagatttgatttgttctggttgagaagaatagtgttgtgtggttcacgtagccaacgtcatcttgtgggattgtacatgatgatctgatgtttatcaagtgaaaaatatcaaagaccctattgttagattagtattatacagttttcaaattgaaattattcattttgatccttgatcattactggaatttgcttaatttaagagtaaaacaatatattttgcgtggctggtggaaaattaacacatgattaattccttttttatgtttccttgtccctcattacaaggaatgctaatcttaatcttaccttttgctttcttctgaagtcttttgcccaacaaaacgggagcaata

SEQ ID NO: 23666 - DNA, 452 bp, Glycine max
  Intron number 2 from transcript Glyma11g05650.1 (locus Gly ma11g05650) derived from phytozome v7.0 (chr-ID Gm11; pos 3985959 to 3986410)
ggacagaaacccattaaaggatcccctcatccaaggtacatagcttaacattattataattatatcataagcaccttcacatcgtgttctgatttgaattatacacgacttaggtacctaataattttatgattttatctttgaatatgttggcttgctcgttgacccttcaatttcaaatttcaaaatggacccgtaattaattttgttttactaaattgaatccccctaatttgtttcctttttttcttttccgtatggtctaaatttagaaagatcctgagatggtttttttctttctgtcctctaccttgagtttttatttatgtgatgttgtggagttaattctgaatggcttaagtgagttgtagtggtagtgaatcactgaattgagtttttttgaataattaattgcagaggttattacaagtgtagcagtgttagagggtgtc

SEQ ID NO: 23667 - DNA, 808 bp, Glycine max
  Intron number 3 from transcript Glyma09g33890.1 (locus Gly ma09g33890) derived from phytozome v7.0 (chr-ID Gm09; pos 40377324 to 40378131 reverse strand)
aagctcagttgttggagaattccctggctgctgaggttctattttttgctatgtctctagaagtaccttttatccaatgaactctatttttctttttttactttggtgtgtatgtgtgggtgttttggtgggggtgggggggagttctacaatataaattgggtagtttttaacttggtgcacctttattgcaacatatgaatcaaattattaatgatgtatgttgatggctatagcaataggtgttctaacattttgtctatgttttcatttgataattataggaaaattatgggctgaagtcctgtatatttagatgtgacaataattagctttgactgatgattcgaaacatgactactactaatgttgcttgaataggtagatccaaagcaacattgccccatgctttatagttttcttgcaggagtgtatctaggaatccaataatagcttattgtcacaagaactttgtagtctttaaactgccatcatccttgatggaaattatttttgaatactaaattaaaatgtccgtattttttgaatggtatcaatagtttcttttgctgatttctgccattctttctggtttgataatctcaaacttttccaagttgcagatttggggacaggaaatagagaatatatatctatctaactgataaaaaaaacgtgaccttttctgttttctattttcttctattgacatgcaatatgttagttttaattagagcttgatgggttttgaatttcacttctgcttgctggtttacagattctgatcagaaatagattttactgcaga

SEQ ID NO: 23668 - DNA, 700 bp, Glycine max
  Intron number 1 from transcript Glyma09g05000.1 (locus Gly ma09g05000) derived from phytozome v7.0 (chr-ID Gm09; pos 3788186 to 3788885 reverse strand)
ttcaaggtgctgcctttggaaatttgtgtaaaccttgttgtagaatgacatttggcaaactctgttgattttgattacttcaggtcatctttggtttgcagaatgacattttaaaaccgtgttaatgttagatacgggaaacttaagatgtatgagttagaaatttttctctggcatattattatttaaaaagttttcatctttcaatgtgtttttagattttctggatggttaaatagatatttaagaacttgtgatgctagttggtactgttgaaatgttgcttgacaggtaacgtgcaatagaggaacttaggatagtataactaatgaaagaggtagtttcttattttagtacttctgatgttgcattggatctcattgtaactgggtaggattgtttatgtcatataacaaccttcttttctgtttttctttttatggctagcacctaatttgctgtttggagatgtaccattaattaatttctattgttttaattggtttacatggttcaggatcctatctacagttgtgtgttgattgtacttttcagtgtatattttgcttgctcctacaattctataagtttcttttcactgcatgcatgattacattggttatttattggtaatataaaataactgtttaattaaatatttgattattttacacttttaccccaggagggaacttgccaa

SEQ ID NO: 23669 - DNA, 625 bp, Glycine max
  Intron number 3 from transcript Glyma11g18900.2 (locus Gly ma11g18900) derived from phytozome v7.0 (chr-ID Gm11; pos 15495791 to 15496415 reverse strand)
actcatgtgagttccaattttttattttttttaaattctccaatttactaaaatgcatgtggacatcttggaaatccaactgaaattttattctgagtgaaggattttctgtactacttgtttgaaattggccatgttctccttctggtctcaaatacaagaaaaaacacttggtctcaaatattagaaaatttcaactaactttatcttatttaatgttactatctctaaaatgcccttcatttaattgaggtgctaggttcaatgactttttcttatccttgatatcaagttccaatgaagggtaagttgggaaaaaaatattttttaattaaaattgatgtaatcaaatgtggttaattaactttcttaattagtgtgacattttttttttccttatattatttgataccaaagggagtatttacagctgtaaaagatttagtgtttccttttgtgtcttgacttattacatggtcattgtgatttgtgacaatactttttacctctagtgaagtcctgacagtgccatttttgtccatagagtagtgaagatgccaatgtgatatagttgatctatcttatggtaggtttcagttacagaatttagtctttctggttgcag

SEQ ID NO: 23670 - DNA, 815 bp, Glycine max
  Intron number 1 from transcript Glyma08g45840.2 (locus Gly ma08g45840) derived from phytozome v7.0 (chr-ID Gm08; pos 45113491 to 45114305)
caccttaactcccactccaagaaaccctctctaccgtatgttacacttcttagctcccttatttgtatgttctttgaatttgatgtactgtgtgtagttcttgaattcccaaaattaagtgctgcattgttgttctgtttctgattcgtgaagcaagattgaaatcagaacttggttttctttttgctgtgtaaaattttaagaatttttcatatttgtttgcttcgagtaatatggtgcgcctgtgttgactaatgaaaacagaaaacttagtttcaatcctcaaatattcacctttatgtaatttctttgatttttgacatggatcttgaaagttaagttgtggggttggttaattaaattcaaaatcacatggattaagcataaacacctatttttgatggatcctgggttacctcatttttacaagaaccggataatctaatgttatgtgtaaaatcagtgcttcccttcagatgcagttccttcccaagaaaatgtttgtttttctacatcataatagtttgagactccaaccaccctagtaatggaaataggtaaagatgatggaagcatattctccctttggttaccattgacccatttcttctctttcggctaccatctactgaagtgtagaaatcactttatagtttatgtaaatgatttttaaagtaattattgtaaaatttaataatttgttaaaagtaattattacaaaattcaataatttttttggtaacttgcaacttctatcaacaattcatgatcgcatgatagggtatataaataatatttcttttgccgtgatatta

SEQ ID NO: 23671 - DNA, 757 bp, Glycine max
  Intron number 2 from transcript Glyma10g07790.1 (locus Gly ma10g07790) derived from phytozome v7.0 (chr-ID Gm10; pos 6584011 to 6584767)
atttctaaccccatttttctacttcctaattatttgtctaataaagtggccatattaattctcaataagtaaatcaactgttaatatttcatcacatttatcatttattttgatatgtgagttgtagagagaaaacttaaacgtagcttcatgtgtttcttttttcttatcaatcagaattggaatatcattttagtaaatatttatgtttattgcttcaaattattaagttgaagccaaagcaacaaatagttgtctcaactttttcaattttctattagtgtgtttggacgacacctaagaatcaattctattcctcgagatcatggtggtaccatgaaatgttagaagcaactatttagttgctttgccgtcaccatgaaaaaataatgattatttcttatcataaatctaatccaaacacattatatatcatgattttgaggtccaaaattgattataggaactatccaaacacactataacttaaaaatctgtttctgattggaaactgtgtaaaagcagttataaaactatatctaagtttatgctatttatagttgatttttctagttgttactttactttgaggtgtagtagaatatgaaaggttcttttttatgcaatgatgctttatattatgcccattaaaagttactccaatttggtgtgatgaaagtactgattttgagcatgttttgagacatcagtgttggaatcagggtactactggcgaagagaagcactggatccggag

SEQ ID NO: 23672 - DNA, 914 bp, Glycine max
  Intron number 1 from transcript Glyma09g29470.1 (locus Gly ma09g29470) derived from phytozome v7.0 (chr-ID Gm09; pos 36350309 to 36351222)
ggcgtgtttttcttgcttcaggttgattctgtttttttttttttttaatgtgtaggattttagtgaggatggaaattagatgttgttctttaggtggttttgatgaggttttggaaaatggtctgtgactcctatttcagctgcaatgtcgaggtttttgcgatttctgcgctgcaatatgtcaaggtttttaggatttatgtgccgccaaggttttaaattgcggtcacagttttgttgtgatctttgatgttgcaggaacttttggacaaatgagtgtaggattttagctggacagaagtttagatgcagttctttaggtagttctgatgaggttttagtgaactgtgtgcaactgtgatttcggttgcaatgtcaaggcttttgggatttctgcaccataattgacagtctgcgactgcaatttggctgcaatgtcatggttttcagcatttgtgtgagattgtgattttgactacaatgccaaggcttttgggatcttcacttctgcaattgtggccacaatggcaaggtttttgtgatttttatgatcgcaattgtgatagcatttatctgcaatttcctgcaatgttaggattacgacaacgattatggctgcatttgccttcaacatcaaggattatgagggagtcgggattgtaatttaaacctttgttcttgaatcaaaactagaatttcacttaggtaatctagataataaatatttgtttgcattaaatgtcaatttagattgctaaggtgaaacttcaattttgattggagaacaagagtgaaagcacatgaggaactgtacttaagttttgtccttttatggaaggtgattttctctttaaggtctaacttgggttgtttccgcaggtgtttttcttcttggattgggtgaggcatttgct

SEQ ID NO: 23673 - DNA, 575 bp, Glycine max
  Intron number 2 from transcript Glyma09g26800.1 (locus Gly ma09g26800) derived from phytozome v7.0 (chr-ID Gm09; pos 33438530 to 33439104)
caggtaattaattgatgttatgtttttatttgattacgcttgataatcgcaatcattaatcagtgattgagattttatatttttctttgaataaaccatcattttggtccctcgagtattctctctgctaaattattcatgaaataataaaattatatatgtattacctctaatattattgaatattcatcggagaaagacaatattcaacggatgaattttaggtttactctttttcttttcaaaataaagactcaatttagaaaagttgtatacaagcaaaacagccaggggggtttgtttgcaggatgtttttctattttttatttcccgcttttgataatgattacaaaaatatcacttgtaaaatgggtgctacttttgtaaatatcattcaaaaattaagaaaagaaaaattacatagatgaagagttttactcttcatgtttgttacatcacttatagtacaattcacttttagaccccatcaaattttaacttttttcccttgtatatgatgaaataatcatgaatttgcagaaacattgtgattgaatattcagagaaaataaggg

SEQ ID NO: 23674 - DNA, 405 bp, Glycine max
  Intron number 1 from transcript Glyma10g03700.2 (locus Gly ma10g03700) derived from phytozome v7.0 (chr-ID Gm10; pos 2754104 to 2754508)
atatagggtttaaggtttaggctttaattaattgagtttgatgcctatccactaactctaaaacaaacttacatcatacgtgttttgattggatcactttgcaaaactttttacactgttagtgcataattcttcttctctaattagaaatagatgtacattgtggccgctgaaaaaacagttatgacttgttttgttatttgaatgttgccaggttgttgttcaacagctgaatttcattgagaggaatttctcttcggtgtcatcatcgcagggtcaagagtttgattttgcgatggctggtagtggtaagttatgtgttctgtggtatgttgtgtcaacttggcagggtttttgtattttgctgaatatttttgctttttgtttcaggtaggaaagtgagca

SEQ ID NO: 23675 - DNA, 477 bp, Glycine max
  Intron number 1 from transcript Glyma11g14650.1 (locus Gly ma11g14650) derived from phytozome v7.0 (chr-ID Gm11; pos 10455461 to 10455937)
gcatcttcctctctcgctttcgctctcagctaacagtaatttcacattctctcttccgtttatgaatctgcttcgcgtttactttaacatcaccaaactctgctcgatccccacttctgttttctccataaaaattgaaactttttcgttttcaaccgttgccctttgtttctgaaactttttatttgcaacggcttagttttctccccccttaacttccatgttaattttgttattatcactttttaatctgcatttttatttttattttttcggacatggatttgacttgaatgttaaattttgattttttattcctttgtggtagtaaaacacatttttcagacatttttttttgttatttggctgtttcatttcatgtttctgtggggggggggggggtggtttatttttcgctgtctcactgtggttttgacattttgtaaatttaattaggtctaagaaattcaggtcaaa

SEQ ID NO: 23676 - DNA, 977 bp, Glycine max
  Intron number 1 from transcript Glyma10g36100.2 (locus Gly ma10g36100) derived from phytozome v7.0 (chr-ID Gm10; pos 44277319 to 44278295 reverse strand)
caccgattttggcctctctgtcttccacaagccaggttcttttcgtctttttctctgttaaaatttttctatacacaaaacttgtatgatgtgactttgctgttgttgtactctaaccaggaatggaattttacgcgtgtaaatgttttaaattatggtcgtgattgcggttgcagtttcatcattgtatacacaaaacttatatgatatgtccctcctcacgtgactttggtggtagtgttctctaattagaaatggagttttacgtgtgtaaaggttttaaattgtgtttgtggttgtgcttgcagtttcatcacgattcatgatcctagatgttacgaaaaattgtggataaatgtgatcattgtcgcagtgactccaaaaaccttggcatttcggccaaaattgtggttgcagaccattttttaaaatcttctgacttttattattacactgattatctggggaaactccaattccaacatgaaaaacacatctaacaaagtgcatatatataagttttgtctattttgtaatgcacatacaggtcttaggtgattttaccaatgcttgttatatatagtctgctctacaatttttatttttttatgaattattagcatgttggtgcatatttttaccaccaaataaaatgaaaaattgacacacaaagggcaaggttatttccattatatattccttctttgacagaagaactcacaataaagaatcttaaattccatgattcccatttggatagagaaaattaaatatagtttggatcaaggtgctcaaattgaatgtttgaactttgaattgaagaataatactctgtgccagatgcaattttattttattttcctgatgttgaacaattttttttccttggctatttaacagtatgtatttagagtgtgtgtgtgtgtgtgtatgacttaccattgccttttcttgtttcttctcaggacaagcctttc

SEQ ID NO: 23677 - DNA, 476 bp, Glycine max
  Intron number 2 from transcript Glyma11g09900.1 (locus Gly ma11g09900) derived from phytozome v7.0 (chr-ID Gm11; pos 7065454 to 7065929)
caactctaagatctgcactccacacgcttgtttctgttagtgccccttctctctttccttcttcatattttgttattgtcttcatttcaacattgactagtcagccatagatataaaaagatcatacaatatgaatatgatcaaagcagtttgtgaggtgtttccaaatttagctccagggaatgtcttatttcaactttgctatgactttgtttgtttgtctcagatatgttgcaatttttaatgtttattgtccaaagttttgagagtgggtggggtgggtgtttattttataggaacatttgaattgaatagtttttgtcacatttgatgcattatgaattggtggggtataattgtacttactatagttttcgttggtttggctttacttgtctcttcttatgatttggaccttctgatctttaacttgtgatgtggaatgcagggaagaatcaagatttgtgaaggaaaga

SEQ ID NO: 23678 - DNA, 847 bp, Glycine max
  Intron number 1 from transcript Glyma12g01210.1 (locus Gly ma12g01210) derived from phytozome v7.0 (chr-ID Gm12; pos 692467 to 693313 reverse strand)
aaggcaaggccgcgttgcctcttaagagggacagggtaggctatctccaatttcttttattaattggctttttttttttatacttaaaattgcttctaagcagaattcttttatactttttttggcttctgtttctacttctcttatgtagctcattagtaaaattggcgtatcttaatgtcctgtgcttatttggagccaattatggcttgcacaagttgctcacacttccatgatctattggaaatgaacttgcctagcgtttgatgaaagtgtggtgacatcccatgaaaagaggttgaagatgaaaaagatcaatggtttttatttttatgacataccagcttcagagcagacaagtccgtccataaaaatacatgctcatttacttttgtttgacctaagtttatgtaccaactgtacttttgtacaatgattctatttaatggtatttatataaaaaaatatcttctgaaatttcaagggtatatagttcgagtgtgaggttgcgggtgcttgtgtgtggccagtagtacatccttgaatgttagtagctagtggtgtttgtcccaccattctattcaagcttcttgcttggtttttcattacattttaccatttgatttgcctcctttacatttatatgcatcatcggtgtcttccagcagtcatgatatgatttttataagataaaccaattttttacttcttccaaaattgaggtgattgtctgggttgttgaaattttcatacttgatgttatgcttttaccctttatttcaaggctgattgttctttcattgcctcaccagacgagatctaagaggttcttggaaattcaacaatt

SEQ ID NO: 23679 - DNA, 472 bp, Glycine max
  Intron number 1 from transcript Glyma12g28710.1 (locus Gly ma12g28710) derived from phytozome v7.0 (chr-ID Gm12; pos 32061800 to 32062271)
tacaactggctctctttccgtcccggcaagatcaggttttcatttttcatttccattgcaatattattacttcattcattgcatgcttctttttattattattagtcaagtgaccataagtaggctaggctaggctagggtgtttgctgcctatgtatttgtaattgtaattggtagattaccatggcataaattatgtttcaaccgaatcttccttggcttctgcttattattttaaattttttaactgaatgtctgaattgtgaattacagtttgcattctctgtttttattatatgctaaggacattccttttgcattctctgtttcaaccgaatcttccttggcttctgcttattattttaatttttttaactgaatgtctgtattgtgaattacagtttgcattgtctgtttttattatatgctaaggacattccttttgactttatgggttttcagccagaagcat

SEQ ID NO: 23680 - DNA, 471 bp, Glycine max
  Intron number 1 from transcript Glyma10g29810.1 (locus Gly ma10g29810) derived from phytozome v7.0 (chr-ID Gm10; pos 38592226 to 38592696)
tccgcatcaattttataactgttagaaaactcacggttagttacacaactactcccttccctctcaaatataagaagaagaaaaaacacatttttcttgctcttaaatataagaaaattgactttttttttattccttataccaaattctagtgaagggtaagtgggagaaaattttaatttttaattgagattggtgaaattaaatgtgattaactaattttcttagttagcttgaattattttttcttttcttaaatttaagacggggagtagtatgtgcttaaataatgaattatgaaactttctttcatatgtttgcatatgatgtgctgtgaagaagcatcgagcttgttgtgcaaacttgtccattttctctgccatggaactaaaatggtgcatgaaaggaccaaacaaaatgctaaatgaaatgttttgattgtgtaacgtggttggttgcagagcaaagctg

SEQ ID NO: 23681 - DNA, 455 bp, Glycine max
  Intron number 3 from transcript Glyma10g42790.1 (locus Gly ma10g42790) derived from phytozome v7.0 (chr-ID Gm10; pos 49654258 to 49654712)
tgacgatcttgttaaggcaaagccaaaaaaaagaggtgggaatgtgggatttctttctttcctttggtcgtttccgttccaaatgtagtaagtattgtctctttttggtttttgtttaacaggtggaagaagaaggatcatgtgttccaaatctaaagctattcaaaatactgaaagtagcactgctttagagagagccaactctttccgctctgagaatccattcttcatttgtgcaatgagaaaaacatacattcaaagaagtgtgctggtaaaaccctgtacatttgagattgtgacaagttttgctgtaatattggtctatataatgtattcttatcgttacattttgtctatgggaatatggattcatcaatgtttaaatagtaactaattttctgattgctgtttttgtgatattttatttatttatttatttgttattaaaacagttt

SEQ ID NO: 23682 - DNA, 436 bp, Glycine max
  Intron number 2 from transcript Glyma10g02090.1 (locus Gly ma10g02090) derived from phytozome v7.0 (chr-ID Gm10; pos 1477635 to 1478070)
taaatcgggttccaattatttcccaattcaaggtaattttttcttagatgcaactccgactatgttttatttacaacatttctaatctacgttgtcaataaatgtttattttcatttcttgaaattgaaattaattactaaataccaataatgattggcacatatgactaacacaagtggtaatgacttatatcatttaactaataattaagtgatataaaatttgaatcttgtagattttagttatgaaataaataatattggaaaaaaaaatacccacttatatggtacactagacgggaaaaaaaaagaaagaaagaaaagaaactaactaattaatttatttatgtaagttttggacttttttgggatgcatatttgttatttaattgtatttactatgtgtgaggggtgcaggagcggttgcaagagttac

SEQ ID NO: 23683 - DNA, 964 bp, Glycine max
  Intron number 2 from transcript Glyma12g36840.1 (locus Gly ma12g36840) derived from phytozome v7.0 (chr-ID Gm12; pos 39874309 to 39875272 reverse strand)
acgggtacttttttttttatataacttgagtttcgtatatttttagctcaaagttttttattttttttatttaatgtcgcttttgatgttgttaaagaaaaggaaaaaaattaacactgatgatgttaaattatagtagaaataatttacacataatggtaattaaaaactatcactatcttaaattaattattcaaaattttgagattaactaaaccattaacattattgcaagaaacacgataaaatgatcaaaaataaaacattcaaagctttaaaagaccaaaattaaacatgaatgtactaaaataaaacaacatgaaacataataatcaaaattgacattaaacttttatatatatatatatttagtatcttattgtctttagaccatttttaaatataacagttttatcattttaatcatttcactattaattttcatacattttttatattacactatttatttttaccattatagtatttgtgattataataaggatatttaaaaaatattttaaagataaaaaatgaataaaatataaaaaaacctaaaagctaggctttagcatttcaaaaatactagaactaaaaaatactaaaagaaattgtttatcaacctgttaaacaaatttttctacaagtaaaaaaaattaaaagaactaaaatgacttatcaaacataatcataacctaatacttatttctttcttgtatcaatgcttggtttttgatcatttaataaaagaatggttcttctttagtataagtatcatggttaaacaaataggaataaataggattgaagggaggaggagatacattgtggaaggaatcttgcattaacattttaacaaagactaacaactaaagttagtaaaaaaaaaaaaaaaataaataaataggatgagtattgtgttcctgtaggtacgaagctgaacttatcaagaagattgtgaaag

SEQ ID NO: 23684 - DNA, 375 bp, Glycine max
  Intron number 2 from transcript Glyma11g32090.1 (locus Gly ma11g32090) derived from phytozome v7.0 (chr-ID Gm11; pos 33453970 to 33454344)
gctgcatcctcaggtacacttccatctaatatttgttcaatactagtcttggtgtgtaccctttggggaaagaaaaaagagagaattttacgcgacacttagagggctaagatgaagaagactagcttcgtcattagtcctataaactgtaggactgagttttaagaatttaaaaaagaaaaaggaaaaaaaaaacaactatatgagtcgatcaattttgacaagattttttctgcttaataatcgacgttgaattcaagttttgaatatgtaactttcttatactcaaagacaatgagttttgccacgtacaatagtccaacctgactcaaacatggaggatatataaattgacatttaccacaaattaccaac

SEQ ID NO: 23685 - DNA, 911 bp, Glycine max
  Intron number 1 from transcript Glyma12g36630.1 (locus Gly ma12g36630) derived from phytozome v7.0 (chr-ID Gm12; pos 39669371 to 39670281 reverse strand)
ctcatcgttcatttgcactccattcttggcaataggtactccattttcaccttgtgatttcatatccttgttttgcttaatcaagttcttatatatcaataccaagtttaacatatctatatatgatctcctataactataatatgatctactattatggataaactacgatgtgattttatttagaagaaacaaaaatgcaatccagtgaagatctattaactttgtattaaaaataccatgaatattatagatatatatagagaccatgaaagagttgtttgtattgatttgagtgatttatgaggctagtaattgtggggaatgaatgaaaaccagaaacaagttaaaagaagataaaattcttgtaatcgttagtaaaaaatggaataatttttttttctcaaaccagacgtaccttaatgacttatgaaaataaataataaaataaaaaaataaacatttttaaaatcagagagaccccaatatgtatttcattgattgttgttttacctttacatagacaatgataattttgagtttttgaaatgtgtaatacagaatggtttggcacattgtgttaagaaattgaacttattgggtaggtctatccttcataggattagaccaaatgggtttgcctggtagcatgccacagatttcacctagatagttaggtcctgcattctattaaataaaggatggcctataatatattaactattcaatatagtagttggtttataaaatctctgtgaagccatgaataattaaatattagaactctatgtaggatatgtggtatatgagtatattgggtattatttgctttctttcttctcttctttaatcttttccatttctgtaaaatctcaggtggtctcagattgcagcgcgtctccctggccgca

SEQ ID NO: 23686 - DNA, 585 bp, Glycine max
  Intron number 1 from transcript Glyma12g10580.1 (locus Gly ma12g10580) derived from phytozome v7.0 (chr-ID Gm12; pos 8530406 to 8530990)
ggtgcttccctcctcctttctctctcgtagcgtttctttttttgacctcatattttgttgttcatttctccaattccgtttttgaatttcgcattttcgtttccattttttgtattctgtttagctttcctacacgagtatgtgttgattgttgtagtgatatttttttatttcagttttttttaaaaagaataaataatatgagaaaataaactctgcatcttcagagtaattttttttttccctctaaaccgtcatctaatcatacactgtcatatatttcttttggtaaccaccgtaatacagtgtcatatatgataagatatttgactttataaaaattaccgataattttttattgatcatagtgttaaaaacttttcatccgagagtgtaggtctatgttttggtaacgagagtaaaagaaagaaacaacaaaaggagattaatgtatcacgtttggttgggggagtagtgtaatttgcattatcttgctgtcattgtgtgaatttatatttatgatgcgcgtatgtttataatgtctagtgctgaattttgtgttctgattattgttcatttcagcca

SEQ ID NO: 23687 - DNA, 427 bp, Glycine max
  Intron number 2 from transcript Glyma11g00430.1 (locus Gly ma11g00430) derived from phytozome v7.0 (chr-ID Gm11; pos 109723 to 110149)
aggtgcttcattggtttgcttctttctttgaaggctacattttattcaaagtcatatatgaaaataatcatattcttgcaggagagatcctcattgcaagaccactttgagtttttacagcaatctgaatcagaaaatggagttcgtaacaacaagtaagcaaatgtttcttctgtacactggtaaagtattttatcatatgtgaccattcaattgcatttcgtgcttaacagatggtacggagagaaagagatgggaatgatataaagataagttctatttctacggatggctaccgcagctatacaacttgttgcagtggaagatactgaagatcgatgaagatggtgtggaaggaatctgatctcgaaagggattctgatcctttgttttctattgtcatatcttttagctgtcaatgcagtga

SEQ ID NO: 23688 - DNA, 801 bp, Glycine max
  Intron number 2 from transcript Glyma11g21270.1 (locus Gly ma11g21270) derived from phytozome v7.0 (chr-ID Gm11; pos 18242815 to 18243615 reverse strand)
ctacttcaggccactggtgcagtatttgaaagaaggtaatgcaggactttccttctatgtggaccatccacttatgatattacaagtaatttaggagcaaatatggtccagaggaaattgggttatcatagatgaaaatcattatgtgtttatttaggatattacaattatccttaaatccagtttaatcttaatttggtagtcttgtcttgactatgtttcctcaaccgaattaacagttgccaaacccggtattgtaccgggttcatacatgtaaaattttgatgtgttttcttctatccaaatgctacatgctgcatgcatggtaaataacaaatttatttttcttatcatggtttaaacatatgtttttgtttctatatgtatcactcgtttccaatttgacgattatatgtaaaaaaattaatttagtccttatacacacaattatttccaattttgtccttgccatctgttgccgtatgaagtatggagttaagttactataaagtatagtgttattatagtaaccaacagcaggaccaaattgaaaacaattgcacgtgtaatgtctaaattgaactcctttttagtatagggaccaagttgaaatttgagtgtcatgcgtgttgtatatatgttttaaccttgtattatagtaatatttagaggggagaggaccaaatcactttcatttggatttgttatgtgcatagcttctaaatcaacaatgatcagaactgaagtaaattccacattccctgcacctgaatattaaataatgttattgtagggtctgac

SEQ ID NO: 23689 - DNA, 655 bp, Glycine max
  Intron number 2 from transcript Glyma12g32370.1 (locus Gly ma12g32370) derived from phytozome v7.0 (chr-ID Gm12; pos 35864011 to 35864665)
caccaaaaagaattagcagaaatctccaggtaattttaagctccacatgatgaccatagtaaataactaaactaaagggtgttgttagtttgaatgaaaatgagaatgaaggtggacattggaggaattcaaataaagagtgtatgttaatatatagtactatgttgttagctagatagttataactacgctacagtaaaactagagaaaattaccattaaaagttaaagagaagataaatataaacaatcataattttcattgattccttaatatattgaaatcctacattaaataacaaacctaatgaattgaatgataatcctacaagtgtcatcatctaatgtttggaaaattaaaggaaaatacaaaaataagaaaatttcatatatttataacctaaccccatccaataatctttggacaacttaatttattgggtctaaagttaatcccattgtttgtccaaatatctggtcaattggcacttaatttttcaaattatgttttttgactttgattcttaccatttttaatccattattattattattattattatctaaaaagaaaatgtggtttgaatacgcatcatataattgttactatgatctgattaggtggtggaaaaacttgggacttgttgaaagacttg

SEQ ID NO: 23690 - DNA, 985 bp, Glycine max
  Intron number 1 from transcript Glyma10g08690.1 (locus Gly ma10g08690) derived from phytozome v7.0 (chr-ID Gm10; pos 7587347 to 7588331 reverse strand)
ctgacctccagagattcgattccttgctctttcaggtaattaatcaaacaaaaaacacacgtgattccattcttttgttcaataatgtaaaataaaattgaatattaacgtaatgaagcagtgttttatattaatttcatttctttgttatctttttcggcacaagcattgttctaataaggtttaaatacgtatttattttacgtaggtttaaatacgtttttagtacaggcaaatatgatcaatgtttttcaacaaaaagaaaataaaaatatgatcaatgtttgttttaatgtttggttttcactgaaaaaaatatttttgagacaaaactaattttgtcaaaagcatcaggatcttattttttgcttttattttatttttatccattaaatttgcattagaacttttccacaaaatttctaattttaatctaaacatgcacttaatccttcaatttttctttgttggttttagttttgaggaatttatttttttaaaacggttcctttatctaaatatgcttattctaaaataaatatttatcacatcattaaatatagtaaataatattgtagactattttcaatttaaaaatttttaagaggggagactaatatttttttttcaaaattaaaatgaaaattggtaacaaggattaataaagatattaaaccttcaattaattcaaaagaatattaatgtaaagcatatggttgacacagttgtctaaaacctgatatgttaacatgtggaaaatactttatttaagggaagaattgtatttgatttttttgtgtgcaaaattctgatctcttaacttaatgtagcattgttggacgaatcatgattgattttttttttggtatttaatttgttgtaatcattgtttggtttacatgttttatttccttcccttggctcgtggttgactggatatgttatgacagtgggcaaacagcctttgccagggagccaatctgcc

SEQ ID NO: 23691 - DNA, 446 bp, Glycine max
  Intron number 1 from transcript Glyma12g33660.1 (locus Gly ma12g33660) derived from phytozome v7.0 (chr-ID Gm12; pos 36880955 to 36881400)
gtatattaaaataaaataaaacataataaataatttcttatgtattaaatatatttaagaaataaaatagaacaagctagaaattaaattaaaaattatatatacattttgtttctcttaaaaatggtggaaaaatatttcatttattttacacaagtcaaatatgctgccgttttgaatcatgtccgtcttattcttctagggattggtttctgccagagataaagtggtcatgaaatgttgaattaaacgaacacctagataattaacatgatttcttgatgataaacacattttaaatgaaataaccaaagcaagaacataaatattatatttaaattgagctttgttttaaatatattaaaaagaggcaaggagtgtgcatactatataagcacctcagggtatattcatttggaatcactaagcttgaagccttgggggaa

SEQ ID NO: 23692 - DNA, 642 bp, Glycine max
  Intron number 3 from transcript Glyma11g33160.1 (locus Gly ma11g33160) derived from phytozome v7.0 (chr-ID Gm11; pos 34931839 to 34932480 reverse strand)
actctttggcaccgactcctgacggtaattaatctttgtcttctgtttgattgattaggtggatttaagaatgaaccatcaattttgtccccgaactgttgatctctcaaatgatccttaaagtaatgaagttgtttaagtaaatctctaaggaattgaatatccatgactttaatccctctattaatgtatgaagatttgtttttggaatacaagtgagaggtgaagttccatctcgagtaagaatgagaaggttgaacaccatataagtgagtataagacctataaacccgagtcttaaggttttaagttaaagtgtggtatcaaatttccttatgtgattactcatgactcattgaaataacaaagctcggtcttacaaatctggtgttaacccccatggattttccaacattttttaatagttaggggactacttaatatgatttcaaacactttcagaactacttatatactttgttttactttagggactatttagcaaagagagtaatagtttatggatgaaattgatggtttactcttgatttaatgatttagaagatcgatgtgtgtttactacgtgaaccgaaattggttgatgcaggttctttggaggtgaagaacctcttggacaagctt

SEQ ID NO: 23693 - DNA, 232 bp, Glycine max
  Intron number 2 from transcript Glyma11g33160.1 (locus Gly ma11g33160) derived from phytozome v7.0 (chr-ID Gm11; pos 34932535 to 34932766 reverse strand)
gattcacaagcctcgttgctcgttacctcaggtgcgtcaactttaaccgttttaaccgttaacgttcgttacgcttgtgattgtgattttcctttcatttatcttcagttacgtgtgttcactattaattccaccgtgttacgattttccgattattgtttattttattttattatatattttttcttattaacttttgatcctttttgaacgtgcagtggcgaagcacagc

SEQ ID NO: 23694 - DNA, 854 bp, Glycine max
  Intron number 1 from transcript Glyma11g37620.1 (locus Gly ma11g37620) derived from phytozome v7.0 (chr-ID Gm11; pos 38682974 to 38683827)
caagaccctgaattagtggtccaggaagtgcaaaagtatgttatattcagtaatttgttttcgacatgttacagtcttacacactactccctcccccgtggcccgtgtggtatcttttaaaatgttccatcttcaaacaaaattacgctgtcttattctaccaaaatcttaggttgctgaacagaaagatcttttatcttttgttttgattcatttttcttttttaccacataaactgcatcttgcattaccagttggtttgtactattttactacagtcaattaccatgaaaatacgacaaaaagtatttggagacaataaactcttgtgttaaacttagatgctatattttttataagtaacaactattcatccctatatattaaactaaagtcttgagttatcttttaatttatttatccttaaagaatggcgctgtggtttttaacttttgtatatcatatatcttaaattttaaattcaaattcttttaatttaaactaattatgtatattattcttatgcacttccatgaatgaataaagtagaatattctccgcatgccttatgtgatgaagcatgtcacagtgaccacaacttattgtcgacatgagagcactaggaatagaacaaacacatgttaatgttagtgaccacaaccttttatgatgaaacatatgtaccagcgacctcagcacaattgcatttttttttttccataggagcaatcgattaccataggagaaatttgagttttcattctcattaatgatcaacatttttcaatggaattaagcatgatgacactgaaattaaggagcatgttctttaactttactgtacaggagcatca

SEQ ID NO: 23695 - DNA, 505 bp, Glycine max
  Intron number 3 from transcript Glyma12g33970.1 (locus Gly ma12g33970) derived from phytozome v7.0 (chr-ID Gm12; pos 37160461 to 37160965)
aattcagctgcataggtaattgctcactcattcattgttaccttaattatttttatgagcacatgatgtctccatctcttctaagaaagaagaattatggttctcaccagtacttctttcatagagaaacaatttttcaacaagaaattctatttgtactcatgttttctacaattaggagtaggaagagaagagataaaaatgtgtgataaaattagtgatgtgaaaaaatttgaggatagaataatccttttttcaatcttccaggattcagtcaaatcatggaatatagacaaacactgacatctaaatttctgtgggttaagcacttataaggaaattgtttgattgacacctattaatacttgctttactcttttgtgtcttaagtgatgcttcattgtggacaccaattatacatctagaaagttttgcatttaaaaattacaaagcatgttatataactatgctgcaaatccttctgcaggctgcaaaaattgtgcca

SEQ ID NO: 23696 - DNA, 723 bp, Glycine max
  Intron number 2 from transcript Glyma11g12230.1 (locus Gly ma11g12230) derived from phytozome v7.0 (chr-ID Gm11; pos 8728580 to 8729302)
gcaatttctcatttcaaagattaagtgaaaacgtagcacttcttgtctccttacagtcccctagttacatatttaaggaattgtttgatttgcttgactatttaatattaattatttgattttcctttaactaatttattttacttatcacttttttacttcttagttcttaaactaaattcatgttgtagctactccaattttgttatacatatgtacttttaaaacatgatctagaattgcagcctgaaggaacctcctaatatattttgatctgctttaaaattgctatcttgtatacatattttccctccttcttttggtaaaattctagcttgaatttgcttcaagattactggtaattttggatcttctatgtgtgttttttttcttttgtttacctaaattttagctacataactttgaattattaatgtaatcctaaattagtggtggccttgattgtctgagcgatttgctcaccaaatgctagttgggtgttgctcagatggtgggggtgggattaggtttagacagaggtcacaggctcagtcccttttgtaaactgacaaaaatatagcctttttgactatgaagaaaaagaattcacttgggagtgagaatgttatgctctctttctacctgttcttgacttcctctatgtttttttgttttacttgttgaacaggttgtccttgctgcatccattgtgagcaaatctgg

SEQ ID NO: 23697 - DNA, 640 bp, Glycine max
  Intron number 3 from transcript Glyma11g12230.1 (locus Gly ma11g12230) derived from phytozome v7.0 (chr-ID Gm11; pos 8729273 to 8729912)
ccttgctgcatccattgtgagcaaatctggcaaaggtgagttctgtccctgacctttttatttgaaagaacagtcgttatcttcattttctgtaatatgaacctgaaacacaggctatatggttttaggaaatatgatataaattcaaagaggggtagctgctttccagcagcatatacattagtttgacatgtggggaatctactgtcaaagttatatcttttgatttgtttgtggctcctgatgttgagattaccaagtaaccaaatatgttgtatactactactagcatggctaaaatttggattcatgatgtgtatctttttctctatgttttctttatctgtatcccatcactctctgccagaaatatagattataggtttatgaaatccttttcgtacttcaataactcaatctgttagttctgcatgattcttaatattatatcttattaattgccattacttaattttgttaaatttaaaattaatttatagtttgtacagcaaagcttaatctttaatcatttaatgttgaatttggtggtacctaagccaaatggattcaacacctatgcccttataccaacaaaccttttgtgttgtttgcagttctagtttctagacagtttgtggac

SEQ ID NO: 23698 - DNA, 359 bp, Glycine max
  Intron number 2 from transcript Glyma11g02350.1 (locus Gly ma11g02350) derived from phytozome v7.0 (chr-ID Gm11; pos 1495662 to 1496020)
gagcccacacttccccaaccaccctctatacacaggtccttttctatatttaacaaagatattgattttttttttttgtcacaatgcaatacaacagtaaattaaaaccattttataaaatcaaaaaattatatatgatgcctaggctatttcatatcttgatttatatataccatgaatggggggaggtcttcttggctaacctttgacagacaagcacaacaatttaattaccgagtgccatcaaatcaaaacctaaaaaactaaataaataattgaaaagaaaaaaggtgcagaattaatgacatgtgttgctatttggtgatatatatatatatatatatatatataggtgggag

SEQ ID NO: 23699 - DNA, 818 bp, Glycine max
  Intron number 3 from transcript Glyma10g41900.1 (locus Gly ma10g41900) derived from phytozome v7.0 (chr-ID Gm10; pos 48918042 to 48918859 reverse strand)
cgttacagttggattcgcttgttcttttgtcggtatgcattgctttctaatcttacgtctttcaattcaatgaataacttgggttcttttcttgctctaaaacgtaatcgtatgaataatgaggatatattatgataaacttctcaataatatttctaagagaagaattttttttttaaaaaaagttttctcataagttatccatacgtttatttgtagaagttctgttatgttagcttaaaatttgatttttagcttatatataactcaattttaacttatgagaaaaaaaacacttcattttattttattattttcttctctcattattgtttattaagaaatttattcaaattgactctcaatacaattggtcgtagcctttcctggtgggaaataaatgaatattattatttggaagatgattatatatttccataatgttacatcgccatatttgtgataatcttttgagtatttacatttttcatttttaaaagttcaaattatgtctatcacatatatataatgcccatgcatgcatgcatgaaaaaaaagtgatgtaagaaaaggaaaaagaactttgtcccataactccatggtgcccaggagagaaaacacaaaattcatgtagtatctctctgtttgttcctacaccatgcaactattgaagaatgatgcaatggaattatgtataaatgaatatcattttattagattaaacatgctagagtttggattgactataacatgtgtgagttttgttgtgtgtacggacaacagcaaagatcgtcctagaggctgcgtttcttacaggt

SEQ ID NO: 23700 - DNA, 891 bp, Glycine max
  Intron number 1 from transcript Glyma10g37950.1 (locus Gly ma10g37950) derived from phytozome v7.0 (chr-ID Gm10; pos 45873315 to 45874205)
gcgaagaggtatgtgtttttagggggaaatgcctctcttataaaacgggtttacagtaaaaagtacatttattttaattgaggttatgatataaatcaagttgatacatttaattgtttgtttaagacaaaagaaaattcattttagaggaatcgtgttcatggtccttgttacctttattccttttgattttccgcctctcccttgttttatttatctcttctttaatcacactttgttctcaataaacctttaaagcagagaaaggtcacaaactcataggtatatttccagttgtctacggaaaaaagcaaacactttgatgagtttgatctcaataaaccttacaaacaaagaaattaaacatggtaaactcatgagcatacacccagttgtatttacccaaaaaaacaaaatttatacttattaaggaatatagattttttggctgaaaaagcccaacattacgtaagcatcataagtgtggtccttgaactgggagagggaaagttccctttcctttttgtttgtatctatcatattatatagatgtggttagagaatttttttcagtcttcacagagcatactcttttccttggaataacgacactcattttcgtatggttatatttgtttcctgatttaaaaaattcaaattaaaaataacaaaaaagctgtcaaacaaaaaaatataagggaataggtactacaaggataccaaaaatttatttgaaacccagtccaatagcttgcgaatagaaagatagttcagaaatctggggccttactagatgcatttgctacgtgctgaaaatttgtgttcaaattattcatcatatctaacattttaacagataaattgtgcaatcatcccaaaagaaggaccaaa

SEQ ID NO: 23701 - DNA, 615 bp, Glycine max
  Intron number 2 from transcript Glyma11g04190.1 (locus Gly ma11g04190) derived from phytozome v7.0 (chr-ID Gm11; pos 2785125 to 2785739 reverse strand)
gagaacgaagaaagcaggcattgtcggaaaatgtaagttttgtaatcacattatgttctaaattccatataatatgtcagttaaagcttcgagttaagttatatataaatatgctgcggtttggtttgagggagttgttattgattatgcaatttgttaaaagatttgaatgtttactgggcaccaggttgttaaaatacttgctacttgctatttggactgcattttgcatatgtgatggtaggattgttgtgggcttttcagattaaggtgtctgtccgcagttactttttcatcaagttaatagttataatttccacattccaaacatggtttcttacttcccaacggagttccaaacacactatgaaccagtttctctctccttctccttttacttttttgtttgtgattccaatataaaactatctgaacaatataatggtaattttattctattctatttcaactagttttatctcatctcacccacaataggtgtaaggaatttggatttaagtatggctcattgtatatgcattttgagaagacactagttttgttggattaaatttacaagcagctatttcatcgtgtttatgttaggtacccgat

SEQ ID NO: 23702 - DNA, 743 bp, Glycine max
  Intron number 2 from transcript Glyma10g40250.1 (locus Gly ma10g40250) derived from phytozome v7.0 (chr-ID Gm10; pos 47725694 to 47726436)
cagaattcatctggcccgggttgcttagaagggtacgtttctctctctctctctctgtgttataaaatcaaaattgagtgagtgaaggtggttgtggcgactcagatcgattgattgcggttgcaaccatcatctatggtgcgcccgcggccgatcattgattagctgtagttgcgctgtctcactgctttcatctcacgcgcgcacgttactcgaactgaatgtcatctttttttcggtgggccccgccacttgcgggtttatcaagtaacctaataagatatttattattttaagaaaataagcatcgataaatctttattaatttgaaataggaaataatatactacctacgtccgaatatatataatcgtcccgatacacatatgattttttaattaattcacatcttttacgaaaattgattaatttaaccagtgacattaataattttgtcaaaattattcttaaaattatttgttaaaaagtaattatttaaaaggataatttgaaaagaatctaaaaaaaatcttatattcagaaacgaaggaggaggagaaagtatgatacgtagaagctttgaattttcagtctcgtcttttttttttttctttttggtaaaacgagaaagctttgtgattattgtgtgaaatgagtagagttcgttcaacgcagggattctaatttgtttgaatttgtgaattgttgcagtttggctgctctctgctgctgttgcctgttgg

SEQ ID NO: 23703 - DNA, 967 bp, Glycine max
  Intron number 1 from transcript Glyma09g34530.1 (locus Gly ma09g34530) derived from phytozome v7.0 (chr-ID Gm09; pos 40909747 to 40910713)
cagtactttctgcatccaaacctatcactactgctgtaagtaaaacaccctctctctctctcttttcttttcatcattgttattttcttactttatgattatgcttttatatgccttttttttttcagaaccccattatccacagtgtaatgtgcctaattatttatctgatttggattataaaaatctaaactttcatcatgcccacatacacaatctgtctctataagatatgcataggaggggagagaaaaaattatactttctgatttaatcatgagtacaagatgggttagaatttgctgggtatttatttttatgataggagttgaaatttccccagttattgatggatctctatgcttttcttctctaaatttcttggttgagttatttgtttttagcccaagtttccagattttgactgggttggaaggtcttttgtgtgatttattttgactttctgatggggtctgtgaatgagaccaagttttcctcactgtttgaaatgttgctttgtgtgaagagacaattgtggtgtttgttttaaataaattacaacaactcatagtcaacaacttaaaattgaccctgaaagtcactcttttcaagtaaatctctagaagcactgaaccagaactgtactaggattgaatagtcaacaactcatagctttgttagtttctctggaaaattcaagggctatggaggatccatcttttggaaccttggaagaagatggccttaatgaatcctgttgttaaaggaaagcttttaaacagttaagttgcagcaaaaagtaataaagaatttagttttccagcacatcggaagctgaaaagcagtatatattatatgataatttataagatactgtccaaaaaggctcttaatccatgtttgaaaactgatggtgccattattgttaacaggaataactggtaagttcataaaggggagattcttc

SEQ ID NO: 23704 - DNA, 395 bp, Glycine max
  Intron number 4 from transcript Glyma10g02730.1 (locus Gly ma10g02730) derived from phytozome v7.0 (chr-ID Gm10; pos 1946867 to 1947261)
aggtctcactttgcacgatctggttgtattatcaggtaattaacattcataataataattgctggtagtgtgtatataccaatacataaatagatgcaaggaattacaaagcaagatcataatcaacaatatgtagtatacattaattaataatctatggagttataagattgatttaatttgatggttgaagagaaaagaaaagagagaaagattatgggtttcaatctctcccactaacattttatttctaacaaaactaacttctaatcgtattttccgataaaaaaacattaattaattatcttaacgtacagtttatgacaattgtgtttctatataattttcatatatatgtaggggcacacacaattggaatagggcattgcaacttg

SEQ ID NO: 23705 - DNA, 536 bp, Glycine max
  Intron number 1 from transcript Glyma12g36570.1 (locus Gly ma12g36570) derived from phytozome v7.0 (chr-ID Gm12; pos 39611533 to 39612068)
cagaggaaactggtggagaagtttggttttttgaggtgagttttgtgtgcatatgaagttttattgcatggcctttgtctgtgttgtgaagtggatagtggatatctgtttactgttgatcatgcgagaatctcaaagaaattggactttttctttgttttttttttattattattgttggtaatgggaaaagtgctttgttttctcagccatgtacataaaggagacttcattgtttggaatctgacccctccttttcattttccacccagccttttctcatcttccaaacaaaatttgagatcagaagttctgttttttttttttttttccactttgcaagctgcatagaatggttattaaaaactatatttttatttatttattatagcttcaatttgagatcaaaagtttttttttttcactttggaaactgttgagaatgcttgttagaaactatatttttcttttattttgtgataatagcttcaatttctacagataaagaataagggagttgtttgagaagggggtag

SEQ ID NO: 23706 - DNA, 177 bp, Glycine max
  Intron number 2 from transcript Glyma12g36570.1 (locus Gly ma12g36570) derived from phytozome v7.0 (chr-ID Gm12; pos 39612191 to 39612367)
gaatcagaaggggaagctggggtgagtatatataaataaattttctgtttgatttcttccaatgttttgtgatgttttttgggtgaaatggttgttggttgatgcctgatgattattttttaatgccattttcattgttcaggcaaagccagtgacagcattgggtgcccaagtgtg

SEQ ID NO: 23707 - DNA, 725 bp, Glycine max
  Intron number 1 from transcript Glyma08g45720.1 (locus Gly ma08g45720) derived from phytozome v7.0 (chr-ID Gm08; pos 45006040 to 45006764 reverse strand)
taaggctgtcccttgttccggtgccactggcgcaggtatcactatatataaaaaaaatacaatgatcgtcttttttttttttttctctttgggaaaagaaaagaaaaactgtaatagacacatgctcgcacgcacatttgttctccaccacgcgtacacatattgtttgatataaaaatgttggatttaccaatttttccaccatgtttgggtgagggctagcaaaattgattttttaaaaaaagtgatttatgcttgtatccttatattctgaatacaagttagtagtaaaatacagtataaaatatttcattcgaagcaaaatgcacttaatgttgcttcaactcaaaatcggttttggacctatagaatcaattcctcaacatgcataattgcatgtttagggtggtggtaaggtgagccaaaatcaattttaatttcacggtgaatgtgaagcaacacattattgctttggaaaaatcattttaacaccgtgattttgagataatcaccatgattttaatggcatcgaaaatccaaacatgctataagtcatttgcattcatctgggggcggggggccaaagtgtgagatttcaattctttttcttttgtattgcagaattagaaaatggagttttatgctgaattttgattaactgttgggtctcttcccctttgttttgaaatttgagctggttgtttctagggcagggacatctgtgg

SEQ ID NO: 23708 - DNA, 774 bp, Glycine max
  Intron number 1 from transcript Glyma10g35320.2 (locus Gly ma10g35320) derived from phytozome v7.0 (chr-ID Gm10; pos 43558453 to 43559226 reverse strand)
tgcttccactaaaccccccactaagtcttttcaaggttttcaaacttttctattttgtttttgagatttcttttttatttatactttttggatttttgtaattccagttatctgttctgtttcatgtgttcatattggtggaattgccacttgctgctgttggcgtgttacattggttgagcctaacccagtaacgttattttgttttttggtgtgccctgtccttaacttgatatgttatcccttttgttggtctagttaaggagtgtggatattgattttttttatctgtgagaatcgaaaacaatgtcaagattaactcacgcatcctactcattcaactgataacaagttaatagaaattgataaagagaagatatagaatgggaaaataaatgttttagtgatttttctgatcatctttttgtgcaggattctcatttctctttatttttaattaaagggttaggttcagtatcattttacagttacataactagcttatagcccaccataaattgggtctaactgtgtactgttggtgtctgaatgatgatataaattatagtttttctttaaatttgagattgcatcatgtttagtactaggctgctagtttttcttaggcaatttgtgctttttttttataggcggaaatttgtgcttttgagttttgagacgtcttttgagtttttgataacactttttttttatggttattaccttttttaattgtcagtgagatcagttgctggtactacagaagctgcatcg

SEQ ID NO: 23709 - DNA, 707 bp, Glycine max
  Intron number 1 from transcript Glyma08g43250.2 (locus Gly ma08g43250) derived from phytozome v7.0 (chr-ID Gm08; pos 43087296 to 43088002 reverse strand)
cctcactttctcactcttcttattcttcttctcaggttccttctctatcatctctctcgatctgttgaaatttcaacttagatcttttgattcgtatccatttcacgattcttccctgatcattagaaatctatttctcttagggacaattttctcatttaaattcctttacgtggttttctccaattgttttcgctagatgttttttttaaagaaaaatcatttttccgatatttttttgtgtttttaatttttcgaattgttcgcgattctgtgatcatttaccgatcaagagtcgcatgaattgtcgtttcattttttccaatgagatattcggtgaaattttttgcaaaatcagaaaaattgtctgggttttcagcatttcatctgcgtgtgaatagggttttacttttgggtattatagttttgttgatggattcgtaattatgtaaagtgaattgttttttgaagcttgaattgttgtttacttggaaaatatattgtattaaatcttatgcttatgcttttgttgatccttcactgtcttttatttgagatttgttttaccttttcaacattggacgtgactagttaacacagggtttagtttagttttgttttaagttagattttaggttagttagttcatttgcaaatggttgtttggaactaactgtttgcattatgtttgtgttgatagcggaaat

SEQ ID NO: 23710 - DNA, 1014 bp, Glycine max
  Intron number 2 from transcript Glyma09g03490.1 (locus Gly ma09g03490) derived from phytozome v7.0 (chr-ID Gm09; pos 2489514 to 2490527)
gcttctgggcaaccgcataaggttaaactgttaaggtgcttcttctctctctctctctctctctctctctctttttctttctttctttccctttttaaaagagacggttttgttgctgctactactatttggcttgggctatttaagccctttgattcggttttgacaaatctgttggttttcagtatctgggttggtatttgatcttcttggttggttattagttggtgattctgcaagtgtaaaacaaaagagtttttttgtctgttttttgaatttgaattattgttcagttgatatgttttctttagttgacgaggtttcttatgcttgcttgttgtatgtgttggatcttgatgttggaattttgaagcttttttttttggggggtcctaggctgttttctggatttcttggtggttgtttttgaaagtggttttgtgggtttttcttcttcttttttttttctttccctcgtgccttcttgccctgacccactctgacagattattcatgtgcttgtcgtttgctatgttgtttttggggtgaaacatggccgtgactgtgagcaatcttaagccttttttttttgtttgctttgtatcttacaaggattttctttcttctggagttctctggatctttcatttctggatactttctctctcattaactttgttagtttcgaatttattggtgaattggcgggttttgtttgctttagttctgtggtgtttagtagtatccaaactttttgaatccttcttttaccccttttcattgttgtttttatgttctttttaaccttccaaacttttacatacaaaaaacaaaacttcttgttttacccttctacagatatttctctttgtttgatttttgttgtgctggttttttcagtttgtgaacttcttcaggattgttttgatgttttctctccagagaaaaataaacttacatggtctggttttcactgcagcatatcattgaaatccttttgggattggaacttga

SEQ ID NO: 23711 - DNA, 991 bp, Glycine max
  Intron number 2 from transcript Glyma10g28910.1 (locus Gly ma10g28910) derived from phytozome v7.0 (chr-ID Gm10; pos 37797140 to 37798130)
ctaaggtctttctctcttgtccctctcctaacacatacacacatttgtgcatatttttatacctgattgcaccccaacagttgacttctcaactctgttttacacctgcaaacatcacttgatggaacttggctatatacctataagatttgtctggaatttaggattaaatcttactcctcaatctgatatggttttagacttttggtctacatgctaatattaatgtgtggtttgacttggaatatgtttatttgtcgttctagctgttaacaaggataaagttttctttctatactcattactgaacttgcgctgtaatgatcaagttgccaagaatactcatgtgttgaatattactatattaggactattgtctaatttatgtgactagagcttagttaaaggattgatgccttcataatcccagcaaaatggttatcgtttgtctgattcatgggaggcagaaattatacatggaaattcgctgatagcaccttttctcattagagtgttgctaattgtatgttatcagacatatctgctgctgatacaactttttcctatggggtgtctcgttgagcataatatatacataaaccaagggatatactcttgccttcataattcttgctactgatgctctagttgagcataatatatacataaatcaagggatatacacatgccttcataattcttgctgccaatgctctaatagtatacctcagggaggggggggagaatgattctctgaacaaatatagccctcttagaggttgctttccttttttttggttttttagctgttgcttgcattattattctcaagcattaagcaatgcctggactttggtatgcgcatcatggcttttaagaagttaaatgaatattttgactgaggacttcttgctggaggtttattacatactcacctatgttacttttagagaatttagagcaaggcatcatccttctttggtgcaggtag

SEQ ID NO: 23712 - DNA, 406 bp, Glycine max
  Intron number 2 from transcript Glyma11g00380.1 (locus Gly ma11g00380) derived from phytozome v7.0 (chr-ID Gm11; pos 83923 to 84328)
cctgctataattgccaaacgtagtacaagaccagagtagggattgtatgatatatatatatatatatatatatatatatatatatatatatatattcatatgtaactcaaatagccattaccaacgaaaaccatctcttacaagacatggaacaaacagcaaagcctaaagcattcatcatcatcctaaaccatattatttgccaagtgcattcatcatcatcctagacgtagttcatctgctatttactatcaaacttcttttttcttttctggcttaaattcaatggataatccttctgaatttcaaaatcatttttcaggtcagtattgcccctgaaacatatccgaggagcttgaagctacgtacagaaaggaaagcaaatccaaggttaggttcatttcca

SEQ ID NO: 23713 - DNA, 939 bp, Glycine max
  Intron number 2 from transcript Glyma09g10020.1 (locus Gly ma09g10020) derived from phytozome v7.0 (chr-ID Gm09; pos 10054919 to 10055857 reverse strand)
gctgttgcaaccagaggtaattacttgaattagtcagaagttatagcattgagtatttgcttgtgtcattcaataaacccatgttaatttttagtagaaaatattcaggcagatatacataagtcaagctacccaaccttccaacagttgtttcagtttctcaaatctcaactttatttttgtcctaaatggctcattctttacctcaatggtttcttgtaatctatatttcctcaatgtttccttcaaagcccttagcccaaattttgatcagtcatttttgtttccttgcattgttttgcctttgctccaattttttataatgtcctgcctgtgtagtttaatatttaaaaggagattgtgtcttgatgggtatgatacttgctattactaattgtttatttcataataaatatttaaagttccattataattaaaaaaaaaaaaaaagacagaagctaatgaaatgtttgatgggtatgatcaagaagaaagatggacgccagaatagtgctcgttattaaattcaaatcaactacattaaatatatatttcttcttattaaaggatttctttcaagacattggcatcagcataggttgggtgtcactaaaggtctatgtcatatgtcatatgaggctgtacattaaaagagattagtaggaattagtaaaaggcttcacatttgatataaatttttaattttaatatagtggcacttatgtatcattcttctctgttttcttttcttcactttctctttctttctatctctgggttgttcatttaaatgtattgataggaaatagccagccagttcacatttggtatcattgtttagttttaaatttcaatgaagtggcacttctgtaacaggtttgtttcatttctctttcattcactcttgtaggaattgaaagagagatagcatcacttcag

SEQ ID NO: 23714 - DNA, 425 bp, Glycine max
  Intron number 3 from transcript Glyma12g12950.1 (locus Gly ma12g12950) derived from phytozome v7.0 (chr-ID Gm12; pos 11324014 to 11324438 reverse strand)
agattaaacttgcaagtgagtctaattagtggggtacattaatttaaaaaacattacctatgaaacatgaagagaaaaaagttttaactgtatcagtaagtttaatttgtgtgtctatatttatttttatatatataagttttgttctgaatctgattaaaatgaaattgctgtatcttcttttgctacctcttattgatcagccttgtatttgttgcaatgtaattgcctaacttgtataatgttcgatatcgatcctgtaacaaatgtcttcaccaaggaggccatgacagtcaatgtttatttatcatttgattagattacaccctccatgctcatctggctttgttccccccaccccctattaatcatagtacactacttgattatgctacttgcactgacagaaaaaagtggacttgttt

SEQ ID NO: 23715 - DNA, 648 bp, Glycine max
  Intron number 2 from transcript Glyma12g12950.1 (locus Gly ma12g12950) derived from phytozome v7.0 (chr-ID Gm12; pos 11324578 to 11325225 reverse strand)
gttcccttcttgaagctgtcctccctcacaggtcattttgcttgcaaataaataatattaaaaaaaaatactcagtgatactctcctattgtaggagttaagcattgcaattttagtaagaaataagaagaaaataaaatgtaaagataaaaagtagagaaaatgtcatatcacaagtttctaggtttaaacatctagttcaatattataaaaagatagcaaaattagtgatgatttcacacacaagatacaagttgggggcttaaaatggaaaaagacattgtttgttatttgagaccataaagctcaaagacaagttttatcgtgctgctatatgactagctatactctatggtagtgaatgctgggctttagaaagacgagaaaaaagtgggagtaacataaatgagtatgttaatatgtgtgatccatgtagtatacttcgtataatgggataagattattgttattgttgatattctagtattttctaatctattgtggggtcaatgtgagaaaggcttgcacactgcatctttgtatagtttggcatttattttgttaattgcattcctactgaaattcacaagagttctgattcataacttttgctcccgcagtgcgaagcattttggaagggccatagta

SEQ ID NO: 23716 - DNA, 621 bp, Glycine max
  Intron number 2 from transcript Glyma10g43840.1 (locus Gly ma10g43840) derived from phytozome v7.0 (chr-ID Gm10; pos 50401789 to 50402409 reverse strand)
aagaagccaaggagaacccaaggaaaccatctctggttagaattacaaatcttccttcttcgtatgtctactctagtttgctataactgtctcttaaattagagaaatgctaacacactttttctattgttgacttaaattgattggaaattacaaaattgtgtaggataaaatgtgttaaaggagtgccatgttagcattcgtcctgaaattatggcgtattaagccaatctcatgctttctactccgccctagttgaatctagtctacgtcagaaccttttgctgtttgttttcccactgctatgtcttttttcctgttttggatgataataagattcttgggttgttggcttctgtctttttctcccaattagattacagtaggaaattttccctgttggtcagtattatataaaatcctactctgtgatgccactatatatattagaaaatattaatttatgagatccttctttgtttgtttattatgtgtcgatgcttaaattttgaagttgctattgtagtccttgagttagtaaacataatcgcatcctttttacctttgatatttgtgtttgttattctactgtttcttttcaggttctttattacgattctg

SEQ ID NO: 23717 - DNA, 862 bp, Glycine max
  Intron number 2 from transcript Glyma09g32730.1 (locus Gly ma09g32730) derived from phytozome v7.0 (chr-ID Gm09; pos 39232200 to 39233061)
ctttgatctctttcttaagtatgcgattagaggttgaatttccaagtccgtatatatgaaataacatttatcggccaacatcagtctcttgaatggacatcatggcatcagaaattaatcttccactctccatggatattctgggtttagtatttttttttataaatattttctcctttttttttttctgaattgcatagtatatttattacttaacctttccatgtggacccttcgccaatttttcttttcaagggccataatatatatagtttttcttgtttctcaagtgagctactttgtgtttgtaatttgtaatttgtaattacttgatttgcctgctcttttctctctctctttctttttgtattttttttgtttatgatccttgtcgttgtaatgagctatacatacaatgctagtagcggaactggtgtggtggttttatgatgatgatgcaaatgaagtgaaagatacgtgtagaaagtagttctaagcttacattatatagttctgcttttagaggacaagaataaaggctaaaggaagattctccattggagtttttatttctattttttacagctcattcttcctccttttattgttttttggtttttctgttttaagaagagagaagaccgtcttggcggtagcaaattacaagtctacatcatcgtaatattgaatgaaacaattaatgatttaatgcactgtgcacagtgcaccctttgattttatattatactgtcaaagggggatgaagcttcaattcgaatagaaattcgactcatggtacatatacagcttgcaatgagtgatattgtcttctagacacgcaacacgaaagttcacgttttaa

SEQ ID NO: 23718 - DNA, 992 bp, Glycine max
  Intron number 4 from transcript Glyma12g35630.2 (locus Gly ma12g35630) derived from phytozome v7.0 (chr-ID Gm12; pos 38761414 to 38762405 reverse strand)
aaggaaacaaaagtgcccttggaagagtaacactggtattaatttgatcctctccatcttgtgattattatctttagaacttttccccccattttactacattgatgaattcatatcactacaaagaatgactgattggcggatattattttatcatttacaatctttttccttctcgtcctaatccggtttaatttttattgtctgtggcatggattagtattgcatttcacttcttcagtcccaattcttgcctatgcctgaagttatactatagttatatatacttggttgtgtgttgtttaatcatgaggtgttcctcaattggtgtgtgcttcaaataagtggacttcacctgcagtgctagattttgaaatcccactggaagtaccaaacggtcagggctatggcatcggactcttaagtggatattaattcacacacccaaagggtgtgggtgcaccttgtgagagacccaaaagaaaaaaaaagatttaatgttgtttggagatagaccataagaacacgtttcttgtattttatcaccttatatgaacatgctgtttatgtgcaagtgttcaataagtgttatttgactctatgaaagttcactattaacaactacgatactactgtaaatttatccaggcaatgcagaacccatgcttgataactttataaaactcttctttgatttttttctggggctattttttctacatcataaataagacccaagaacctcacatcctgtatacatgcgaagccaaatcagtcctaactctattagtgtaagaaatcataactttaaaactcaagtggtcctaattctaaatagtagaattataatatcacattgatttcttaatttctttggcataaataattgttacaaacttacaattatcattaatatcttcagctcccctttccttgttaaatcttttatttctaatattggttcagttgatggcaggtcaataagtggggaa

SEQ ID NO: 23719 - DNA, 710 bp, Glycine max
  Intron number 2 from transcript Glyma11g14000.1 (locus Gly ma11g14000) derived from phytozome v7.0 (chr-ID Gm11; pos 10026557 to 10027266 reverse strand)
agctccagacgttgagctccggggtcattttgttggttagtttatttcattaatcatcttagctcttatgttgtttttggcttgattgcacttttggtttacttattatcaatctatcgatatttcacgaatttgatcccactattttaattgtgcaattttggtcaccttcctaatgtgacactctgtcacatcaacatttccgctaaatattagatgtcaagttaaccgatagaccaaaattgctagaaaacttttacactgcacaagtatcttttccttgtaatggtttttccatttttttatacttgtagctaagagaagattgaactatttgtttgaataaaaattgtagtgatatttagacaatatttcgtagttgatgttttgctatctgggcaacaaatgttttcaacatttgtaaagcttgtctttctatatgtaatgttttttctaaaggatcccttggactccatgtatttacttggtttgaggattgttcataacttctgaaatatccctcacacactaatgatatgttgacaccctaatgcacgtttggttctccctgagtttttggtgatcttgcatctaacaagcacactaccccttcctgcaacttttagcctctgcaattcacttttcaatgttaatttatgattgtttgtttttgacgctgtgaagggcattacttgagtgcatcagctcta

SEQ ID NO: 23720 - DNA, 827 bp, Glycine max
  Intron number 1 from transcript Glyma11g04390.5 (locus Gly ma11g04390) derived from phytozome v7.0 (chr-ID Gm11; pos 2981874 to 2982700)
cattcccttacttccctaacgacgcttcgtggcaggtaaaactttgtccttctccacaaattcgccttgtctgcgtcaaaaccaatctcaaaacactcaccaaggcttcttctcagaattgcgtcgaaaggtgtctgtgcttgtgcttctatcatttgcatctttgttcgttttatagcagctgggattcgttttcgaatttcaaatacatggttgttttcttcttcgtcctattatcatgtatgtttgtaccaaaaaaatatcatgtattacgtatgttcgttctatgtatgttgccaccacccatcatttagaattcagaaatctctttagcgttagttaaatatcgcactcgtatcaattctttccaactccccaagagcatagattatgctccttccatatttgatggatgcatcatgcatcaataccccctccctctttgttttaaagcaaaattgttggttttttatttttattttctggttgagatcaaagtcatgtagaacaagggaagagatgaggttggattttgcacccaaaaggtttatgatatgtctaattctttgtccttattttcacatttctgtcttcttctttaactagtaaccatgtggtttaaaattggatccttgctatcctcattctttcaaatattgtctatgttttaagtcaaaagggctgggggcatgtcaaatatataaaccattcagatagctttggaatagttagttcggacatggtctgtgatagaaagtttagtatactcgcaaattctaattattaaccaaacttttctctcatttccttcatgttgtgccagcagc

SEQ ID NO: 23721 - DNA, 569 bp, Glycine max
  Intron number 1 from transcript Glyma11g10760.1 (locus Gly ma11g10760) derived from phytozome v7.0 (chr-ID Gm11; pos 7642296 to 7642864)
gttttcaacaaagagtgagtccccatgataatattttcaagagattcaatgaattgtggtgttaagtcatgtttggacaaacttcttggtaaatacttgttgagaagaaaaagaaggtatataaaatgaatttaccttctggcacaagctaaaatcaacctatgtgactcaaattttggagaagttagaagagaaaacttctatcaaaattaaatgcataagttgattttagcatatatatatatatataaagagaagctcaattcattttacttttttcttaatttctctctcttatgagtggtaaagaaaagtttatccaatcaagaacttagggtgtattttggttctgggttagagaccacgggtatcccccaacctacaggatcagaagttaatctcactagtggtgtgtgactaccggtggctcaagataattttacatactacatgagagaaatcaaacacgattttcttgctaaatagattattttcacttaattttgtttgtgtgttttcatttttgttgttgtgtgatgtgatgcaggtagacctggtgggtgggtact

SEQ ID NO: 23722 - DNA, 871 bp, Glycine max
  Intron number 2 from transcript Glyma09g28980.2 (locus Gly ma09g28980) derived from phytozome v7.0 (chr-ID Gm09; pos 35942787 to 35943657)
gttgcaaaggttagcgcattgattcaccatccgttatgtttttatgtgtggatattaatattcatataatatgtaatttgatacccttttgttagtgtactttattttgctgttctagctaatctaatatatgatcctttgtgtaagaaacccttataattaagggttgtttttaaaatgtttgatggtattttggaattagctgtcatgcatttgcgatatgcccaaaatacagtttctgtgattatttatgagactattctttgattgtcgattgttctattattgttttatgaaaagtgggatagcaactttagaataagctttctagctatgttgcatgttatggttactagcaatggtatgatacaggatctcgatttttcatagataaatgtaactaatatatctccttcagaaggtaggattcgacaaatttctatgtctatgggatggtatatcatttagagaaatctaaaagtataagaaaaaaatattaaaatgagaatgtaaatgcaatttgcataatgttctgagtaaaataagcagaaaattaaacagagaacaaataaagaatgaagtagcagtttgcttcatttctagtaatgaacagaacacctcagcatgaaacttggtgttatggatggacttttgtaccttagcgaggaatccatattgggtacgtaattgtatagctttgtaagtggtttctttgaacttcaccatccctgattaataaatgttgcaaagcagaattttgtaattcttctgtatgtcgttttcaactttcaagcaattttttgtgcaatttgagggattttgctgataacatgccccggcagggatattggcttcctgtattgggtggctg

SEQ ID NO: 23723 - DNA, 896 bp, Glycine max
  Intron number 1 from transcript Glyma09g21550.1 (locus Gly ma09g21550) derived from phytozome v7.0 (chr-ID Gm09; pos 26460392 to 26461287)
gcaccgttgacgccacctctgccccggtttgttacagtcacacacgctgtttatcttattacgtcccttttccttatttattttttaaatttaattttgttatataactgtcactgatcctaggaaattttgcacacggttctctcttgaatcaatgggtttaggattgaagaagctgtttacattctttttttgttataactaggaggtgtaatcccctcccaccgggtcggcctatttttggggtaaagtggtggtagcccaagctggggatcgaacccctgaccttggataagggacccaattgccgaaccacttgtgtcaacaacttttggtttacattcttctttagaatgtgtttgggaacttatggagaaaggaataagaataaggtttagaatggtcattaatccttgtaaatatgtctaattttgggtttagtttttcatttttttgttggtttggtctttataaattttaaattttttttaaatagtttgatctaataaagcttttttctgatggactaaacactataatgtgccgtgttcgtatggactaaaaacatgtctaaaccaaaggcatatttctcagaaataaagagatttcagaacatgccacatattttcagataatagctgagtttgattgttggtagcgtccatcttgcgccaaagaccatttttgatatttttgaatatttggtaagtggatatttgtctgaaatgttatgctgtgtgtgtgtgaccatatagcgggacccagaatttaggcagccacagtgatacattttctaataacctatttaggggcgttggctgtgttgatgcgtttgaattagacagaaacttatttcaagtgatgctgaatggttgaatttttctttcaggaaattg

SEQ ID NO: 23724 - DNA, 771 bp, Glycine max
  Intron number 1 from transcript Glyma10g13810.1 (locus Gly ma10g13810) derived from phytozome v7.0 (chr-ID Gm10; pos 15669388 to 15670158)
actgaggtaaacgcgttaatcaccccaattttttatatcatagagttttcacgattattctgacgcactctttaattttcataacttattttcctgcactataattatatcaaagctttttatttcttgggcgttctgacccgttcataaccgaaattaccacccaagattcatgttcaaggttttgtctattatgaatttatgcgttatgatacttaaaccgaattaatgtaatttttttttgcttttctgataatttattccggaatcagaaggttggagtccaccaagtgcgtgtttagttcagcttattttggagaaatgatcgcatattttagttacaagagaaaccttttgaaaaaaaataagtgattcatttcttctgaagtaatctatgccaaacatgtactattagtgtctttggttcccgttttgaatgtgattttccacgtttcagatgtgattttcagaagctaacagttataggctaatagctttcacattctaaacctgattcctccatcttaaacaaatttccaagcacgctatatgtatctagaagaattgttgatgtgtgcatttagaccatcgttagagaaggatgcagaggtgcattattgagaagccgtgatatgtttaattttctgatatgtgaaagttaggtttgttagttgtgactaattgattgtttggacgcacttatttgttggcaggttttcttaattaactgtttttttcatggttttagtactgggtcagccagggcaacaa

SEQ ID NO: 23725 - DNA, 470 bp, Glycine max
  Intron number 3 from transcript Glyma10g03930.1 (locus Gly ma10g03930) derived from phytozome v7.0 (chr-ID Gm10; pos 2929778 to 2930247 reverse strand)
aacatcaatacaaagcctgaagtcactcgtatatccttttctttcttttcgcggaaacattcatcttcagtggcattggataactgcatatatgtagctatcaatatcaatcaaagtttgctttctaggccccgtttgaataaatttacccacaagcatttgtgagggaagaaatttcgaagtaaaaaggaaattatacatatgttaatacgtcggagttctttttatattagcttctctaaaagctgattttaacttatgagagaagtttgtttcatttctttccttcttatgtgcttatggagaaatttatccaaacagaggcctagtttctacagtccaccaatggtggtgataatgtcaaagcaatatgagttgtatattaagcttagttttgttgctaatgctcttccagcttccattacagttaatgctgatatcttgctgttcatttactttcagataagaaa

SEQ ID NO: 23726 - DNA, 694 bp, Glycine max
  Intron number 3 from transcript Glyma12g35330.1 (locus Gly ma12g35330) derived from phytozome v7.0 (chr-ID Gm12; pos 38444472 to 38445165 reverse strand)
gagacctttgccaacagcatttaaattattcactggttagtgttctccttcctagctttatttctttttctgggttgttgttgataagataatattaccttgggtctgatatctcattaagttatgtggttcatttaattttcacctaggacatagcttcttagggtagaattaaaatatatgcttgtgtattttcaaaaaacataagttcttacaatcagtaaaatgtgcttggttcacgaaagattttcctttcgggcttttgaactaagaaaaattgtttttccccctttagggtggggaagtgaagattagtcaatcttaaaccatgaatcaaataattctccttctaatacacaccaattgccaaatgactgatttatggcttaccatcatttccccactttcattgttattttatttagtttaaaatctattcattgacagtataaagaatttttatactgtcaaccaatctaaaatcatgttagggatgactttcaaggtagttattctaaaagtcgacaaatttataaatacatgataattttttattggttgacaacttaaaagccctacacaatttactctatttaaaagtcccatacactgttagtgcatataccatttactctatttactttgctttgtgatgatttttgttgaattatcgtacctacattgcaggttcagc

SEQ ID NO: 23727 - DNA, 561 bp, Glycine max
  Intron number 2 from transcript Glyma09g00360.1 (locus Gly ma09g00360) derived from phytozome v7.0 (chr-ID Gm09; pos 109271 to 109831)
gcaagataaggctgctggtttcttttcttcctccggtatctttcactaaatcgctgtgcttttttctcattcttttttactttgcttctgtttgaatagggaaatgtttcttggacacccaatacctagagaaagaaaaaataataaagaaaaatgatagatgtaataggtatttgatgtgacaaaaagaaagatagagacaaatgaagagtgtctaaaatattagggtgcccaaatatcactactggtttgaataaacttctccataaacacttagaaaataagaaagtaatagaagaaaaaatgaattgagcttcttccataagttaaattagcttatgtccaagttaaaattagattttggagaagctaaatgagagaaattctatgaattagcttatgcttaagctaattttaacttatggagaagcttaattcattttattttcctgtaagtgtttatttggaaattaatccaaatatagcctttctggtctctgtttgttcaaatatgagtttgatgtaggggtgaagcttaaagaagccaaggaatcagcagga

SEQ ID NO: 23728 - DNA, 531 bp, Glycine max
  Intron number 3 from transcript Glyma10g26890.1 (locus Gly ma10g26890) derived from phytozome v7.0 (chr-ID Gm10; pos 35381971 to 35382501 reverse strand)
cgctacaagctccttggtggactcgctgtgcgcaggtgtatattcattttttagttgataaaaatatgtaatttttttttaaattgtttcattgcgattcatgtcgttgtgaaaaactgtagaaaattgctgtcgcggtgactcaaaatcttcccagaaaaactttatactgcatccatagttgtattcctggagaccgtgttttaaaaccttgattgctagttgataaaacacaatttctattggtgacattgtttttatttgatttgacaatttattactgtgcgaaattaatcttgtgttgtttttcttcttgtatctatgtttgatttttattaataaagatgcgttgacatatgtttgttttgataaacaaaactttagtttttagacctaattgttcccatttaaaacatatttttaactagtaattgaacaaatactattgttcttttttccccctttgcacgaatgttatttttctgtgggtttgtgtttactttgtgtaaactttctgtttcagggcctgct

SEQ ID NO: 23729 - DNA, 825 bp, Glycine max
  Intron number 2 from transcript Glyma10g02680.1 (locus Gly ma10g02680) derived from phytozome v7.0 (chr-ID Gm10; pos 1909734 to 1910558 reverse strand)
gtgactactgcgacacctatttgacccacgattctgtaagttgtttccctcaccggtttcgttgctctttcgctttgagttagtttagtgtagtgaatttgcagcttttggttgtacaagtaaaatgcatttgaaaatagattattgtttcaatcatattcaaagccagctagaaagattcccgccccccagcaatagtaggtgcaattgcaaactgaatgtgaaggttccctttctcttgcgggattctcatgtgcagttggctagtggcccctttgttatggctctaattttgtacatgaaaccccccgaatcctcttttttttttttttttacttgagtaattgggggtttgaaactaatttgggataagaactgcttttaatggttcaggttctcgaaatgtaggaatttggaggattttgtaggaagtcaagccagggttttaaggaaagaggaaatttgtgattttctgatttttttgggtgaaaaataatgtttttattagtgagttttgagtgtaagagggtttaagatgatttaatctgttcaatttgtggagattttaagtagaaaaatgaggattataaggttttaggtaaaggaaaattgatggaaaggattttatcgtggcaattgaaaaatattgggggattaactttgataaaattattggaggaccaaattgcaagtaaataaacagtagaggaaccgaaagtgtacttaacgggtggttatcattaaggtttgttagccacactgggcatcaatacgttgctaatgttgtttgtgtgctattgcagccatctgttagaaagcagcaca

SEQ ID NO: 23730 - DNA, 791 bp, Glycine max
  Intron number 2 from transcript Glyma11g19120.1 (locus Gly ma11g19120) derived from phytozome v7.0 (chr-ID Gm11; pos 15761789 to 15762579)
gccgttgccacagaagctgattctacgtttttcaggtagatttataattttgttgtttaagcctctaattaagtgtgtgttttggatgaacttttacaaaatttattgaaaatgatgtgatttatgtttgtatgatgttattataacataagggcaatgattaaggaatcaaaagtggattttttttttttattggtaagtgtaagggtatattctcctatgatttccaatgcactctctcaataaaaaatttctatttatcgattcctaaccaatgccctaaagacactagttagcagtactcttattttaaaaacaatttagtggtaggactcaatatatttttttatccaaagcaaaatctacttaaatttaattctgctcaatcaattccttaacagggaaccaaacttgtgaacatttacttaaaatcacgataactgatatttcaatgtgattttggatcatccaatgtgaacccaaacactaagtttggtggatgaatgtgtgtgcatacggatgatttcacaccatcatcaacatcattatcgttaaaatttcaatttctgagtgccattgctttcattatatggatgattgtaactgatttactttccttcatctgttagggaatgcaaatttaacagttctgccttgagtccttgacagtgattttgtttgaaataaaaaaggttgtgaatgtgagtgctttggtgggcattttcttgcagcatgttttaacttttgaattcttcaccagtgtttcttcatcagacctggtttcaaagtgg

SEQ ID NO: 23731 - DNA, 473 bp, Glycine max
  Intron number 3 from transcript Glyma09g36860.1 (locus Gly ma09g36860) derived from phytozome v7.0 (chr-ID Gm09; pos 42451464 to 42451936)
ctgaggtacgtgcaattacaaagcagggcatgatgttgaataatatgaaaaccacaagaaaatcttccaagttgtttatgttttttataagacttgttttggaaataattttcaaaacttaatagattttggatcagaattttattattgaatagtattgatttgttttagaaaaatagctttttgtaactaaaatgtgagatgagaatcaaacaaactcttagtgtttttgtgtgtctagctaatctgactgccttgctcaccttagtgttttagctcacaaaaaattggactatagttcttgattgtctctgggtagctgtatttgaacatattgagaaaatgtagttatggtgattgagttggaaaattagcagattttgttagttcctcttcattctgtcttattgacccggtaagtcccatttatttctctagatatttagggaatcaactggtactgcttcagtaga

SEQ ID NO: 23732 - DNA, 873 bp, Glycine max
  Intron number 1 from transcript Glyma12g15370.1 (locus Gly ma12g15370) derived from phytozome v7.0 (chr-ID Gm12; pos 14166028 to 14166900 reverse strand)
ctttctttggtactatctaatgttcgtttttctctcttttctttctttctttcttccttttgcttgttaccaatttgaatcttggagtgaagatggagttgagtctgcgtgcaatgtagatgctatctttctctaggggcactctcaattttggagactagtttcgttttatggattccctttgaaattgcgatgctctctttaggcggtttctgaattctactgctgtttgttgtcattgaagtaatagtagatgtagatccttttattattatgcgaatgcgatagtaatttgaatcttgttgttgttggcggtactgatcaagttatagaaacgtattaatattaatgaatgaattgtattaaattgaaatctgaagctctctgtttccttatgcgcctaaaacatgtgaagtcggttgagtcccttcggggacatccgataaaattggaacgatatgtgaagtcggttgaggagagtatagttgagtgcggaaaagagaagagagtaagtagtcttggaggatagtcggttttgatggaaaatggaaagttatggatgagattaaataaaaaaatgaagatgcttgattgaagagagaatctttggtatactgaataaatggaataaatataaatagatgtacttttggagatgttagttttgttccaagatttgccttaggatgtgcaatgaaaaagatataagtactcattcaatgtttatgccttagtgtttgatactaaggtgaaagggcttcttcttgctttattgaattgtaaactaccaatttcgcatcaggatatatgcctataccttgttatttggtttatgcaggttacgtggcctccagcttgaagcagttggagctg

SEQ ID NO: 23733 - DNA, 799 bp, Glycine max
  Intron number 1 from transcript Glyma10g38940.3 (locus Gly ma10g38940) derived from phytozome v7.0 (chr-ID Gm10; pos 46674298 to 46675096 reverse strand)
gtttcttccgacaaggtattattaatccaactctcttgtttgtttcctgtgacaaactttttctctcttttcctttgttaatcagcaaattctaccttttaccttaaagatattatttcttctcttagctccgcttcgataatttattgtagatttcatcctgaataattatgttaatgatcgtagcctgttatttgaattcaacttggctatttgtttctgtttgtgggtatttttatgtttttatgtggaattcttgatagtttcgtgatttgttaccaagaaatttgtggaaagaacaggctccatgttacccgtaaaattcctaggagttttgagatggaatccttgaagtaacgagttaattatactgacacatcatgaagtttcgtcaaatttctctcagataccactcctttttaaatctactcctacgctaactctccttaattgtttgaaaaatataacgccatgtatctctatgctgactatcattgttcctactcctggagattttactttttgtctcatacggtattatagcattggtctggtgatatttctcaagccagttatctatttgaaacagattatttgctttccaattactagtatatatttgatcatgtgctcaaactatgtcaaatcagttagatgtgtactggtgctgctactttttcagttgtttagaggttatatgaattcttcattaagaaatcccaagaaataagaggatcttattttttttttaatcaaacgtcattttttcataggatccacgagaggaagtccttcaagc

SEQ ID NO: 23734 - DNA, 287 bp, Glycine max
  Intron number 1 from transcript Glyma11g04890.1 (locus Gly ma11g04890) derived from phytozome v7.0 (chr-ID Gm11; pos 3371756 to 3372042 reverse strand)
ggtcttgcagagaatcaggttaggaattaattctcgtcgcagcagcaatactattggggtgcatagtcaccttctattattattagtagtattataaataataagacaaaaaaaaactacagaaaagaaacaaagaagcagaatacactgtagacttttttgcgtaacatgaatcaaacttggacatgccatcttatcaagctttattgagtaatgtcctaataattaaggtggtggcctaatgaaattttgtctttttttcagctctctttcgatctcctagagtc

SEQ ID NO: 23735 - DNA, 542 bp, Glycine max
  Intron number 1 from transcript Glyma10g32340.1 (locus Gly ma10g32340) derived from phytozome v7.0 (chr-ID Gm10; pos 40824728 to 40825269)
actctccttaaagatcctgctaagccgccggctaagtaagtgtttttctcacttttcttttgtaattgaaagcctttgcatgcttctgttctctagtcttttctttcttgcatcaatagtgtgtttaatttgattccatatcccatacaagatttttcatgtttactaacaagtttactaagaagttaatagttgtaactttcatattacaaacgtatttctaacttctcaacgagtttcttagcatccaaagttgatgtactttgtaatttcttagtttgtattttttttatcagtaaatattaattattaatttttttgttaggaaagaatcaaatgaccttttctttttcctttctcttttatcactcatccaatcttataactactttataacttcttagtgattatctattatcaatgttataatatacagtttgcataaggtgtttgcaacatacatattagaaagtgaagattgatggggatttggaataaaattttcagggctcaagtggttggttggccaccagtgagatcat

SEQ ID NO: 23736 - DNA, 758 bp, Glycine max
  Intron number 3 from transcript Glyma11g11050.1 (locus Gly ma11g11050) derived from phytozome v7.0 (chr-ID Gm11; pos 7872654 to 7873411 reverse strand)
aattcgtaggaggactgtagttgatattgatctaggtaatgttatgctcccctttcacatgcctttttctcaccaggttgtgctgatgttgaacattgtgtttttagaagaagacaacagttgtcagataagataacctcatgagtcatgaccagtagacttgactcaactaaggtaatcaaaggctataatagaactcaagtggcagatatgatggaagtttgtttatagccaaagactggtaaccgtagacctatgtaaaagtgagagcgtgttaattaccagtgactatgaattagaccatgttttcccttcagtgcaaatatccacataatgtatttcggcagtgactcatctaactttccccgatgcttttctatgctgattgtgttacagggtcttgtactaatgctactgtatcccagtgatttaacttataaaagcagggtttagaagttgctaaagcaaattatagttaattcaaactttggattcaattttattaaggaaaaactgtgatcatatatatgatatcatgctgaatatcttgttcattctgctttaatggtctgttgtatgtgagtttactgcctcctcaaacattgggactttttgtgctcctcacatgttatctaaagttgtcttttttaaaaatggtttttgttctctatgattactgattataatggtggttaacttatctgccatttatgattgttgcagaagatcagactaggcgcaacaaacgccgaagagaa

SEQ ID NO: 23737 - DNA, 737 bp, Glycine max
  Intron number 1 from transcript Glyma11g11050.1 (locus Gly ma11g11050) derived from phytozome v7.0 (chr-ID Gm11; pos 7873774 to 7874510 reverse strand)
caaaccctacctttctccgcgtcgtttcgcaaccggtaagccccttagggtttcaatctctttctcagatcgctctctacttccccgtttttctttgtatcgattttcttttcaatcaccatacaacctagttttccagaaggactcgcctctgcttcaatcggtgttgtgctgttctgtttcctattttttgtttttattttttttagtttggtcaattctttatatatatatatatatatatatatatatatatatatatatatatatatatatatacattccgctgatgaattgacgattatgtgtgaatgattgggatcgggttacttcaagaagcttggctttatcgtgtgcaccagattaaacacgatttagttttatatatatatatatatatatatatatatatatatatatatatattattatctagcactgtgctgattgttgtaggtacgtagaaagttagtcacgtgagaaatagtgatggaaaatggaagtggttctctaattttctattcagttgtaaagcttgcacagattgtagtgctgacgttgtgtgttttaagttgtttaagtttttgaatttttctgttttatgattgtcttctaacattaaaagtttaccacttcacctaattgtttatgcctagaccttcttctaagagcaacgtttgtatgatattggatttttttcagactgcatcttggatacgggaacagtgtgccaatat

SEQ ID NO: 23738 - DNA, 734 bp, Glycine max
  Intron number 2 from transcript Glyma10g08380.1 (locus Gly ma10g08380) derived from phytozome v7.0 (chr-ID Gm10; pos 7216951 to 7217684)
gtctttgttacagtaggttcatgtacttttatccaattatatcttctgcaaatttaatcatgattttgcattatggattatctttttagttctggtctaaatgtttcaccataagacatgatttacatgctccattataatatcaaaatgtgtcaaggaccaactctcgtaaatgcgtaacctgttaagtgagggttcatggtgatttttatatctagcaagtcctatcatgctagagttctttgagcttgaagcgagccagctaagattttactcctaacaacttcttataagagggactgactctcttaaaagcttaagatgctgagtgaagagaaatgatttttatatctaatattttataagctaatagctcataatataataggaccacgatagttaaaggaaaaagggcattctataaaaaattgtttttattatgatgttgaagttaatttagcttggtacacaatgagatcaagtacaaatttggtttattgtgatatttctcttaagaggatgggagggaaagaaattgttaatgtatttaccattctggtttttgattattagttcccatttcagataaggaccagcagttcttgatatttgaaatcttcaaatatgtaaaactttcaaaatctggaacaggcatgcttgtagttcttgtaaattgttctttattggtatattttgctaaacttggaaattgaaattaactattgcaggctgga

SEQ ID NO: 23739 - DNA, 891 bp, Glycine max
  Intron number 1 from transcript Glyma09g33200.1 (locus Gly ma09g33200) derived from phytozome v7.0 (chr-ID Gm09; pos 39710180 to 39711070)
gagcaaaaccttcaaggtatgatcatcagtttatcttcattttctttttcatattgaagaacatgatcaactttaccatttatctccttttctgatggaatttttttacacattcatggcagaaaaatataaacgtatggcttgcattggtttcaacgttagattatatgtattataagcttttgatgatcaatttcatttccccatggaatctaatctttaaattatgcttgccttagagtgttatctaaaatgtatttatcggtaatcaggaaattcaagtagctagagaggtttaattaagagaaacatttgatcttgtgttatatgtactcaagctcaaggtttaattgttttgcatggattctgaaaatgattctctacgtgcttttatttccaaatctggacctcaactaatcaaaaactacatatgcacttcctctatcacttttcaaattgaattttcccaaaatccaatatgtttgactcaattcacattatgctatttttagccaatttgtggaatagaatttgcgacacagaatgactccaatttttgcccacttttcctgatagaatgcctttcagacaataattatgttgcacagcttcacttttcttattaaacatatacttatttgagaaattaggtatagtttgcattccttgaagttgtttcctatgattttaaaacttaacgatatgcttaccactatcctacatgcggatatagcgatggacgcttgtttactcactgttaattaaaatgtaaattaaaaatttgcttgaatcacatggagatgcccgtgtaagatcaacataacccacttgtatgtgcctttatacatgcatatagctggctaactaaaataaatgaacaaaactgcagat

SEQ ID NO: 23740 - DNA, 746 bp, Glycine max
  Intron number 1 from transcript Glyma10g29580.1 (locus Gly ma10g29580) derived from phytozome v7.0 (chr-ID Gm10; pos 38418838 to 38419583 reverse strand)
cgcgtgcctatcaccatcatcgacacctcttcccggtaccgaactttaactctctgatattttcatactcctgagatattccttagcgacggacgtgcgattcgttcgagtacgctagtgccttttctatttcaagttaggattcgagtggaacgttttgaatagcggtactgggttttgtttattgttgtgattcgagtagatttatttattattggagtttcggagttgatgtttcactttggagctagcctttgttcccgaatgttcttccttgaaagttgaaactaatttggctatttggtttttgagctgtttactgatcagttattgccaaattaaagtacaagtgcattttatatgcattgtaatctcttagaaatgcaattttatgcttatatattgattcagtttatttcgaaacttgttggtcatgggttcgaatccggaaacagcctctttgcatatgcaagggtaaggctgcgtacaacatccctcccccataccttcgcatagcgaagagcctctgggcaatggggtacgaagtttttattaatctctttttttttaaggaaaaaaaattcgtttctcaaaattaatcttcagctaagcatgcacaagttatcttttgctatgtgggatctgaatgtcttcatctgtccattctattatgtttattatttattgttgttgttgttgttgttaatgcagtgctgaggatagtgataaagttgctgaagaattgc

SEQ ID NO: 23741 - DNA, 486 bp, Glycine max
  Intron number 2 from transcript Glyma11g15200.1 (locus Gly ma11g15200) derived from phytozome v7.0 (chr-ID Gm11; pos 10892963 to 10893448 reverse strand)
cttgcttgctccttaaatttgccactggtggattggtaagacactttacatatattttgtccatgagaaatgttactaacatactttgtgacagtttttttttttatcgggaaatattaatttatagttttttttaggaggatcaaatttattaccttttcttccttagtcacttaacttatcttatctccgtactttctgatactcttgctatttgctaacacactctacacggttaactcaaatttgttagaaatcacattattaagtggaactcactccttattcaatggactttactcctgattttctaatttttaataaattttaatcggatacaagagactacataagaagtgtgttgctaggattactcgtttattcattctaaaatgaatcaagacatgctaattttagtgatattttttttttgtgtgcgcgctcattgcaggaaacatctgcgttctcattgtctcctggggtggg

SEQ ID NO: 23742 - DNA, 581 bp, Glycine max
  Intron number 1 from transcript Glyma12g12330.1 (locus Gly ma12g12330) derived from phytozome v7.0 (chr-ID Gm12; pos 10537675 to 10538255 reverse strand)
gtctcaaacgcgccgctctcgacctcaaagaaaccgtaccgattcctacccattatttcgttatttttaacttatattcggactttaatatattttttatttttaataaatatttgatttttatgtttgtggaattcataataaaataatatttttatttttaatattttatttttatcttttttgataaattaaaaaatttatatttatttttaataaattagtaaattttattttaatttgtattaacatcaaaataaatgaaaaatatttattacagaataaatataaaatttattaatttattagaactaaaaataagaattatggattaaaaataaaattattattttattagaggcaataataaaataaatataaaattaaatatttattaaaaataaaaaatatatttaagtctaatttttgttaataaatattaattattaattttttaataatgaaaaatttgaacttacagtttttcttttcttctccttctaacgcacgcatctacattctcacacgtgtgtggtttcgagtcagatagtgatagaaacgtgggggctgtccgggcagca

SEQ ID NO: 23743 - DNA, 1011 bp, Glycine max
  Intron number 1 from transcript Glyma09g03780.1 (locus Gly ma09g03780) derived from phytozome v7.0 (chr-ID Gm09; pos 2751453 to 2752463)
ttgcagtttggtttccaggaagttggacacttgaggttttgttctgtctctagctactcttgtaattacttttaggcaaaagtcttataatttatgttgcacctaaatgtctaactcaatcttaccaattctctttataagataaagattatctctcactgttgtactttattcccactgttatattttattttaatttgattaaagattatctcttattgttatacccgaaatgaaaaataaaaataaaaatcgtaaataaattcagagaatttttgttaacacctcagtcttataaaaaaccttataaacttttataagataaaagttgtatttcatttatatattttattttaactcgagactcaataattttataacaggaacggttaaactcaattatttgttgtagttattctttagttttctgttggcctctatcatatcaaggtactccaatattgtttgaaataattttattttttctatattactatgtgttgacctctatcatttggaggtactctaatattgtttgaaacaattttgtcttcttcatataacatgttactttgtatggagagtcaatactctttaattttctattgacctctatcatgtaaaggtattctaatattacttgaaataattttatcttttccatattactatatatcaaaagttaataaatttatgcagaactactcactcagttatttgttgttgttactcttcaattttttgttgacttctattatgtaaatgtactctaatacttttttattttgatttaagagttaataattttatgagaaactactaaactcaatcacttgttgtagttactcttcagtttgacctctatcatgagaaggtattataatactttattttgactatatcattgtgagatctctaaaaccaaaacaaaaaatcacatagaagatttttcaagtgttggtgtgcacttttgcagggccataaagagcacagtgagagggtttcctaggc

SEQ ID NO: 23744 - DNA, 1058 bp, Glycine max
  Intron number 1 from transcript Glyma10g43580.1 (locus Gly ma10g43580) derived from phytozome v7.0 (chr-ID Gm10; pos 50223116 to 50224173)
gcacagaacactctcagctcaacaggatcttgcaggtactttctttttattgtttgattatgagcctcaataagtttgttctcagtaccatttatctccaccaagagctctaaagctcaattggctgagcagcaagacgcggttattataaattcttttatatctgtgttcgatttctaccatttctacggataaagaaaaagcaccatttatctcctctccactatattcccattggtatcttgtcctgttggttgttaaatcaaagccttcacttataaggttttgaactctctttaccatttttctcagtaagatccatctaaatcatgtttcctggcattcaaactatatacctacctattaatttctttatttttgtctttgtgtgtttcaactatttaaaccagtctgtttctacaaatcagaaaatgacagcgcaaaaatatcaacaacaacctttccctgatatacaaggcacattggatttcaaatttgtaatcataaccaataagtatcttaatgatttatttcataaaatatttgaataattttataattaagaagatatagtattacttatatccttcattttaaagaattaattacaatttcatttgatttcaataatattatctcaatacatagagatattcatagtgacaattattttaaaatagaggaaatttctgaataagtaaagataccaagctggtcatttacaatgaaaaatcaaacctagttgattttttccttgcatttttgctttgacagcttttgtgtgccacataagcatagccttcaagttgtgcagtaaactttcaactattttgttggtttgttttattttcaaccaagagagacagataaatatttatggattgaatatatagcaaacatttctgaagctcatacaattaaatgcactcttgagattgacatattaaaaatttgcatttgtctcttaagatcaagcattctctgaagaaaatattgatgttttgattttgttttcttcattaggggttagattgggaaacatatactgtgacccattg

SEQ ID NO: 23745 - DNA, 640 bp, Glycine max; identical to SEQ ID NO: 17301
  Intron number 1 from transcript Glyma12g30680.1 (locus Gly ma12g30680) derived from phytozome v7.0 (chr-ID Gm12; pos 34326845 to 34327484)

SEQ ID NO: 23746 - DNA, 1020 bp, Glycine max
  Intron number 2 from transcript Glyma11g15130.2 (locus Gly ma11g15130) derived from phytozome v7.0 (chr-ID Gm11; pos 10831524 to 10832543 reverse strand)
aggaatattttcgcctgaaaaagttggagcaagtatttataattgttaactttcacttgattgattaggttgtgccttgaatactctctttcttttcacttaagttttgtgttgtccgttttgtgcctttgtaagggctgaatccctctcacaagtagtcaagttcacgttggattgtaatgtactaggacagtgctgtgtttgtttgtttctcattggaaattggaattaaggagctaatcatgcttttaattcttttttctttgggaattgggggtagtgttgacactcgaggaatctaattgtcgactagaaaataaaagattaacagttggtaatatgataagatatatgtacatgtataacaaactacggatttagaatcaaatccctgaattttctcatcaatagttgagatccttcaccttttcttttaaagtggaccctcacgttaggaaagtcaaattagtatatgacagccttcatgtaagtagatgtgaacatcactggtatattagggccatgtttgcaaataacttgcataaggacttttaggaaaatagctcgtgataaacgttcttatgccaaaagctaacttctaaatgagctacttggaaagcatgaatttcttaattagttaggaaactcaaacttgtaggccaagtcatagtaggtttgctttttatttgctttattatagacttggtgttaagtccatgagatttccagcaaattgcaatatacctggttgtgtaacacaatctcttgaatgtgagttggacttaactcaattccaatagttagttcatgagatgagaattgtccaagcctatttaattaatacctcccctcttgtttatatagaatattagaatgtgactatcctccgctatcctgtgtcattttgagtgagtgaaatagaaaaggacaactattttaaagatgcacagttatatgtgaaccatagttgaagtttttattgttttttttctgcagtctttgcaaaacaagggattttgg

SEQ ID NO: 23747 - DNA, 998 bp, Glycine max
  Intron number 1 from transcript Glyma09g05120.1 (locus Gly ma09g05120) derived from phytozome v7.0 (chr-ID Gm09; pos 3892491 to 3893488 reverse strand)
acgtacttcacgccagtaagtctctctctctctctctctctctctctctctctctctgtgtaggttcaaggtttttggttggaaaatttgggttaaaaaattgcgaaaaatttgttcctttaacattatttcgttctggggaaaccgaaaatgttagtgggtgccttggaaattaaggtagctaatgtgggttatcctgagactgcgttcttctacgttgtggtgtttgtgaatgtcactattcagtttaaagtttcacttttggaaatatttttgcacccacaatgtgttgggtaggcatgcttagttcagctgaaaatggggaagtgaaacattttgggggggaaataaaaatttacattttgcttgttagttgttacaatcaaattgttggacagtggaaactggagtgcaacacagtttcacttcaacctcactatttttgcccttccttgtttttaagaaattgtgcaagaatagaagcaataacccttggagtcacttggtatcagaaaatatctcttgtttactcctttaattacaaaatgtcactttattcttactttgtttcttgtttttaaaagcttgagtaagtaagaagttgtggaaatggaaaatgaaaccaaaaaacaatagaaagttgctttgttttaaaacaggaaacaaaatgaaaacaacgtgagagttttgtagttaaaagagaaatcagaaaatgaaatttaaatacattttctcaaaccaagctatccaagtgttctatcccactctatttgaattctgtattttttgtctggtatgtatggatataccattggattttgtctttttacttattgtagcaattattttatccatggggatttacctcatgttaatttgtgtgtttgcaatatgcatgcatagatattacttataattctggtgttttttgaggttttacaatgctactatgatagttcactgtggttgattgcactgttatttgttcttggcttaag

SEQ ID NO: 23748 - DNA, 1003 bp, Glycine max
  Intron number 1 from transcript Glyma10g05800.1 (locus Gly ma10g05800) derived from phytozome v7.0 (chr-ID Gm10; pos 4541992 to 4542994 reverse strand)
cctccttctgttgcttctagcacacttccatttgggtacgctaactatctgatattctacttacactttggtttttttttttttttttataacctattagaaagagatggatgacattaatttagatacattataagaataattcttaatcttcctacaaattcttccactctgatcttttatgcttccaaaacaataaatgtttttacttttcattcaatgtttatccaattatttagtaggaagatttagcattactcaaatatagtatgcattatggagttcatgagtttatttgcaaataattattatttaattactccaattatttactcaatcatggattttccatttcgattaattattccttcgcatttttaattatagtgatatagatgacaggtttgaagttgcactaatttttccttaattatacataaacacttacatgttatatacatattcaatttgacacacttgattgttttttatctttttttatattatatatcatttatcatatttatattttgtctcttttatcttttttctctatgtataattggacatactccatacactattttccattcttcatccataatatatggattaattaagggtcttactaaaccaatatcctttctcccaaggacagtggttaaaaaactaaaatgcaaaattatttaatgtaaaaatcattaaaaaaatacaaaaaataatcataaataacttaattatttttttatctttcgataaaaatatttctattttaaattctttaaccttagcatatttgtcattaattaatgatatataaagattcttacatatatcaaacacctcattaattctttcattttaatttatcatgcatatatatttctctgtttctcattcttggtgtcaaaatagtacgtaagcaaatcaatggattatttttctaattatatgttgtacatgtataggcgaaagccaagttgagttgaattactactctaaa

SEQ ID NO: 23749 - DNA, 697 bp, Glycine max
  Intron number 2 from transcript Glyma09g34100.3 (locus Gly ma09g34100) derived from phytozome v7.0 (chr-ID Gm09; pos 40533098 to 40533794)
ccgtcttcaccgctctcatccaggtacttttcgctcattctttcttgtcattcgggagacaaaacccttcattgaattcagaagatctcctagttgtttgttttcaaaacaattcttaacctcagtcgtagatttggatgattgttgactagtgtggagttgttttaggactaaaaactggaagggaagcaaatattcttcttaggccatttctgcatctgctgaatggaaggaagattcatgtttttccggataaccaaagctcaatgaatgaatttgggtatttgatttgcctctgatgtgtgtttactggaaatggaaagcggaatttgtttgcctttaacttatacaggctctaaaatttgcagtcataaaacactctattttgacctttttttagaggaggattgcaataagcaagcttgtcatagacgttctaggcttctagcttaactatatagtcatagagtgtggatccaggaagttcctccagaaatttgtaatcttggtgctttatttgatattcgtctagtttctagtttaacgatttcctccttcaacattagaagaaaaacgtactggtgaaatcatttattttttttgtgagggctcaaggttgtttagtgggtttatgttaaagttacatttgttgaaactcgtgttcttatttttttttgtctgtgaataggttgtttac

SEQ ID NO: 23750 - DNA, 858 bp, Glycine max
  Intron number 2 from transcript Glyma12g04200.1 (locus Gly ma12g04200) derived from phytozome v7.0 (chr-ID Gm12; pos 2744451 to 2745308 reverse strand)
ggaaacaatcaaactctacaggtacttcatcaattcatctctgtgcttgctgtgatgtttcaccacaaaattcttcaaacacttaataaatgtaaaggtgttattattattattattattattattattattattattattattattattcaaaaaaggaccaagaagttatttagtgattgagatgagcatagcttaggattttcagatgacagtaatgaatcttcatctctttatgaatatagcttggcatttcaagtatgaaacaacatttcgatatgtctgcaagtctttacagttcaagtatacctccactttgatcctaataagatggtaagcgttgattacttgaatcagtttaaccatggactttataaaacattcaccttagtctctgactttgtaaaatgttacaaaatatcattcacttaattcatttccactatactttgacttaagtgacccacgcttataattaaagcaattaaagggaaggtttattatcttattttgattatgtaagtaaagcttgttagactgaaggatgttcttttcagaataccagacatgtactcttagtttgaaactgaattccattttactatcttaattttgtcggaagactacaaacactgaccaaaatagttgcaattaaaaataaatttttgaagtactatgtacagcttctcctgctttgaaccgcctaaatttaaaccttaaactgagcaaacagacacaaattatgtgttcatactagtttgcatccatgctagattaaccgtttgcagtgcaaacacaactatattttatttccctcatatagggtcagagtttatatacagggaaagatctgagcaa

SEQ ID NO: 23751 - DNA, 395 bp, Glycine max
  Intron number 1 from transcript Glyma10g08310.1 (locus Gly ma10g08310) derived from phytozome v7.0 (chr-ID Gm10; pos 7135210 to 7135604)
ctctatttatttgacaaggtggtccaaaaaagactcaattgttcttcttctatgccttttccctgttgatattgccttcttctcttaagtgtcataattatatgtaccaaagcatttcataaatcaacacattcactaggaagcttgcatattcctttattttatttaattttattaaggtggttctgttcctttcttgttttcttcttaccttcttttcccttttgttcttctcaaaaaaatctcaatcaattacattcatataaatataatatacccctttggattgattcacttgcttgatacatcatagtttgttttgtgaaacaattaataacaattagtatctttttgtttcagggttaagtgcaggaggaaattttggtgatttgatt

SEQ ID NO: 23752 - DNA, 411 bp, Glycine max
  Intron number 2 from transcript Glyma12g07790.1 (locus Gly ma12g07790) derived from phytozome v7.0 (chr-ID Gm12; pos 5402042 to 5402452)
tgataaggaaaagattgttgggacggctgcaaactgtgagaggttattcgatgaaccctatcttatttctgtaggattgtttatgttgtagtgtttctgtaggtcttttcttcactttattattcaatatacatcaatgtatttgtataattatttatcaaaatgagaaatgctaacaaagcactctttactgttttgctgaaatttataagaactgttgaaatgatgtgagtcctactcataattttgagtttcttagcaaatttcaatgagatatatataaggaactctataaagtttttcttgttttgagaatgaaacaaaggaaaatatcagttactgaactttttgttccttagtccgttttttgtgtgcatttatctagatgatatttttcctgtagattggtga

SEQ ID NO: 23753 - DNA, 745 bp, Glycine max
  Intron number 1 from transcript Glyma12g33380.1 (locus Gly ma12g33380) derived from phytozome v7.0 (chr-ID Gm12; pos 36680054 to 36680798)
cggaaccataatcttcaccgctcgcaacgaacagggtacgatgatgtttctttttgtatcgactctgttaaacgttgcgcttttttgtgatgtgtgtttttttttttttaatttgcatatatttgatgtgttgaatttaaagtgtttaaaagactatgtatagtctttgactttttggtagctttattttgagtccttcaaattgcaaccacttgggacgtgaaaatttggagttttaataacgctttgtatctgctctacgtgtgtagaaaaaataattaggtaaagggtctttattacgtgtgaaaaaaattatgttattgcagtgacagtgtaaaagttgttcgattacgttgggaatagattaattttgaactcattgattttgtctggtttgagtgtaactcagattgaaacacggaaaccaggttcccgttggctatgtagattgtgcattaaacggtatccatgttattaattcaaatataacgtcaggtcaaggtttgttgtaaattgtggtcgtactcttacattttctcttccaagcaaatctttttcatgtgtattttgttgccacatcttttggctttgctgcaaatctaaatgttgtcattcttgcttgtttgcgaagaagatatcagattggtgaataattttgaagtggttaattttgaattagatgtttcattggttcacttttgtgttatagtggtgaataactcttttactttgtgcagtggaccat

SEQ ID NO: 23754 - DNA, 303 bp, Glycine max
  Intron number 2 from transcript Glyma10g07850.1 (locus Gly ma10g07850) derived from phytozome v7.0 (chr-ID Gm10; pos 6642316 to 6642618 reverse strand)
acatcaaggaaatcctcggctccggtatatttaattcttctcttccatccaaatcccttttttaattcttaattttttttaatcggttcaatcgaacaaatgactcatgctaattaattaggtttaggtttaggttgaaatttgcttgccccatttgtttttttttgtcattagtacgcaaattggtgaaaacggttcgttttatttagtttttgtatttgatttagttattttggggagaggttcttgaagataggattgagttttgtttttgtttttaatttgcagttggaatagaggcag

SEQ ID NO: 23755 - DNA, 803 bp, Glycine max
  Intron number 4 from transcript Glyma11g03380.1 (locus Gly ma11g03380) derived from phytozome v7.0 (chr-ID Gm11; pos 2230433 to 2231235)
ctccaagatcttgttaaggtatgctttccattatttgtgactgcagaaccactcagtagaataaagcttgttatttttgctgttgttgcatgctaatattaatctgcaaactgcaatatgtattatcttctaaaatgtccctgattttgtttctttcttttatgctctacttctacttgattgtttgtttggtgggataaatctctcaatagcaagagtcataagcataaatgttctgaattcattgaaaatgttgatattaaaaacaaaatctagaaatgtagttgaagggagcttatttaacacaattattatttgcaacttgcgagtttccctacaaatttagttactatttacagtaattagcaaaatctggagtgaaatgaaatagtaacagctaaaaagaagagtagctatcgcaaaagcaatagattctggttataactgttgaatttgatcaatgtcataggataataaataaattgtttatcattactaataaataattattatttgattatagaggaacagcaataattgctttacccaatcatttctgttgagtgaaaaaatcaagtaattttcttatctcagttgttgtggactgaggaaagttgtaagctttcctattgtcgaaattctttaggtactattgggcttgcatccagcatccttactttttgttcgacagttacataacatacacttatagttaaatttacacactgttaaccttctcttcatgttgctttgcttttgatttaaaagcttttcaagggactggaagcttttgatcgaaaacc

SEQ ID NO: 23756 - DNA, 717 bp, Glycine max
  Intron number 1 from transcript Glyma10g14870.1 (locus Gly ma10g14870) derived from phytozome v7.0 (chr-ID Gm10; pos 17268355 to 17269071)
gtatagaatataaaagtttttctaactagcgggacaaatccaactttctcagaagatggagagagtctataccatggatattaaaccactgaacagtgtaggaatgaatgactgctagtctttgagtagggaaaagaaaaaacaagaaagtagagagaacctttgtgtgagtgatgacttggtttgtacatgtgctgcaaatcatatgtgattagtgatgtcaagtgctgtccaaactctaaatgatgacttgacctttgtgtgagtgatgtataatggataagcaaaggtgtttggcaattagaaacatgcctctttctagagattcaataagaatttggaagaacaatttagtgaattgacactagaataatacaaatagtagcatgtctatgatcttaaggtttgggttctttaccaacaacagctattccttttaatcaaacttgtctgcttttatgtgtgatgtttggtcttcattcttttatgcttaataggaaccaactttattatttgagacatgcatttatcaaacttttgtagtacgtagaaaatctattatgttatcagctttacacactttctttcccgttatataattatcaagttcataaaaatattaaggaattattttaaaaatattttgagtctttattttgcattggctaatctaattatcctacaggaaaagggccgcccacttccaaaatttggtga

SEQ ID NO: 23757 - DNA, 349 bp, Glycine max
  Intron number 2 from transcript Glyma08g46910.2 (locus Gly ma08g46910) derived from phytozome v7.0 (chr-ID Gm08; pos 45889193 to 45889541 reverse strand)
tggggtggtggtttaaactttgatccgaggaactggtatgatttttttctctctttctggttcggttgtgaaagttggatttgattgtggttttttctttgttctgtgctgtttctgagaataagatggaattagaacgagatgaaaaggaaaaaagaatttgttaagaattgtcagagcaattcactgtggcaattaacaggtttaattgaacaagttaaaagtaataatagtatggaatttaatttaattacctgtattatgagttattcttgcatttaaggttccaaaaataaagatttccttctttgcaggcaagatctctagtctcttggaaattgggtttgtg

SEQ ID NO: 23758 - DNA, 926 bp, Glycine max
  Intron number 1 from transcript Glyma09g39390.1 (locus Gly ma09g39390) derived from phytozome v7.0 (chr-ID Gm09; pos 44493863 to 44494788 reverse strand)
tttctcaggtagtattcattactcactttccatgtttctctacttgttttttattacatgcatgattatgatttatgatccagtaatgagaatggttggtttggtgattggtctcttactaaatcagtcaatgtagctccatcccgatggattctactttcttgtgtttctgatcactcatatcatgccatgtgtacaacagattttcattttccctgtattatcctatttatttgtttcatcatctgccaagagtgaaaataattttggtatcgatttattaaggttttttctaccaaagaggttggtttggaaagctgcctggaattcttggtatagatattgagataattacagctgcaaaattgtgatttttgtcgtaaaactcagttattctgttttgaattttgttgaaaccattttattattcagctgtatgatgatactaaattactaagaatttaggggttgagaatagtgaaaacgcctagttcacaacatagtgaaaagattgaattcccactgagaaaggtaacctttagtatccaacagtttcagattgcctcagaagaagtaaatctatgagaaaccaaaaaaataaaaaaaatactaataaaacgtacacgcgtagaaaagaaaatgttgaagagataactatatttgagttttcactaatttttcctgtcagtttactaagttttatattttcttttaccttattctctcgcacaccacaaaatgatacaaaacttgaagaaaccattttgcagagtaacagagatttctaattttatttatttatttatttattttaccattttgcttattggaggatatattccggtactacttattcaattcttatctgaagtagaactattcatttttcagctcattgggaggactccactggtttatcttaacaa

SEQ ID NO: 23759 - DNA, 523 bp, Glycine max
  Intron number 2 from transcript Glyma11g33000.1 (locus Gly ma11g33000) derived from phytozome v7.0 (chr-ID Gm11; pos 34693464 to 34693986)
tgtgctgaagtgagtttgtttcatcattctattttataaaaaatattaaaattatttactcttattattgtttttgaatattagtattatcatgggataatggctagctgtaggatatttgatcctaatcctagaaatagaggactttgtttatggactatttagataaacttatttgtaagaattcatgagaagaaaataaataaaaaatgaatttttttacaagttaaaattagcttacgaacttacaaagttgccatggctatgtggagccttattttaaaaaaaaaaatggaatggagctttgatggcaaagtgcttcaatctccttttgcatgactttgcggtccacagtggatttaggaatctcgtcgtaaatttagaatttcagatcaataaattttcctttggtcctgaaagtgatcataatggatcttgcaaatgtgaagcagtatatgtattttaatttagactgtgcctttatgcagattattgaacagtttcaaaagtgtcatatagaaca

SEQ ID NO: 23760 - DNA, 941 bp, Glycine max
  Intron number 2 from transcript Glyma09g31790.1 (locus Gly ma09g31790) derived from phytozome v7.0 (chr-ID Gm09; pos 38419543 to 38420483 reverse strand)
tgccttggcttcgcctctttgatctccaggttagtgtttttgtgtgtgcgtgtgttaatcaagatacaaattccacaatcaaaattcatcaaaactataatggaaaaatcataaatatatattaattttattaagacaaaaatattcatttacaattaaaatttgatcatttatagtaaccttaagatgatgtctaacgtgaaccatgaatatgaatcatctttgatgaaccacactgtcttataatcatattataaccgttagatataatgtataatattcaaagactgagatttcgataccggttgacacttgagttaaaattattttttatttgacattgagtttacacaaatgcccttcaattaatcaatttggtatataatccatggtatccttctcttccctgaaccccaacaacaccttctttccttaaacaatgtctttaggactaaatatatttcaaatttttataaatgattaaattttattttagatttttaataaatttttatgttgtttgtagtctctaatatattaaaaaatttattttaaacagaaatgattttatttacaattaacttaaagataattcaacaatggccataaagatgttcataaaataaatgtaaagaatacttttcaaaatttacttttaatttttttttataaatgaatatgaaactaaaaaactaatttaaatttttaatatatccacttgataatatgtatttcaataactaattatgccttgtattttgttcttggcggtccacaattaaaagggattaacacgacgctcgaagaaaatcagtaaagagttgacaaaatgttagctgagatgattgaggagcatcaactagctcctccagcacaagggcaccttaaggatttcatttacacattactttaattaaaggaccaaccaatacatccccacg

SEQ ID NO: 23761 - DNA, 333 bp, Glycine max
  Intron number 1 from transcript Glyma11g13730.1 (locus Gly ma11g13730) derived from phytozome v7.0 (chr-ID Gm11; pos 9757263 to 9757595 reverse strand)
tggttttcagagtggaagcaaggtaataggttttaaatgcagttccttgtcttcttttttcttccatactgttttttactatgcatgcatctgttgtaggttgcactaggtgaattaggcttgcatagtatttttgtcaccaaatcaaaattcataggctttaatctaataatcgttgccccactaaaaaattgctagaacctcttctgagtggattaagattttcttccttaacacttcatttgagtttattgtctctaattctccgctcaattttattattcacccattttaacagtgttttctcccaagggaagctatccgtttgacatt

SEQ ID NO: 23762 - DNA, 962 bp, Glycine max
  Intron number 1 from transcript Glyma09g34730.1 (locus Gly ma09g34730) derived from phytozome v7.0 (chr-ID Gm09; pos 41039380 to 41040341 reverse strand)
gccgttaattccagagataagcattccagaacaccgtatcctcctcattttctctattaattaattcaattttttttatgtgaactcaacgcaatagaaaccctaattataagattatttcaatttgtcggtcttgttgttcttgatacagtactcttattcgatgggaaatagttgttactccatctaattttctcaacacagtagctggaattgaaaattacgttttgcaggttattataatgatatgattcattgcagcatctgtttcattcgttccttttttctacgcattgcatattttacccatcttgtttgaaccatccattttatgaaatcactgcatcataatcacccctgttagataaggcttacatgttcctgagaacagagattttcatgtatggaaagggtgatgttacttgtttaatctgaacccgtgttggtgccatcatacatctatccctatccctatgggcggttgaatgtttcttttgattgtattctaggctgaattggaacaaaaatttatgtgggtgaagtagtaactaggggtatgtttgatttacttctcactttttggcttaacaaatcatattctaaaacaatttcatgctattcaacaattaacttctcacacaacatcgattaagttttgaaaattgatttcaaaacagttaggatatgttttttttcatcctcttctattttatggtcataactcaaaggtataggtcatttggagtggtgctatatgcggttagacatgagcttggtgtgggtgtctgttttctttaaattttgttttgaagactaaaaacagtttttgaaaatagaaaacaaatatgcaccataggtttttcttgggaattctttctagcattgctttgccaccttgtttccttgactagcaaatttggaccatagtctacatttagcagcgttttctgggcaagcagagg

SEQ ID NO: 23763 - DNA, 959 bp, Glycine max
  Intron number 1 from transcript Glyma09g15860.1 (locus Gly ma09g15860) derived from phytozome v7.0 (chr-ID Gm09; pos 18850870 to 18851828)
ccttttgcagccaacgctgccaccaacgctccaaggttccttatctctagcgttttcataattcatgaacacacataaaaaagcaaaggagctaagtgcaatttaatttttcaaataagaaaggtgtgcaattatccctacgttagttaaactatttatttggtcctttatagttgtcctcattttttaaatgctagcaacacattagaagacactctttatcattattatctgacattgattgaaaatcacatattttcgttggttccacgtatttattacatgacgagtctctattacaattttgtaatttttaataaattttaagtttttaaccaatgttataatgtgttagagaatgtgccactagtactcttttagttttagtcattatgtaagtttaccaatggggttggctctaggaagagctagttttcctataacagtcaaattcaaattctcccaggaagatgtgactacatttagtaaccgaccgtactccaaataggattctctcagaaggaggctatatgtggaaaacaaattaaaaactgtaagtttgagtctttgcacagttattttgaagcaaattaacattgccaaaaagatttttcagtagctttacactactttaacttttatgcatgtgtaaagactaaaacccaccgttttcttgtatatggactaaaacttaaaacggggacaattatagggactaagtgaatagtttaaccttatccttattatctgtgatatgtcacatttaatatctgacttgtgcttgtaagtcataagtatgtttttaacttatggttctctcacgctttgtgtggtcaacttcaataactcatgttgtaaaatgtaatgtgggagttttgcagtgaacaaacgtgtccttttgcttctatgtggatctgtacttattttgagattttttttatgtatttagggatattacg

SEQ ID NO: 23764 - DNA, 698 bp, Glycine max
  Intron number 3 from transcript Glyma12g34780.1 (locus Gly ma12g34780) derived from phytozome v7.0 (chr-ID Gm12; pos 37928560 to 37929257 reverse strand)
tgtggattactgaggtgaaaccccaattctgattggtaaacaataccaaaaatacctaagaaactgcatctaagttttatcggttgattaatggattggggttttaacagtagttcttagtgttttgaaactctcagcttgttttcagttaatctgcctcattttgtgttgcatgttttttagttagaaaatgataagtttttggtgtttgggtgaaagcaatcagcttcaatgaaatgtggaagttggtgtttaaaaaaggtgtgattgtgacagtgtagcataacactttcagaattgtttaaaaaagatgtgattgtgacactgtagcataacgttttcagaattgtaaatagagataagtttaacctatgttaattagattagaaagctgcttggttatgttaaaaattttaattctaaagattctaaagatattgtaataccttcttggcttgctatttattgactgacattttgattcagggcttttatttgtttgatgtttcatattggcaccaattttgttcttcagtaggttaatattgcacagataaattgtttgtggcatgtgtagcttactggcagctcaattttctttctgtttgttgtttccctaagtcttcctatttgttgatcatataaaagatttttattgaaaaatatcagagttgcttttaactttttacattaggaga

SEQ ID NO: 23765 - DNA, 554 bp, Glycine max
  Intron number 1 from transcript Glyma12g05270.1 (locus Gly ma12g05270) derived from phytozome v7.0 (chr-ID Gm12; pos 3510756 to 3511309)
ccctactcaccatcaataggagcacctcaaacccggtatgcaatttcatgtttgtcatgattcaaaattgaatgttttgtattggataggagatgttctcagcaagattcatgagaatgatatgtttggtatttgacttggtttaaaaggctttaacactttctcttttctagtccctttcattatcatgtgctgtggtaattgcatcaattcagccatggggcattgcattagataatgacatctgacatagttagtgtgttatgtttgattgatagcactctattattgagactgtctattagataatcaattttttcatgtgttaatgatagcaaggaagaaccttaggccattttgtgattcattttaggtgactttcaactggtatacaatattccctggcaaaagttagaagaattccttgaagttttgatgatatgtatggtttctgctttgttatgatttcaaagctgaatgctcctgtagccacatattctttaacaaaattttggttagttctctattaattttgtgagtttatcagggcaaca

SEQ ID NO: 23766 - DNA, 768 bp, Glycine max
  Intron number 2 from transcript Glyma12g16290.1 (locus Gly ma12g16290) derived from phytozome v7.0 (chr-ID Gm12; pos 15466591 to 15467358 reverse strand)
ctgcttcgtgccacccttcaatctccaaggtaacttttttttttttaaatatgtaattacgatttttttagagtagatattcaatttaattcttaaaattaaggactgagttttgattaagtttgtgtgctgctgactgtgccaaatacttggagccaaagctttgcagtttatactttattcagttcgaacaagattgtctctggtagagaatatatatgatttcgtactgaaaacaaaaattaatccatggatttataaaattaaaggtgtgtttgggaaaacttgttttttgacaactaattgttttttttttgtgtgtgtgtgaattttttcttaaaaaatgattatgtcttcaaatttcaaaataggctaattaaaacacttagcctcgataaattcaggaggtgcagcacaagtgaaagatactgcaagtgtctatttctatgctgctatttttttattattataattatcgctattgttttaatgttaatgattagtgttcttgattggatattatattattgcaaatacgctatagatgggtgggggatttatgttatggtgcatcgggcattggtcttgagcttgaaatggtgaaaaggggaaagaggaaatggaaattttgttattgagtatgggtgggggttatttatgtgaagatatacgttggaagggaagattgggtttcaggattttgatggttggtgtgtgtgtgtgtgtggtgtaggtgctcgtggcagattcggataaattcaagaaccc

SEQ ID NO: 23767 - DNA, 695 bp, Glycine max
  Intron number 2 from transcript Glyma12g17680.2 (locus Gly ma12g17680) derived from phytozome v7.0 (chr-ID Gm12; pos 17869940 to 17870634 reverse strand)
gcaggcaagtttatttatgttaatttgattggaatatacaatttatatgattattcaatgataaattttcatataattcataattttgaatttttgtagtgcttaccttaaaaattatattaagggttcagagttagattattatgtaattggtttcaatctcatagttatagtgttgggatgctgaaagctacactatcagtctatcaatatactcctaaggaaacaccattaaagactaaagaaagttatgaagaagataaaagaataactgagatatttttcattgatgatgattcaaagcaacagtactcttttaaatacaaactaagacctagcatgaagtggactacaaagaatacccaatatatatagctgtgccactttaggaaaaataacaaataataaagttaaataataactaaggcccaaatggagatgcttggtcaacctcctatcaaatagccacttttcacaaggttatgttaaactttctcttcatggcgatcatattttgcaatggttcctgacacctcagaacctatttttgtcctcaatctctgttctttaaatctctgttcttccaatgaaatcatgtaacaagctacttaccaaagatgtttaagttgtttgtaaaaatttgctgtgtacatgagcaggtagctgagatattgccagaagaggttcttggcaaa

SEQ ID NO: 23768 - DNA, 914 bp, Glycine max
  Intron number 1 from transcript Glyma12g12530.1 (locus Gly ma12g12530) derived from phytozome v7.0 (chr-ID Gm12; pos 10765532 to 10766445 reverse strand)
ccctttggtcacgattctgattacccacctccgtggtaaaattgtcttttatttttcttccttttttttttttttttgtttttctagcttcttttttcgttgtgtggatgagtgagaaactttagacttcggttgacccgtggcaaataagatttgagcatagaaaaatgttttaaaaatacaatgatattattatttgatattatggtgctatttgattttttttattattattgttttgatattaaagcgttaaatggaagataatgttttaggaaaccagacgatttaattgtgaaagagagaattgtttatcgggggagttgtgtttgacattataatgttatacaatttgagaatataatttaaatgacttttgggaatacagttttgcattctgtccacttgcaagctgttaatggaattaagagaaccaggaaacatattaagtataagccggagttttggagcaggattcgggttctggcttaggatatggatatgtttaaggttttaaattgtggtttttgtaataatccttgatattgtggaaagtttattgtggtcgtagaaactccaacaactttgatgttagacgcagatgccattttttaaaaccttgatattcattttgtgaggtacactggttggtactttgtatgcttcaaatcttttgaagatgatttttattttttggtggtttggggggtggggtgttctcacactgattgcttatttttgtatactttttgagaaataatcgtgtccaaagtccaaacactgtatttccttctttgattcttctttacattattaagttttctgatctgtatgtatggacagattgttaacaaattgtttttttttttctgcaatcaggttcatttacacatttcttgggcttggagttgcgt

SEQ ID NO: 23769 - DNA, 882 bp, Glycine max
  Intron number 1 from transcript Glyma09g32320.1 (locus Gly ma09g32320) derived from phytozome v7.0 (chr-ID Gm09; pos 38864971 to 38865852)
ctcgtccttccctagtggttagagacacggttagtaatacgcttctgaaaaataattgcttttgttttggtaaactaaataacatgcacttaattaaactcatgatatgagacatgccaaagatcttccaccattcttaattagatattaatagtaatatagtaattcaaatgcttatacacatagtaaaagtatagagttttgtgtactgaaatagagaaattctatgctacactccaaaagagttttggtactattattgagaaattctctttctctcttttttttctctttcttgatgtaatcaaactcattttctaagggtattaaagagcaactctaaagaagaagaaaaaaatcttagtttgagatggaatataggaaaatatatagaaattaataataatgtaaagatgtaactgtccaaaatcttcttaaggcccatgttttttgacaaagctggaatctggagagtgaagaacacagtcttctaacataatattatactatattttgctataactagcactctcaaaagagtttgtgtcattgtcctctctcacttcattaattcaatgtaactcgtttgcatgcgcaacaaggtcagcatcccaaaaccttagaataatatggccttcatgagttcgagatcaacctttttttctctgcacacaaccactgtgtgtcagtattcacagacacaacactggaagaagcatgaaaagattattgtcattagtctccaccctcgtgtctacaatttcctaaaaagtttctcaagctatcactttttctccccactttttaatttttaatgtgatgatgatcgagatcttttttttttctcttcattttttgcaggtgcatatcttgcctcaacag

SEQ ID NO: 23770 - DNA, 609 bp, Glycine max
  Intron number 3 from transcript Glyma12g34200.1 (locus Gly ma12g34200) derived from phytozome v7.0 (chr-ID Gm12; pos 37382028 to 37382636)
ctacaaaacttataaacagtaaataatatataggctaaattaaatatataggatttggtttaaagttttaacacttaattcttctgatatttctaactcaaagaaaaatgatgccaaggaataataactttagtcaactcttcctttgaacaaaacatgtataggtattaaaagtgaaattatgatttaactgatttatacacatgtaaggttcatcttctttcttctgatatccaacaatatgcacgatacaaacaataaatattatgaagtttatttttttctatgcatgaagaaaatgatgttggctacggccttttgcatataaagtgattgcatgtacttaaggcaacaattaattgaaggtgaccaaaagtttctgtatgtattctttacatctccttttctataatctgcacgttgaatttattttggagtggtgaattatttttacgacctttgttggatcgaggacattaaattgcttgtacaatttctcttaagttattaatttactctctcattataatttttctaataaattgttatgccaaatctagatcaactattgaagcttttgcatcagtagtttcccccctggcagaaagc

SEQ ID NO: 23771 - DNA, 596 bp, Glycine max
  Intron number 1 from transcript Glyma12g01920.1 (locus Gly ma12g01920) derived from phytozome v7.0 (chr-ID Gm12; pos 1166919 to 1167514 reverse strand)
tattgggtctcggtcaagccgtaattcattcccttttccttagccaatattttttctgtgtttcgaattgctatgcataagtgaagaaaacttgtacaccctgtatgcattgctcttgttaacacatatgcatttaacaattgctgcatgtatgccgctgtttttagctcccttgtaagaatatactcgtttttttccctttgaatctgctaacattttaaatccctccttattcctgttttctgatgagtttctcgagttatgctgagtggtatgtcggaggttgtaatttagatgcagttcctaggtgctttgagtttgagcatcgttgtctaatcaggattaaattttcatctcaataatcagcataatcaacatttgcattgaaagtcagccataggttaatgaggtgaaactccaattctattaggaaaatgacacccaaaaactgtacataagttttgtcccatgtcatgtataccttcatcatgttgctatggacatgtttttctctttttctgttgtccgagaatagctatgaatcttaaaggctttttttgtttttttggaaattcttttaggtagacttctctggc

SEQ ID NO: 23772 - DNA, 844 bp, Glycine max
  Intron number 1 from transcript Glyma10g41220.1 (locus Gly ma10g41220) derived from phytozome v7.0 (chr-ID Gm10; pos 48358755 to 48359598 reverse strand)
gctactttcgccgttgttgaattctttgcccattggttagtagttatgatttctattaagttgttgtattttatgtgtttctggtcgtagaattgtttgaactctcttctgggtgttataaagttcgggtttttgtggattttactttaagggtaggagtgctttttatttgtttttttgttctgggttatttgatggaaaggagggatgccctttgatctgcaaattggatctgcagtaatagtagtgaagggcgatggattcatgatgtatattaatggaagggttttggaaatttggttgattggtttgttgagtttgctttttacagagaggtggtgttttctattgttactagtagtccagttaaggtaagtggagctgtagagaaacagtcaggggagctcatggtttgtttgtgcaattgatgctatgagtagtaaagggttaaaaaaaggcataatacagtgtggtatagtatcaactatcaaggcttcaattgaaaatggtctttttttgttccattcactttgtttcctcctctttcatacctctatgagttaatttgaataaactcataggagagtataatgaatccaacttctcaaataggttgaaaatttaaaatcaatttggtgcatgtttgatcaaagattatttcaatatttctagaaaataatattttatttcccaaaagctctctttgaaaactggcaaaaatgtgggattatttctctgaaataaaattaatatacacctcaacttataagaaattctcatttctgttgtgaccctttcttctctgacaggtgccctgcgtgcagaaattataaggtattatttg

SEQ ID NO: 23773 - DNA, 919 bp, Glycine max
  Intron number 1 from transcript Glyma12g32820.1 (locus Gly ma12g32820) derived from phytozome v7.0 (chr-ID Gm12; pos 36225842 to 36226760)
ggaacaaaattgagtccagacccgctttgtccaaggtattgtttttttctcaatttgttttgttttgatagatttgtcctgtcggggtgccggaaaatgtgtggggtaattaaaaaaaagtttttttaattattaaattttgaatttttaactcaggcttttgaggggttcaagtcttaaggttggggggggggggggggggtctgtgaacgagtgattggtgtggcttgtttttgttaatatggtgctgggaactgattttgggattgtgtgttgtgtcgtatgtatttaggagattgtgtgaattggctttttacaatactttgttttggatttttaaattttttcttttcttccgttttttgtacgggaggtgaaggagtgagttgaatgtttttacatcaatcagaactcgaatgcctaataatttggaatagcagtgttatgctagatctgatgttttaaaatgctgattttattagatatcaacagattcaacacttgcacaattcatttttatttagtctaagatggctcactggcattgatttttgcaagttcgagtaatgtttataattactgcaattgtatggagagcgtaaatcttgttttgcaatagggagaatagtgatttttctagatgttgctcttgttgtaagttatgtcacatacacttcatatccttattacagagaaaaaccacagttccttataaagatatttattataaaaaaattcctaatattagatcggtaacagaatggtcaagtttttccagaaaggatcatgcatggatcataaaaacaatacttgaatttgattaagttactataatgctgcttggggtgtagattggatcccttgcgtccttttttagctaacaataacttatatcctgttgtgcagaaaacttacaggc

SEQ ID NO: 23774 - DNA, 807 bp, Glycine max; identical to SEQ ID NO: 18573
  Intron number 2 from transcript Glyma10g02950.2 (locus Gly ma10g02950) derived from phytozome v7.0 (chr-ID Gm10; pos 2134145 to 2134951)

SEQ ID NO: 23775 - DNA, 952 bp, Glycine max
  Intron number 1 from transcript Glyma09g38070.1 (locus Gly ma09g38070) derived from phytozome v7.0 (chr-ID Gm09; pos 43543199 to 43544150)
acttgtaagtatctcaatgtgatcaagataatggttaattttgttttcttttttaaatctgataccctttaagtctatgataatcaatgatgaattgtaatgttcagtcctctttgaaatttctgtgagatattcctttgatgaggtgaagttaattgacttggaagagcaaatttgagacaagtctgggtgttcttgaatttctcattaagaaattgttgtgattattagatacatgtgaatcaactaacatggtgaggtatggttggcaaataatcatgacgcttaagtatgtgatcaggttcgatcctcagagttgtatataatgaacaacatttgttggaagaggttaaatccttaaataaatatctgtaatcgaaagattagtccctggttaaaccaaatcagagaaaagcaggagaattgctctgccattcctgtgtttggagattggcgtttctcctagttaactgtgaagtatttcattcataggagaaaaataaaataaagtctcagtaaaacccagatcttgcatgtttagtttctccctgttaaatttgttggctttcattttctaccataataatgatctggtatatagttgtaaattgaaaacgaccatgcttcttaaaagaatatagtcttgcttgtgaataatactatgtacaggctggccttacattggaaagagacaacccacccatgtgaccccaccactttattgcatgtacgcagcagctaacttttaaaaacaatcataatcttcctgaaaaattatgtctctacacaaatctatgatcgaatttagcacaagacacaaaaggaaatgccaaaactcttaaatgattattggcttgcttgtttaaaaacttaattttttttacatgctattcagcaaattcctttggtgttaacttttctgtctctcttgaaatcattaggtactacaaca

SEQ ID NO: 23776 - DNA, 883 bp, Glycine max
  Intron number 1 from transcript Glyma09g38570.1 (locus Gly ma09g38570) derived from phytozome v7.0 (chr-ID Gm09; pos 43910929 to 43911811)
aatctgactttaatagggagcttggcgtctttcaggtatgtctttttcttctttttttttgataaaatgtttcaggtatgtctttctctctgaaaattattgacttgttcaagtaatatgctttttgatgtcctttttaacgagaggaaattgttattttttaatcggcaaggcaaatgttagttagtttgttaatttggttagaaatatcagtttgaaagattgggaacttttcccaacccttctccctttacctttcccaaccactgagtagtggaggcttggttttgtgatgtaatttgtatactatatggtgttgatttttagatctatcactctttttcttatcctcatcaatgtccctttaatcgaaagtagtacctcaacaataacagaaaaaaaaaaaagatcttttcctttaaaataaatttttctgatatttcatttttcaaaataaaatcagacctgctttatcgcaatttcttacttaattattactttgtcgttaattcctaattgctaaatgctgataaatagtcctaacactttttccttgcaaaatcttatggttttggacaagtattaagaaaatcatagcatttggctcactggctagttatattccgttcttacctatgccataacttcaccatattgactaaatataagttgaaatatatcttagtttgctctaccattactcaatcataggatataactattttgctttttgtttaaaattgtgtcaacaaggagagaatagaagaagaaaaaaaaaaagagacctgattggtaggattgtatacttgatctaggatctgtttctttaagagttagttaattagagacattttgcagttgactgcagaactcatatctgtga

SEQ ID NO: 23777 - DNA, 652 bp, Glycine max
  Intron number 2 from transcript Glyma11g09490.1 (locus Gly ma11g09490) derived from phytozome v7.0 (chr-ID Gm11; pos 6770339 to 6770990)
ctggggcctctcgctctgctgcttctttgattcaggtgatgcaagttttttagtgtatgaagaatttgcaatgtctttgaagtttaaatctttttgtttagaattaaatagcgttggacaagccagttgagtgttgtgaagaatctgtagcttacatgatgattcgattttggtttttctggtgtgagggtgagtacaaaagttaaatgaatactatgcatattgaaattaagtatatataagtataataatgatctgtgtaaagtgattgttctaacctacccttcagtggttcttttttcatctgcttcaatagcacgttatggtggagtagtcttagaccactatgggattcaaatagcggagcagttttcaattgtggccattgtggcttttcgcatgctatagtggtgttaccatgatataaccttcaaaaacccatttttcccctggaacacagttgtttataccatttagtttgtgttatataccatttaaaataacagtcatcctgcatcctactttctcactatagtgtttttagagttgattgctatgtttcgctatctgaggttgataactatgattgaaagtttgaactgattttttcttcgcaggcttctaccaggagctgtttctttgctggttttgc

SEQ ID NO: 23778 - DNA, 767 bp, Glycine max
  Intron number 1 from transcript Glyma10g11000.1 (locus Gly ma10g11000) derived from phytozome v7.0 (chr-ID Gm10; pos 10933310 to 10934076 reverse strand)
tccccagcactaaaaacaactcttgcattctcgaggtattgtcttctgctttttctgcccctatggtttttctaactagtagtaataaaaagaaatggataaattcaacgatacatcttcctgtacgatttgtctataaatatactatcatcaaatattcctattcctattccatttataatttaattaatatatttttcttgtcataaattattactcctcgtactctaggagtacataactattatatgatgaaataacttcttccctcctaatcttcctctttgaaaataaaaacaaaacatacccaatagtacttctggtatattatatgcctttcctaacatataagttttcatgaactattatattatataaaacttatattagatatattacttaattactatatatctaatatgagagttgctataatatatacccagtaaaatttaagcgttttgataagttgttttttgaattaatagttaaatgagtatgaacacatacatcaatagcaagagagaaagagagaaattcttaataacaaaaattcctaaattaatttcaaagtgtttgatagaatttctcatttttttttataaacaaagattttaattaaaaaaatgagtataagaggtaatctaatccaacgaatttcgcatctatatcctttgcttaatgatgttttatggtcaaattacccacgtaaaacaaaattgttacattttttttatttctcattctttggcaaacagtgggtgact

SEQ ID NO: 23779 - DNA, 837 bp, Glycine max
  Intron number 3 from transcript Glyma09g40650.1 (locus Gly ma09g40650) derived from phytozome v7.0 (chr-ID Gm09; pos 45528584 to 45529420 reverse strand)
gttccgagggagtttggaaaatcacttattccgaagtacggcgagttttgctcttttgaaacaaattttttgttggtttgaatgtttgctttaggatggaatgaatttggatctgagggaagagaggttcttaaagaatgagtaatctaattaggttatgtttggataaatttctcaacaagtacttgtaagaaaagagaataaaaagtaaaatgaatcaaacttctttcgtaagttagaatctaagccactgagttagtgcattactctctgaatgcatttgaatttctaccaaggaagtggatgtttggttgcactggttctgggtgggttaaacgtgctataaattgatttgcgtggcaattcttctttaaatttaactgttgaaaatggcctaatttctgcctgttctagagtggagatgattactgttgtttcctcatttcaagataatagcattacatctaatgatagacacatgcagtatttgatcagtgttgatttagaatctggatggaaatatgaggttactgatctgcttcaatatatttgataatgttttatatgttcaatctgtggttaaacatattgtcacttgaaatagtatctcttctaactttatctggtttttggtaaaaaaaaaaaaactattgttttccttcataactaaagacaaatcatcttgaacaataaattctgattttttgttcattattagttgtgaaaaaaaaatgctaatgctgacagttatgaagctaagattttgttcttcgggtgttttttcaacttgttgatatgacctttcctgatgcttccagaggcaactgtccctttatc

SEQ ID NO: 23780 - DNA, 790 bp, Glycine max
  Intron number 2 from transcript Glyma11g02400.1 (locus Gly ma11g02400) derived from phytozome v7.0 (chr-ID Gm11; pos 1530222 to 1531011)
gggtcgttggcaacaggtttgaatcacactgccgacacaattaattcagctagctagctagcactaccaggcatttttgaattatgatcagtccattttttcattgtttgctcttcttgcattttctgtcctagttgtacatgtctttcttctttcaatgttgacccgacttatatagccatcaaccctgtagattttccaaattaattagtatgaggatggttggaagtatgataaataatgtttgaaatttggaacataatcaagttaattaattttgatggttaatatctatatatagaatgcaaagaaagcatctagaaatggaattgagacttttataacactagttattcaactcaatagtcagtattgtaaaaacaaaccataggaattagtcctaattagataaactatagttattaatgaagcgatctgaagaagaaggagcaatcagcctcggagctacagtttttggagaagttatgcaggcaattttgtcagttgaaatttacttgtccgttttcagtgtgtgtgcactcccagcctctcatgtcgacattcgtcatcatactttatttcttgaaatcctttacaaaagcaactatattgttatcttattattctattcttgccacgtttttctcgacacatatgcttccaatttacgattttatgcgagacatcataattaagaagatactttttttttataatttaaacattaaaatatagatatgtacgtactcaattaattaattatatatgttcttgtgtttgggaaatgcag

SEQ ID NO: 23781 - DNA, 454 bp, Glycine max
  Intron number 1 from transcript Glyma09g39610.3 (locus Gly ma09g39610) derived from phytozome v7.0 (chr-ID Gm09; pos 44642791 to 44643244)
gttctactttcccatcaagatctcaggtaatttatctgtcaagatgtaagttaaaattttctgcttgtgaaactaatctttcgttgaattttgtgacttttggtctgcatctgcaggcattatatgtggtttccccatgactaggaggactatggcctgatcattttgtttttttgttacccctgcagttacactttgaaaattccttatcaacatttgttttggaaggctctcttgctgaaaaaatatattttattttatctataatgtagacattaactcttggtacttgttgtgtagttgggttcttggtttcgtcatatttaaatgtcttattatagttgtgcatctgcatatttgagttctgacaattctcagaaaaactcccacattggaaccttttcttctcaaccttacagggtcaaaagccagctggtggtaattctacaattgt

SEQ ID NO: 23782 - DNA, 958 bp, Glycine max
  Intron number 1 from transcript Glyma11g31680.1 (locus Gly ma11g31680) derived from phytozome v7.0 (chr-ID Gm11; pos 33023232 to 33024189 reverse strand)
tcttaaccccctcttcctctcctctccttcttcaggtactcactccctccaattcccctttttatttgctcattcttataattttcttttattaatgtatccaggacgtgtcagtatccttaatttcaaaaaaattgtcgtattattcctgtgtcgtgttgtttcctgtatctaggcttcgtaggttcttagatatcataaaattctgcctttgcgccttcctttctcatttggtgttaggatttattgattacaactatgaaaggaactttcgggatattcaaaatctatttaccttttttatatgcaaaatatgattgaagaattctaaggcttgattcgggaaagtgtcttctgattttatttttactaatttagacaagagtttattaaccatgtactgtcagttactcagtttttacactgtccaccaatcatctcgtattcacgttgttttgtgtttttaaggacttatacaagagttggcaaaaacaattacatgacttcagaagttggaaataaagtgaaaataatgcagtatttttgtaattatttgtgaaaatacgaaatatgttttcaaaccattgtggtacgcgagttgttggaaacatcctgacactgtctttgattcctagggataaaaaaaaatgcttggttctcttttaagtaaggtctctaatttaagtcttatttgtgttttcagactgtgttgtggatttcagctcaaataagattgttttccattggtgatatgtgtaattttagccatagaaaataaatcgtagtctttaatctgataagcctcttgttagatcaagtgcggaaatcaaatcatattctaacattgcctttgaggttgttgtatgtgaatgaaatctgtttcctaattgtacccattatcctttgaaatatagtagtcaaattgacttcacttctggacttcttcatgttacagaat

SEQ ID NO: 23783 - DNA, 792 bp, Glycine max
  Intron number 1 from transcript Glyma10g33510.1 (locus Gly ma10g33510) derived from phytozome v7.0 (chr-ID Gm10; pos 41858102 to 41858893)
gaggccaatcctactcctctctccttgatctcaaggtcagttcatgtcaaatcagggttccgattctccgttctttttccgtttcttaacaacattgatttttgtacttcactcaaatttttgtccacgtgacagatttggtgtttgtttagctgaaatactttttgctcctcaaattcggaatagtttggaatagtttaaagtggattttaaagcaaccgcgctttcgatttttctttattttaatatattctgttgaaattgatcaagcaggatgttatcagtttgttcaattagtttgtagttaatattatcgagtggaattgttgaatgtttgtaggtttcagttgttgttagttaatattatgttgcatgaaactgtaaaagtattggctattggtatactccctccggtctcaaatattaaaaaaaaaaaccgattgacgttgatcacattttattgcaccaatctcaattaaaaattatttttttctaaactcatctttcattggaatttgtataaggaataaaaaggagtcattgtaactaaaacctcaattaaatgaatggtattttagaaatagtaacattaaatgagctaaaattagttgaaattttcttacatttcagatcaagaaaaaattattttttttcttcttatatttgagactggagggagtatgtttagcttatctgtttttatacaaatacaaattggagaacatatgaggttatggcttttttgttttgtttccagcaacttgtttcagaaaaagatctgatagtaaggga

SEQ ID NO: 23784 - DNA, 679 bp, Glycine max
  Intron number 1 from transcript Glyma10g07690.1 (locus Gly ma10g07690) derived from phytozome v7.0 (chr-ID Gm10; pos 6434407 to 6435085)
gggaccaggtatttctcctcttgatactaacactcccctccattatatgcaatacttattctcatcgaatgttgtatgatatatgaatttaattcgaacatactaatattgtaaatttttaaagtttcatttaagtatagtttgctatatatggtaattaaagattttttttattgtttttcataaattgtgaaaagggaggagagatcttattgtcaattaatttttttaatgaagattaattattaataaaataggtatatagtccatactaataaatgggaataaaaaaatatgataagatgttgattttttttatatatatacattgatttctaaaataattattttaagagtcttgtacataaggtgatttctaattattcaaaatatatcatatgtaaccactagggtcggtctaataatgagaatttgggataatatcatgaggtcctaagtcttgtatatgtttattattttatatggctgattttatgacacgatggatttgttttgttggtagtgtatggtgatttcattaatttttaggattatatttatagaacgattcaacatttcaacgcatgaaaatgtaaatcttttcatttattttattcgttgtgactaggttggtattgtaaatatgttgttcttattttgaaggttgcaattcactact

SEQ ID NO: 23785 - DNA, 577 bp, Glycine max
  Intron number 1 from transcript Glyma11g03030.1 (locus Gly ma11g03030) derived from phytozome v7.0 (chr-ID Gm11; pos 1992878 to 1993454)
atccaggttttgataatgtttctcttgtcacatgcgtatcatgtgaattaaggagcttacattgcgggggaagaaatggaattagaaaagttataaatgcagaattacaaaacattccaaataaagtgattggcaaaaaaaaagtaaagtcacaattttctaatcaaaacacatttgttgggcatgtatggaggggtaatgcatatccctccagcccagtccctcccttctgctgtttagtttacttccaatggtgaaccaccttctcaatccatcaaatcgcagaaattcaaaatggcaaaacatacccttaattagcaaaattttcttgtagtgtgtccagatgatcatgacttcagcaatgatagtggagcaaggaatagggtgttgatcacatactcaaaaacatttcatagatgcatgtacatctctattaacataaatatatgcatgtgagcttttttcttttcatttttcttttgcattaagatttaatttttttcctattttgatttctgactttgttttaaaccttttgttagagagctcaggttacaagtttaaagaaaacattaat

SEQ ID NO: 23786 - DNA, 609 bp, Glycine max
  Intron number 2 from transcript Glyma12g30530.1 (locus Gly ma12g30530) derived from phytozome v7.0 (chr-ID Gm12; pos 34156388 to 34156996 reverse strand)
ccttaggtgcttacttctcttactgtttttaatatatttttttgcatttgatttagtttttggacaaaaatttggatgcaattaagtttttttggtactgttttctgaatagaattagatttcactcttgttatctgagttttactgctactgcagctttatctcatttgtctttgatcatgcttaccgtgttatagaccgtagtgtggtaattctatgtattagtatgtgtcttgttggatttgatttgactggtggaaaagtacaaactgttctattatgttgccatcttcagttttcattcttgggagctctgtggagcacatggctgccttattgtttagagtctaaaagcactggaggcatgttttgcgtgcttttgatgagtaggttgagtgttgtagaacaatttcgaagcaactaaatgtgttgtttaatccgttgactaatttttatagaggacattacatctgttatcttcacctaattgtagcattcttttaatatgccccagtgctgttctatttatgagattttttttatattagaaaaagatattaattggaatatgtaatttctttttcaggtgcagtgattggagtttgcttg

SEQ ID NO: 23787 - DNA, 863 bp, Glycine max
  Intron number 2 from transcript Glyma11g03100.1 (locus Gly ma11g03100) derived from phytozome v7.0 (chr-ID Gm11; pos 2033231 to 2034093)
ccctgccacccgatccttcctctgcctcgacccaggtattttttattctttgataccacaattcaaaaaaaataaaaaaaaataaagtgtttggtaccggcaactaacccaggaatagttgtttttcaattagaattagagtttccttacctccgtaaaattccaattctaattagagaaagcaccgacaatactgcgtttgtacaatatgacaatgacaattaattcaaattgccacagatctcgttttgggtctgtcctaataaaatagtagacacttgtagtttgcactttgcactcactatatatagtccagcaacatcgtcaatttcgactttgcacattttaatcttaatcaatccagcatggcctgattataacctagggctgccaatggagcggctaagatctctatttgtctactgcactacagtactagatgcatgaaatcttttagctcagagagtggccggaggataattcagatatcaaaagagtgacaatggattagttgaaattgttcatggttgccatccttaactgtttacatgatattatatgtagttcctctttgtttcatatgttaaagtagttgctcacctggtctagacttttacagtttacttaatcagattttttttaaatgctagcaattgagtgaaattcatgtgcaagtgcaacctactaaatcatttaggttccacttcctatttgatgacactcataaaatttccccaacaaaaaaaaaagtgtgttaaaattcatgtaatcaagtttgacttctgaaatttctgccacgcacataatcaaaacaaaataacgtagggcatcttcatttttggttattttgtttctttcctcag

SEQ ID NO: 23788 - DNA, 509 bp, Glycine max
  Intron number 2 from transcript Glyma10g30190.4 (locus Gly ma10g30190) derived from phytozome v7.0 (chr-ID Gm10; pos 38889387 to 38889895 reverse strand)
ctgctacttctagtaaattttttcataattctcgcttttgcatctagtaaaaaactgttcctcttcaattgttgtctatgcaatgtaatatttgtcaattcgtcactcacttgaggcaaaagagatcgtgctttgactatggatgaaaaaccagattgaatgtttacattaacgacgtataaataattgaacaaattccaaacgcaaaataccatctaattttttgaatccaaattccaagtgcatatttttgcttcaaaatttgatcctaagtctcgttatttttaaattatacaccaattccaatttgctcttgtagctcactgaatagaatatctgaaccgaagattatttgttttccaaattcgttttcttccttgccctttttgtagttatccaccatagaatccgttttccttattgaacatgttcttctgtagattaccttatttgtgttattttctcttgttataccagctgcagaggatagagaaaacaagttcctaact

SEQ ID NO: 23789 - DNA, 717 bp, Glycine max
  Intron number 2 from transcript Glyma12g04430.1 (locus Gly ma12g04430) derived from phytozome v7.0 (chr-ID Gm12; pos 2917732 to 2918448)
gcaacttttcatttcaaagattaagtgaaaacgtaacacttcttgtctccttacagtcccctagttacatatttaaggaattgtttgatttgcttgactatttaacattattatttgattttttttaactaatttattttacttatcacttttttttcatagtttttatactatattcatattgtagctactccaattttgttatacatatgtacttttaaaccatgatctagaattgcagcctgaaggaacctcctaatatattttgatctgctttaaaattgcaatcttgtataatattttccttcttgcttgtggtaacattctagcttgaatttgcttcaagattactggtaattttggatcttctatgtttttgtttacctaaattttagctacataactttgaatttttaatgtaatcctaaattagtggcggcctggtttgtctaagcaatttgctcgtcagatgctagttgggtgttgcttagatcgtgggggtgggattgggtttagacacagaggtcacaggctcagtcccttttgtaaaatgagaaaaatatagcctttttgactaaggaaaaggaagaattcacttgggaatgagaatggtatgctctctttctatctgttcttgacttcctctatgttccattaaatttttgttttacttgttgaacaggttgtccttgctgcttccattgtgagcaaatctgg

SEQ ID NO: 23790 - DNA, 939 bp, Glycine max
  Intron number 1 from transcript Glyma10g07360.1 (locus Gly ma10g07360) derived from phytozome v7.0 (chr-ID Gm10; pos 6053433 to 6054371)
cttcaaattcctctttacaaacgcttcatcaatctgtaagtgctcacttttcggactctctttatgcttttggtgaacgaatggtgattttcttttaattctaatttcgaacacatgtactcacatgctttgtaatttcctgattctcctctgatttctctcatgcattttctttttctttttttgggtaaacattcatgcattttttacataaacattttgctgctatactatataatgatatatatatatatatatatatatatatatatatatatatatatatatatatatagtttggtaaaagtattgtctttaattaattttcaataagtttagataaataaataaaaaaaaaatttcaacaaaagcccattggatttttggtattgttgttttgctttcttctctgggtttgtcatgtgaattgctaaggtattaggtcactggtactagtgttaccatttgacttgatgcgatttatattaaaaaaataatttgataacacataaccttatatatatactaataaaatttaacatatttaaaaatataattatgaatttatttaaaattttaaatatataacatttttttcaaaatttaatataaacaacattaaattaaaatttaaaatatatatcattattgtataataaagacataatctattacacacaaattagtctcgaataaacatgttaaatctaagattcaattagataaaaaaattaacatatacataattaaaaattaaatcaaaattataaatctttttataattatgagaattaaggaagaccaaaattacaaatcatgaattcaaatgggattaaaattataattcagaaaaaaaatctatcaagttggcaattaaattgaaatcctagcatatttgatggtttaactaaagttgatgacttgtgttcttttaacaga

SEQ ID NO: 23791 - DNA, 866 bp, Glycine max
  Intron number 2 from transcript Glyma09g28620.1 (locus Gly ma09g28620) derived from phytozome v7.0 (chr-ID Gm09; pos 35538190 to 35539055 reverse strand)
aaaatatcttggctccaagcaccctttttgtaaaggtgaataatactacaatgctaggagcaagtctaccctttttgcataaacacagataaaaattgaataactccttgaacaaatgaaaatgacccaaagtactagttttctatttcagataaaagaattttagtgaagagtgaatattatcaatgcactacaggggatattaccaaggaaaagttaaaacaatttcttaattattcaagataggtgattttatatacatactatttattgtgacatgtttggtgtttcttatacttctttctctacctctttttttttatcttaggtgtttctgcaaaataatatggaaaagatagacctaccaaaatgtgagataaaacctattattccagtgcttacacttaaactttgaggtgaatttgtttattgacatggtatcagattcaatggctagacactaaacaatttgatcctcaatctattctgataatgaataaaacatagattaaactatgacaatttaaaggattattcttatactgacataagctattttctttgatctagttgactagcaatggataagaaatttcacataattagatacgttgaaaatgttattaggatttcattagagaatacagccacaacaagaaaatattttttgccactaggtgtagcttgttacacccccttagcttgtgttgattcattcctaatacattgtgcttttcccctttctagtggtaagaacaaaataataatttttgcttcttggggaatgctccatgtctttatgaaacttatatatggttttaactgtgacagatatttggttccatcctaggagtttctgctggatt

SEQ ID NO: 23792 - DNA, 662 bp, Glycine max
  Intron number 1 from transcript Glyma09g28620.1 (locus Gly ma09g28620) derived from phytozome v7.0 (chr-ID Gm09; pos 35539191 to 35539852 reverse strand)
tctaaacacaggtgagcttgctcctagctccaaccagatgcatttggcttactgcttaatggacatttggtctgtacttgattttttttcagatgctaattgttcttttcataacttttacattaaagatatatatgatgtgcttataatgtgactattgaaagtgacattctgtttatctttattccctggaagtgttaatatatacaatttggtccgcggatgtgttaacttgatcatattttatattttagtctttttggtgactaattagtcttcaaaagtgtaaatacatacaatttgattccccaaatgtattgattttgctcacattttgtttatatatttgtgatgaaatatctaaaacatgagcaagctgatacattgaaagactagattgtacaaatgattactttcatggaccaaaaataagcagcatttcatggattaaattgtatattaactatctctctatatttatatcctatcataattcaccaatttactgaacaaaaatccttgcagaaattattttgggatcttggttgaaattattttctatcagttatcactaatcattgtcatgcaattctttatggttggcattactgttcagtgttcatatattctcacagattagtagttccagtgcagatatcttg

SEQ ID NO: 23793 - DNA, 651 bp, Glycine max
  Intron number 2 from transcript Glyma11g36160.1 (locus Gly ma11g36160) derived from phytozome v7.0 (chr-ID Gm11; pos 37702899 to 37703549)
gcgctccattgtcatcgagctactattccaatctggtatgaatatcataccgaacctatctcttctttctttgatttctcttactatgctgagtaaactatgattaagcataacgaggtgtcacattagttcttgaaactacggatatttaaaataagtccatggaatttccagttgtttcatcttgagattttggtctctaaacatatgataatattatcatttaagtcacattttttttgaactttggattaatgcgattggcggattgcagtttcagggacttatttgaagtttcttagtttcggggactaatgtgactaagctatgtactttcaggaactaaaatgtttttatagtctactatggaagttgtagtcttaataactaataataatacaacatcggattgtattagcttgttttattgattgtttaaaaaatagttaatcatgcgaaatgcaaatccttaatttggataaggttttaatttaagtgtaatgtgacactaacacaaaacatggcatctttctgggtgcagtggttcaatgaggtttagagtctataacaggtttagcacttatttccagtaattgattggcaggtgctccttcacatatggggcatctattatgcaggatagagacctga

SEQ ID NO: 23794 - DNA, 931 bp, Glycine max
  Intron number 2 from transcript Glyma12g09160.1 (locus Gly ma12g09160) derived from phytozome v7.0 (chr-ID Gm12; pos 6958429 to 6959359 reverse strand)
agttaaagccactgggccaaacctgccagagaaaggtgaggttttccaactgtttaccagttgtttacttttgacatttctaaaatctttacttaagtcataggatttgctcaagtcgggaaagtgatccccatctgttttagctacacagcttttgatacaagcacttgaacactgtattgaatttaatcaattaaccatgcttgctttcttggccccatattgtctcatcagctgggaggcaaagcgggcatgattatttagtggttaaggtgatctttaataataattgtgtttaaatatccacgtagaagatgatcaatttggttcaatgggagatttcacattcctcatgcaaggcttctttaacaacattgtgcccaggaaaaaaactaaaataaagaaatggttgaaaggaaatataaattattttaaactttaattaattatttaggctatgtttggtttgctggtcggagagctccaaactcactttggagagaaaagtgagtttgacatcatgtttgatttctttccaaaggtatgcttgagactacaattttacttataaattcagattgagagaaataactattggaatacttttacaaacttaagtttgcaaactgcaatcaaaatatgcactaatcctataagaatcattttttatgctttattcctattttctccattttgtggaggttttataccaaaaactagcaatacaaactagaagataacctttttttgttggtttaagaattaaaatgtagagttattaagtatagaaactaaaacaaaaagttagggcaggtacaaggctattaattataccttattttaacttataattactttttaaagtatcttaatttttcatttttgtgggatcacaggagagagaatacaaggaagcccttgacgctttcaa

SEQ ID NO: 23795 - DNA, 673 bp, Glycine max
  Intron number 1 from transcript Glyma12g09160.1 (locus Gly ma12g09160) derived from phytozome v7.0 (chr-ID Gm12; pos 6959401 to 6960073 reverse strand)
aggaggaaacaaaacgattggctgagattagagaagtaagtttcacaatactgattcttttcctttgatgttgtatttgctttagctctaagctttcatgatttattatttggattttggttttatatgttttacatgttaatcaatatatagcatgtttgattccacattcaagacatggtttttgatgttttgtaagaagctaatagttatagcttctaagtctcagacccgatttcttacttctcaacagatttctaaacacactaaaaaacttaaggcatgggaaaaaggtatagaatctattggtgtttgtaaatcacacaggttagtcgaattagaaaattatgtttccatttattttcttttaaaccttttgagcaagaactgaggataatcagatatccaaggcaattgctgtgtcatgtgtgtagcgtattggttattcttccttgtttttctgttttttttttctgacaaatattaattgatagtttgttagtagaaggatcggaccacgaccttcccccctttccttctttcttaaccaccaactaaccttatatctctcattcttccttgttcttaaacaatttcttacataataattgtttggaaaactgcatatcatgttctaggagcttgagggtctcacagatccattgaggaagga

SEQ ID NO: 23796 - DNA, 312 bp, Glycine max
  Intron number 1 from transcript Glyma09g13210.1 (locus Gly ma09g13210) derived from phytozome v7.0 (chr-ID Gm09; pos 14600266 to 14600577)
acttttaatccagacgcacgttttctgtgcacgaggtaagtgatttaattaatttgaattttcaatattattattttttggttcatcattgtttcttcatttgtcatatttacattcccattttcttctccgttgtgtagtaatattatctatatagcattataatttgcatatctctaaacccagaaaggcatatacactagttaagagtttggttttatcttaattatctgcattttttttattttcactcattttttgcatctgagtctgtcagatctggcacgaattccctgtgaatcttgcaaagat

SEQ ID NO: 23797 - DNA, 628 bp, Glycine max
  Intron number 2 from transcript Glyma09g08260.1 (locus Gly ma09g08260) derived from phytozome v7.0 (chr-ID Gm09; pos 7341406 to 7342033 reverse strand)
gcaggtatgcttcacaagttaaattagtcacaaaaaatatcttcaattttcagctagttttctgttaatttcgtaacacaaattatacttttaatttgtatgtctaaggtttgaattcaattacaatacactgaatgagatagctcaactctctataatacttctatctgactcacatgattctctccgataaaaaaaaaaatgatacttatggtttaaaagaatacactaaatgtaaaggtttttaataatatgattataaatttcaatctaattgaagataattaactttttttgtgataattatttacaagtcatatccagatactaaaatgatttctaatttacacgagttcttaatatcaaaccttgttattgtcattactccttaaaaaaaacaagagtgtcttctagttaattaatagtgtaactgccctcacatgtataaaaattaaactttataaatagaaaatggtttaagaaaacaaaaaattgagcataggaatggtgtttaattgtttacagccaaatgacagagcctagctattatcaaacactttggcttaattgtttcaattttctgcctattgcagtcttcctggtgatttcggattcgaccctcttggat

SEQ ID NO: 23798 - DNA, 1004 bp, Glycine max
  Intron number 2 from transcript Glyma11g06350.1 (locus Gly ma11g06350) derived from phytozome v7.0 (chr-ID Gm11; pos 4509454 to 4510457 reverse strand)
caggtcatatagttcaggtgctctctttgtgctcttgttgcttatcagttatctattccatttttgttaaatatgattttttttttcatttcaagtaaaacgttttttcttgggtggtagaatagaacttgcggtaaaatggcagtctccttacaaaaagagaggcaaaaaagggtggattgatgtatctagttgagtcatatttgatttcatttgactgattttgttgtaatttatatgctaatggtgtttagctgacggataaatggagtatctgtttttactagagttttgcatgctgcagaccacggttcatgttctagcttgccagttgtaaactagcataattcttagtcatttctattactattctgtcaacagagcaaacgttatcacccttagctgatttctataagaattttaaattccattgtttgttgtttacaaagtaagtgggaaagaagtgtttttgtcgacagttacaacttaaagtgaaaaagaagttgtagcaaaattagttgatagttgacacttgaattatttggtttgctccatttctctattaaggatatgtgacttcaaaaactcaaaagatctgtgagcttttcttgtattttgtttgtcacatataggttagcaaatgatttaggcatttagccttcataaatgggttatttaagactgaagtaatctaactcttgttgcaattgcaatttttgtggaaaccggctaacctatttttgagagatgttaaagcatgcaggcttcttatgattggtaaagttaattttaaatccattgtttcattcctatctgcttttcatgtattgttaatcaacttttttctctgaactaagaactattactagtgttgatatggttaactgctcccttctctcataacatcttgcttattgctttatgtgatctattcatgaatgatgaaacaatgtttctttcttccttgtgatgtttgataggaacttggtggaattaacactgct

SEQ ID NO: 23799 - DNA, 741 bp, Glycine max
  Intron number 1 from transcript Glyma10g13730.1 (locus Gly ma10g13730) derived from phytozome v7.0 (chr-ID Gm10; pos 15495664 to 15496404 reverse strand)
tagtagtgattatacattaaattaaataaaaatattttaatggaaaaaataactaatgcacaagagagatgaaaagaagtcttataataagggataaaaattattcataatgtcttacttaaatggcagaaagagtatatttctgtaaaaaaaaatttaaatctttatatatgtatttttgtataaaaaaatccttatatatgatccattaataatactttttttaaaagaatatagcaaactacaattttgagtcaaacaaaaaaataaataagaaactacattttggtgactagtacttaattaataaattttacatatttatgttgactcaaaactgttacattgactaaaatattcacattttatcatctgctgcaaaatgatcttatcatgtacaaggcgtgccaaatcaaaatttctttataaaagaaaaacaaagaactaacgtatgtcatagacaaccaaaagtcatacacaagtcactcaccagggacaatgtcaacaaccttcaagtacctttattccatcctcttcctcacccttatcatcaaaggcacgtacattctattagttttaaatttcaccatttttctttctcttctcacctttcattttcctaacaaaacttttatgattttttattatttttattttacaatgattctctatatttgttcttgtgtttggtacataaacttttcaggctctagttattgtaacttaaataacatcattagt

SEQ ID NO: 23800 - DNA, 689 bp, Glycine max
  Intron number 2 from transcript Glyma09g04010.1 (locus Gly ma09g04010) derived from phytozome v7.0 (chr-ID Gm09; pos 2948384 to 2949072 reverse strand)
cagaaatctcagtctggtttacactcttgctggaggtaaggtcttttataactataagtttttaggattaatattaatataacagaagatacatgcatgataaacattaatcagcatgctgtggtttttccttttatttttggggacaattgaagcttctttgtgcaatactttccctgagaatatataaatcatttgtttctgaaacaaaaattatgcctattgggttttcattgcagagaagaattatttgtaataagtaatttcttaggtgctttcagagctattctctcggatcagaattagtttcattctgatattacatggattatcaaggtgaaacaccaattctgattagagagcaataccaaaagcacctaaggaattgcatacaatatttttcctttcattgtctcaattatacatagcagtaaatttgtgtcgtataaccggttggtcatgggtttgaatctggaaatagtctatttgcatatgcaaagttaaggctgcgtacaataaccctctccaataccttccgcgaggagcctacggccattggacattagttttcattgtctcaattaggcaaacttgatcttgtaaggaactcattgacttaataagggatatgatcctgtgattttaattggattatttggttgcagttgactgcattgactgtgctgctg

SEQ ID NO: 23801 - DNA, 737 bp, Glycine max
  Intron number 1 from transcript Glyma12g05900.1 (locus Gly ma12g05900) derived from phytozome v7.0 (chr-ID Gm12; pos 3984968 to 3985704 reverse strand)
acttctctgctcaagattaccctgttttcacacctgtgagtattgcaatttttccatgaattttggattgaaatttttgttttttagttattttgatgaattggatatcctaaaatatgtccaattcgtatcaaagcagctattttgttcgaagaaacagagtactgttgctggattatgtttgaatttactgttcctgttgatcatgataaggaccaaatttaagacacttgaatttgtggaatatgcaagtgattgtgttgttcccctttcccttgaacgcttctatttattactacaattgaaaggaattatgaaactgctcctttctttataggtggttaggtagatgggtagatgtcattattatcgctgttacatccttaaacgttactcctcatttttttttttaaaatcttgaggaaaaaccgaccgtgaaggagagttttgacttttttgaacattttaggatttttgctttaaattctgcatcatggaactcttaaggttcattaagtcaactgaactgaatcctgcaactatgacatttattatctgactaattctttaatttgaagaacaatttaatgttttttttttatcactttatcattttcagtttcctccaattttgtggctgcaactgcaagttcccccctctccttttattattatttttttctttttcaaatttgattgataataagtttctaaatttgagaaatattgacagagct

SEQ ID NO: 23802 - DNA, 915 bp, Glycine max
  Intron number 3 from transcript Glyma10g05270.1 (locus Gly ma10g05270) derived from phytozome v7.0 (chr-ID Gm10; pos 4079223 to 4080137)
cccgcgccattcggagacgccttaccaaacaccaggtttgaactctgttttgtgcttcttctttttttttttgttaattaatttgaggtgtaatttaaattttttgtcaattttaagtttataactaaatgaaattgtgattactgttatctagcgtgggaatcaactaacacgagttgtttcagtttaactatatatatggcgttgttttaaatatttttagcgggattttttaccacccaaagtggtactatcccactcatgcagaattgcctttcgctcgtagtggtactatctcatttgagtagaattgtctttcgcccacaatggcactatctcactcgagcagaattgtcttctgcccatggtggcactattccacatgaactacattgtctgtcaccttactcgctcctagggttactattccacttaagcattattgtctttctcctgtagaactatccaactcgagcagaattattatctttctaatagttctttatctcttataaaaaatttaaaccatgattttcagtgttgttaaatagcggaatggcttggtggatttttatgtcattcgcaaaggcaatttgtgatgggaggcctgccatggcggtgccataagacgcaatgacatgtttatatggtggaattttggccttccaccatgtttcaccatccgccattgataacattgatgatttttaatgaaagaagtggtatttattgatttggcacttgttaagaggaacctacgttctacagcacagcataagtgtcttagtttgaatagttttggatttggttgatcatggatccctggtttggtgttcttcaattgtgctatatcttaccaccaccctcttggtttgtgcaggcgtctttgaagacggaacgtgagaaaaagaagga

SEQ ID NO: 23803 - DNA, 841 bp, Glycine max
  Intron number 2 from transcript Glyma11g35910.1 (locus Gly ma11g35910) derived from phytozome v7.0 (chr-ID Gm11; pos 37488536 to 37489376 reverse strand)
aaggcaggttcatgaagttatttccattgtagttgtagatgtcaaactttattttaggtttaggacagcctagtttggtattttgtgttgtaatttttgtgtatattgtctagaagttgcttttctgaaccacttgctcttttagccggaatgaaagaccagagttgactttgtttcacatgtgcagcggattgtgttgctttatgaaaatggaactgcttttggactctgttggggtaaacttctccataaacacataaaatgagaaggaaaaattaaataacgctctttcataagctaaaattagctcatgtataagtcaaaatcatcttttggagaagctaaatgagaaaacttttgcaaattaactatgctgtcataagctaatgttagtttatggaagaagcagattttttttttgcttcttatttccttctcctacaagttcttatggagaaatttatttaaaaagggttttggggtaaatagttgtgttgttgttaactctcatttttcagttttaatcttgtctgaaaccaaacatggctagcagaatgttttacattttccaaaattacattcacatcagaaaattttctagaggttttttcagctgaatttagcccaagaatttgtttgaatttccaagatccatgctatttgcttcaattgtaaatttaaatccaatgcctttcttgttataaatgcaatcaaatgtcaaattggctgtgttcttattcttcgtgaattatgagttaagtgtgttggttgaaaatagatctaatttgtcaagctttatttaccagagttaccaaaccatctgtgagaaatatccttcatt

SEQ ID NO: 23804 - DNA, 669 bp, Glycine max
  Intron number 1 from transcript Glyma09g04540.1 (locus Gly ma09g04540) derived from phytozome v7.0 (chr-ID Gm09; pos 3353214 to 3353882 reverse strand)
atctccagaaatcattttctctacctctgaaaaaggttcgcacccttctgtgctatgctctgttgaacccttttgtgctctgttcgaatccctttgttgaatacttctgtttggtgcactttgaatcgtaattaattattgtatgttactgtccttttcgaatccatggtgctgaagtggttctattcttcttgataattgatattctattatttgaatttatgaattgattttcagaaaatttcagtttgagattgctagtggctctgaacttctgagtaatattgatgtgcgaaaacaaaaatgaaagttctatcatctatggattctatgttctacttactctgtgcttgtgtttccagaatatagaacatctctattatttttgtttgttagtaaggttttacattgtaagaacataacaagttcatttattatgtatagaactttatgtgtgactttcttttgtatgaattatttctttaattatgacttatgtcttggcaatggactagtggattagcatgatttgagtaatttttttagattttctaaggtatggtttaattttttatgattttcttaagtataaaaatttactagtggattagcatgatttgagtaatattttttagtattggattttaaaaaacagatttttggtagccc

SEQ ID NO: 23805 - DNA, 850 bp, Glycine max
  Intron number 1 from transcript Glyma09g37700.1 (locus Gly ma09g37700) derived from phytozome v7.0 (chr-ID Gm09; pos 43215109 to 43215958 reverse strand)
cgtcaccggcaccgtcgcccgcgacgccggacctggtaaatctctgttttatttatttatttatttaattaaagtttcttggaggggataaatcagtattaaatgagagccttaacgaagttagcagcttaagtaacttaatagtcttaagttactttagtctaataaattactatttttttgtttttactaaacttaaatgtagtttcttggtgctcttcatgttgttctctaattgaaattagagtttcaccacaataatttgtgtgataaatgtttgtatcaaaggtcaacatagattactgaaactccaatacgtaattactcctactgattatagaacaacaccaaaagaacttatggcattgtatttaagtttagttcttttattttctgggtttgttggaggtgctagtacttgggtaagggaggtggagactggagagggttgaacttcatgtaggaagcaccaaatttttggataggtcacaccacataaaattaatatcaaataaagaaaagacacaaatctcgcactaaaatggaatggagatatcactgtttcaaaaatttaattagtttaactttaaagaatttttacatcatcatccaatcatagattgacccatattataagattgttgacttcataataattattttaaaagtcatatctatagtatagaagtctttacaaatgcatgaaaattaaactcaaatactatctgctgtaatgcctgatatgtaatggttattttgcagttaccgtttttccaaacttagtggcttattcatggtttgtttctatgatgcaggagtaacaataagttttatacttgcgggagcatca

SEQ ID NO: 23806 - DNA, 897 bp, Glycine max
  Intron number 3 from transcript Glyma10g43410.1 (locus Gly ma10g43410) derived from phytozome v7.0 (chr-ID Gm10; pos 50098551 to 50099447 reverse strand)
ctcgtccattggtacaagatcgtgaagagagaaaggtatggttgcagttctaataatcttttcttaattacaatcaaacaaccattgtgttgtttttacaactgtatagaatcatataaatataatgagaaactgagaatctctgccaacttacatcataattatgatgactctgggattagcaacatatagatacactgtcgtacctttcttttcttttgtttttttggataaaaaattccttttatttatttaaaatttaaaatagttggtttgtgctaagatagcgatgaaatccttatacattttgttatcagataactttctgttgggttgtcttcgatatatcatgagtaatctatgtgttttatgttacaaaaatttgcaagtacccttttgttgttttgatagggtagtgacatatgacaaaggacatggcagatgtcacaatgacaccgaaaaaacctagatataaggaggcatatatacagatgatagattggtagatcatcaagtagagcatatggaatcataattaaaatattcatgatgtgttatgagattgtgagattttaagattactgtataaaggtgttagtgtcaatctgggtattggtgtttgacatgtatagacacaacttctctcaaggtgtggaagctccattatcaacacattgctagaatagcgaaaatgttgatagtggctttcaaataggctatgtgcgaattcctttttaatattttgtttaaatttattttcttgttttacttttgtgagagatagtgttgaaattggctcattttgggttattttctaaatgacattggtactcatcatcaacctttaatcattgcaatgcagccaaaatacatccaaaatctgattaaaaaagcaaa

SEQ ID NO: 23807 - DNA, 550 bp, Glycine max
  Intron number 1 from transcript Glyma12g23230.1 (locus Gly ma12g23230) derived from phytozome v7.0 (chr-ID Gm12; pos 25573196 to 25573745 reverse strand)
cagcgtgtgctttcttcgttcgtctcttacatcaggtgcgatttcacccttttgttttctatccaccgctgatccttcttctctatatctgattaattattgttcccgcttcactgttttctgtttggtttcgtcatttgaaatttcgtcaatacttgttttcttttaattcgagtttggatatttatgatttcatggcggaatttgtggtgtatgtgttgatcttttgttcttgatttgggtcgcatttttatgattataataattttttattttcttattaatttttattgcattaccttgcctcaatgctatgaacaaacttcaactgaactttttaagaggaattccatcgagccaattctgttttctagaaatgtttgtttagaaatttgtctactgttgcagtatttttgggttcagttattacgaatatgtcaggttatggatcaatggcaaccaactatatatatataacaaaattgaagggattttaaaattttctttggttgtaggtacattaattaagataatactacttctgaagtgc

SEQ ID NO: 23808 - DNA, 355 bp, Glycine max
  Intron number 1 from transcript Glyma12g34270.1 (locus Gly ma12g34270) derived from phytozome v7.0 (chr-ID Gm12; pos 37450293 to 37450647)
attcactgtgcttatcaattattccttcaaaacaggttatttgatgaattttcctatcaaggtgcattatttgttgtaaggggactgctaagttgaaaagtttgagctttcgttttagtttctattgaattgatgtccattggttacatagacatcaagttcttagcatagcattttcttcacaaagctaggtttgatttgttgtttggcatctgagatttattttttcttttcttactgattaattaatactttattctatttagattttaaaattttattcagaactgatgattcatttcaatcttaaatttatataggttatctgggctgggtttgacaagttagagagtga

SEQ ID NO: 23809 - DNA, 639 bp, Glycine max
  Intron number 2 from transcript Glyma10g34540.1 (locus Gly ma10g34540) derived from phytozome v7.0 (chr-ID Gm10; pos 42708175 to 42708813 reverse strand)
gctagagatattttaggtgatttttcagcttcttttgcttcctgatttgaattaaaagcaccccatttttcacagaattatcttgcttttgggggacataaaagtccttgttatatattttcattagtccaaatttgctttcatcctcaattcaaaataagatcaggtgtttggaaacctgatgagaagtaagaaatcatatcggtcacatcaaccaaacacactagtttatcaaggttttaaaagctgaaactgctgcttttcggaaattgattttctttgtcagaagaaaagcacttgtatatttgagaaaagctgtgcacagcttgatttaattgcttcaggctctttattatatattagaaaaattagagagaaactagtagtatattagagtatagacaatagctactaatcatgtacagaaactttttaactgttgtgttatccactagtactttagtaggcatttatttgactacttgtctgattttcttttcccctgagactagtagtttccttattttcattgttgcattcttttacttggatggggggtgcgtcttaaatgggtaggggccttgggggtattcatagttaatggtataattgaaatgcaaatgttgtggcaggacctgg

SEQ ID NO: 23810 - DNA, 731 bp, Glycine max
  Intron number 2 from transcript Glyma12g35050.2 (locus Gly ma12g35050) derived from phytozome v7.0 (chr-ID Gm12; pos 38200623 to 38201353)
taacttcagctcttctgcattgaggtgcaaggtaagttaaactaaagctttctgtcttcttcttaattcatcattaagctgtttcttacttatctctgagtatattatggtattttactttatttcctttcagaaggactttatgtttagcaaattatactaatcattgtgagatttttttatattgatactaacctttcagaaggaatacatggtgtaatgtgtttcttggatagcaggggctgtcactataatatataactataagtatataaggagcagcggtgtaatgtttttcaaacaattaaaggggttaatgtaaggataaaaaagataagggtattagagcaaatttaatgaaaccttaggaggtgtttagtataatttgctctttatgttttttgaaaatccaataactaaggtttgtcatgtaaaatggccaaaataatataccaagtacattctagttaatatgtgattccatttttggaacactagaatttataatccttcagcctctaatatttgatggtcgaaagtgggtttttgatctgtatttttgaatcaattcaaagtttaacaacaaacaaaaaacaaagtactgcgtaatcccccccaccctccaaaagaaaaaaaaggtttcagactttcaggggtcattatctaatttgttttgttttccgctctctatcagagggaattcgaacaaaagctctgtgctgtgagggccg

SEQ ID NO: 23811 - DNA, 657 bp, Glycine max
  Intron number 1 from transcript Glyma10g30510.1 (locus Gly ma10g30510) derived from phytozome v7.0 (chr-ID Gm10; pos 39141322 to 39141978)
ccaccaccatctctacgtgccttcacacctgttcgtctctctctcactcgatttcgatgctgcttctgatttttttttattctctctcttttggattttgacgttgctcttgtttatccacccccgctaattgcaacgcattgttctttgtttgaccccccatctgcgttcttgcttctcgttgttcttgttctttaatttatattcaattgcctggattttcttgatttgggttttcaatgcggttccttaatagtttgttattggtgatttcaatgatctggtttcctatcattgctactgcgtgaagagaaggtcaaacaattcttttgttactgtggtagagcaatacgattgacatgataactgagcttacatgttttacttttctgtggggtttctgtgatttgacgcgtaaggaatggaatcatcttaattgtgtcttgaggtggtgtactgttatgaagtttcttgaggatgcagtggactttcaaacatgtttgttgtctgattcgagcagtgcgtgatatttgtgacattcctgaatcacacacttgcaccttctagcttgctcatgttttgagttcatttgttgacactttcaaggatcttctgtgcaatgcactgaactatgaaccctacaccagtttgcaggaa

SEQ ID NO: 23812 - DNA, 765 bp, Glycine max
  Intron number 1 from transcript Glyma10g34090.1 (locus Gly ma10g34090) derived from phytozome v7.0 (chr-ID Gm10; pos 42280842 to 42281606)
tcgtgagctgcacctctctctctcgataatcagaggtaacttctctttaaaatgcaatgttaaatttgaatatgcaattttacatctgcttcacttcatataataatttacacccgctcctacagaatgcatactatttaccttgtagcatactatgattttgataattgttacttgtgcctaatctcttgtctgcaatggcttactcgaatgataatcaatatattttcttgttcctgatcttttctattttcttctctctgctttggttcatttattaagagttttcgttttctatagggagcatttgtttgagggtttaggtttacattcctgggaatgttgaggtgggtattatataacatgcctatgcttgttttatgttttttacaaacattctcatctctaaatgattcccagacatgtttttgaccattattcccattccccaccaattcattcccatagaggtgggtataatttattcacaaggaatgattgaactcttacaagaatggtagtgggtggtttgtagtgagtagtgggaggaaaagagattttatttttatatttttttaggaatatgttttgtcttataattacatattcctagaaataagttttaagtgatacaaaataccaaacatggacatagtatgttttcacaaatatcattcctgagaatgtaacattattccttgaaacaaatgcaaccataattttccttctctggcaattttaggcaacttatttgctttggaattg

SEQ ID NO: 23813 - DNA, 670 bp, Glycine max
  Intron number 1 from transcript Glyma09g41730.1 (locus Gly ma09g41730) derived from phytozome v7.0 (chr-ID Gm09; pos 46381590 to 46382259 reverse strand)
aagccgtcaattctgtgttcactgccattgttgaggtaataacattgcctggtttcacttttttaagtttgtttatatatgcattttatggaacatctggttcacttttgggtatggtgtgtgatcattatacataggttaatgaataaagcttttggtataaatgagaatatgttgatggtgttatttgagtggacaaaagcttatttatcccatgaaataattcattaaggagttgtattgtatgtaacaaatctatgatgtgaaaagaaggaaaaaaaacacccaaataaaaattctctatcaatctatggaaaatgttggtatcttccattaacaacactatatttttgtggaacagatcaggataagtgctgtaattaaattccaaaaaagaaattatagatttaaagagcattctttactttaacattcccttcagattttttacatctccttgtggatcatgagtttctcattttgttctgcttggataaacactacttttaccccacattcacaggcccaacattaaaagcagtctctgcctaaaacttttagaatgaaaaaagcaaatcaagttagtttttcccattcttgtagagctgattcttgtatgatctgaacttttgcaggccggttatagacacatagacactgcttcgcagta

SEQ ID NO: 23814 - DNA, 820 bp, Glycine max
  Intron number 1 from transcript Glyma10g30420.1 (locus Gly ma10g30420) derived from phytozome v7.0 (chr-ID Gm10; pos 39087874 to 39088693)
gctccctcggcaaaactattaagagcttccaacaggtccgttttagccatattctgttttgagttacacgtttttgctatgtatatagagcagctactacacttgcaagttgcagttgcaatgtaacatattgtgaaacctcattcactcaattagcacatgatagttgaaaaaatttagaagagcctcatgccttgcccatgactacaactcataattcaagaaaataaagtctgtattgtgtgaggaagaattacttctttaactggctccctgttagtggcttaattaaagtgaaattggattcaagatttttgttgttcacaacttcacagttcacatccaccacaacacaagtatagctgattgtacaagtaattaaggcttaaaaccaagtcatactcatccatagatacgagtaataatccaaattgcatcaatgtgtaactaaagagatttagctactcatggaaaaagacgaataaaattaagaaaaaaaaaagcaagagtgacaacccccgttaatgatccttggaaaccttgactatcctctgcaaaagagtccttttgtcattcacttaaattcggattcaatttgagcaaaatttctaactcaacaatttgtctatttcacatgagatttattgaggactttctgcatatataggtgtctactctaaagtctaaactgtaaggtaaaagtaaaatataacaacaaaacaaacaaacagacagttacattgcccttaattggtcgttacttaatagattttaaaatcttgcaggcagcaaaggagtttgagtccgagattaaaaagga

SEQ ID NO: 23815 - DNA, 609 bp, Glycine max
  Intron number 4 from transcript Glyma09g21970.1 (locus Gly ma09g21970) derived from phytozome v7.0 (chr-ID Gm09; pos 27126658 to 27127266 reverse strand)
gaatttaggaccaataatactgcttacgtaggtcattatttagatatgtttattttgattagttctttacattctaaggtttaatcttgttgtgctttttaattacttgaaaattaaataaatatttagcttttaattaataaatgtctctatatgtatatatagaaggtattgatattgtacccaaaaaagagggtattgatagtattgactctacgcttatatatatatatatatatatatatatatatatatatatatatatatatatatatattttcttttttttttttcgaaacatactagcgggaggtgttaaagcttgttcacatattagtattatgaaacattaattggataatgacaatttaattagtcttatgaaatattaattcttgtcataggataatgacaatgttgtattcaaaataaaatagtagttgtgcatggtaatattgaaattggataatggtaatatgaagcaatggtcaattaaagcacgttgaattttaatagctatttttatttcttaattagtattcttagaatttgtctttcgattttggtgtttaaagtgagcgatctaatagtcaaacatttgactgcaga

SEQ ID NO: 23816 - DNA, 962 bp, Glycine max; identical to SEQ ID NO: 17422
  Intron number 1 from transcript Glyma09g34760.4 (locus Gly ma09g34760) derived from phytozome v7.0 (chr-ID Gm09; pos 41058847 to 41059808)

SEQ ID NO: 23817 - DNA, 631 bp, Glycine max
  Intron number 1 from transcript Glyma09g34940.3 (locus Gly ma09g34940) derived from phytozome v7.0 (chr-ID Gm09; pos 41208936 to 41209566)
acactcgcatctcagatcgaaatcgaggtcactgagtgagtgagtcgtgtttaattttctctctctttctcagcttcctctattttcgccatcgctgttcctgcaattctggcgccggattaatttactttgattttatgttttgcgcattcaatgcttttgatttcgattgaatttctctttactctactgtgtgtgcgaactgcgaagcttttctagctgtttacctagtgtgcttccgtgctactttttattctttcgctatctagatagaatcgtgcttgtgttgctgagctgaaatttttttaactgaacttgaagcatttgctcctattgttttatagtattattgattttgttcgtatgcgtcgtttttaattacaatatagaaaactaattttgtgtttttatttactcggtgaggttatgttacatgtttactggtttttttagtgttatgtgaataactgccgaaacagaatttattttttgtccgctgttattaatttccgttgatgagtttgtaataaatgatataatgatgattcttgtctgttgtaatctcagcatagttttttcccccccctttttttgttgttgcaggaagtgtttacgttattctgcgctgttg

SEQ ID NO: 23818 - DNA, 678 bp, Glycine max
  Intron number 3 from transcript Glyma09g34940.3 (locus Gly ma09g34940) derived from phytozome v7.0 (chr-ID Gm09; pos 41210272 to 41210949)
aagtgtgatccgaaaaccaaaagagtaacacatctgtgagttttgttgtagatcataagacatttcttgtctagcacctactataagacagttttctagagatgaaagtgtttgattgactgatgtagtttgtcacatctattaattaaagggtaaatagattgtattgtgttggttttgtttataaatatggcatacctgacttatactatgcttaattcgattttttttaccacatctataacatatataatctgatttagactataggttttgtgaacaaatctattgccttagtcttacatctagtgctgattgtaaatttctcataaaccattaggccattttcagtttcttattgctatagtctatatgatgttgttatagctcaatgccagacttaaattcttccaccctagtgtgttcatcccccttttcttttatgggttttgtattggagtagggcttttgttacagcaggataggatgcactgtttttaggtgtaaatttccttgaaagttgaaaggttgcatctgtataatactttggttacagaacttcttagttttaatgacaggagacttgctgacagttttgtctggaattctttatctaacattgctttcattggtgatgttgtaggagtctatctcaccacaagttaagtgggtctatat

SEQ ID NO: 23819 - DNA, 760 bp, Glycine max
  Intron number 3 from transcript Glyma12g36110.1 (locus Gly ma12g36110) derived from phytozome v7.0 (chr-ID Gm12; pos 39212687 to 39213446 reverse strand)
acaacgattaataacaattgctataaaacaagctcgtattttatcttcgttatcttttcttaataatgaaaaacaatttgaaaaaagcgagtcaaccgctagaactactactttaagaaaaaaaaaatatagaaattaagaattctaaatccaattttgaattgagatttgaatgaaatattgattgatgttttgtttgaaaattacgacaattcaatttgggtttttatgttgtaagaaaaaagataataggtaacaaagaatcatttttttttattcagcgtggttgtttattttgatagctttatcatatgataaaaattcatatgataaagctatcaaaataaacaaatttatattctataccttcccggagtaaagtctaaggggatttttggtttttatgatatcattggcaatcataaaaagacaattctgttttaatatagctatttgtgcaactattttacgattaagaagcaattgccccgtgtatagactatatactaaattactataaatataatatactttaatattcccgcgaattactgcatttattcgactaatccataaaccacgaaaatctctttttttcctatctctatcccgatgagccgaaaccaaagcttttattttctgttgagtaatcgttcgagtaagtcttgaatgagctcctcgaaaacttgatgtaaataaacgaatttttgtccttcgtttccgagctatatatcctcgtttaattctggtcattgaataa

SEQ ID NO: 23820 - DNA, 856 bp, Glycine max
  Intron number 2 from transcript Glyma10g06240.1 (locus Gly ma10g06240) derived from phytozome v7.0 (chr-ID Gm10; pos 5015740 to 5016595 reverse strand)
agcactttaagaccaaacgacacaagaagcggtatgctgcttttgattttgtttgttttttaacccccttgttttgaatcctatcctacattctccccatgtttatatttgaagattgattagatttatagaaattctttttgagttttgaggctactcatgtttttatttatgggctttcagatgtttaaacacataaagcagttggccactgtgaaaggaacatatcttgcttttaattgggatatgataattgagtgaaattgaacagaatactagtaaactcgagcttgtttagataaattatattatattgagcttgagatttaatcattatgaaatttatccttcatctaggctctgtaacaaaaagggaaataaccacgatggaagatcggtatagatcatggatgggaagtggttaatgaagtcatgcatttgattagctcgtattcagttcaatgacttgtgtatagtcagaattgcttatatcaagttaaaaaagacaacttctgaagtaattgtagctcaataataatgtcttcattgaaaatagggtgtttgtgggatttctctttttgctagaatctttagatgaaaaatgcatacagttacgaatagtttagcaacttttcaccccctatatattggtgttgggttgtttagaaattgagttacaataagattggagaccaaggtaacgtgttaaaagatcaatcctataatgccaccatcacacactatattaaacggacttgaatccattccaattgaactacttcaacttggcatctttctcacattatatattggagtggaatgattttggttagtttctttgtgcagtataaaacaa

SEQ ID NO: 23821 - DNA, 676 bp, Glycine max
  Intron number 1 from transcript Glyma10g06240.1 (locus Gly ma10g06240) derived from phytozome v7.0 (chr-ID Gm10; pos 5016599 to 5017274 reverse strand)
ggccagtactattgccttcactgcgagtaattttcttttcttcctcatttttttgtgccctttttgtcaatatatgaaaagtttgtaaatttgattattctataacatggggttgaaaattttggggtattagggtgttactcgaacactgccatgtctaagtgtaggttataggagcagaagagaaacacggtagaaggggaagaacatagaaaacgagagaatagtggaagagaggagacaggttataaaatagagattttagggtgtgtttgattcaatttccagtttttggttttaaaaactgatttcatgaacagtttttattatgcaatagcctgataagatgagttccttgatgagaagagtggagccacactttaacacgagtttcctgatatgctgctctttaggaaccattaccttattttgagtttgcatcactaccttttctacttgctgtttcaattggagttgtttttcgtatgactctcgtaggccttttgaatctcgtcccacttctccgtttggagcaacatgggagaaaaataatttatttattgttactaaattctcattttgctagtttcattttgttgtcattgttgagaaggcagaagtatgagtaattgttttgatttgtgcagtcggtactttgccaatataactgtgaggg

SEQ ID NO: 23822 - DNA, 605 bp, Glycine max
  Intron number 1 from transcript Glyma11g12870.1 (locus Gly ma11g12870) derived from phytozome v7.0 (chr-ID Gm11; pos 9201591 to 9202195 reverse strand)
aatcgcgagtacaccagtatgtttcctctgaattggtgtttgacttcttttgctgtgttttttaattgaattgcatataaaagcttgcttctttctttctgggcatgtgattatttcggcttagagagaaagatagagatagataaattggataagtaaggccttgtttgtttactatttttttttatatataaaaaaaacatctctaagctgtttgtgtttatttgtttttttaagacacttgttttgaaaacaatttttaaagtttaataaattttggataagaattttgattgttgaatcgtgtgcaatgcttcataaaaccgtttttaaacaagaaaaacgagatgagaatcaaccatgccctttttgtggttcattgttctgtttaattatttgttgagatgatttgcttccgttccatggaaattgagctctaggttagttttaaactgtgtgcttttattgttgggagtttacttaagatttgttgctgtgttaaattgtatgttatgttttgttcagtgtgtgtgtaatgattttgtgtgtaccatgtttttgtaatttcaggtgatatcattaagactttgaaggacaacgggtat

SEQ ID NO: 23823 - DNA, 418 bp, Glycine max
  Intron number 3 from transcript Glyma09g03590.1 (locus Gly ma09g03590) derived from phytozome v7.0 (chr-ID Gm09; pos 2556300 to 2556717)
gatttctcaatttagctttgccggctgttcatcgggtagtagttttactcctatttagattacattttagttgttctcctgatcattactgcagattgttaaatgagtattagcatttctgagtgaaattagttgctactactactatacttggttaatgtttccctgatcaatgtgttatttttgttcataaatacacatgtggatgcaagggttagatgagcattagtttgtggccttttagaagatcctcatatcaataaaacctagctaaacttttgttcatgatgtctggtggtttgataattgatgtggattttcctctatcgtagtgttacttttcttgaaaattgtttgattgttatactgttctgtttttgtaggatagaaactcaggttcttcatttcaacttggtag

SEQ ID NO: 23824 - DNA, 451 bp, Glycine max
  Intron number 1 from transcript Glyma11g10820.1 (locus Gly ma11g10820) derived from phytozome v7.0 (chr-ID Gm11; pos 7712267 to 7712717 reverse strand)
gactccactccgaggtttgttaaggtacgcccttcccttgtgttgtccctctcctttactgtagttatatatatacactgtttagttcaatattgctctttctttgtttctactttctatcatctcttctgtgaacgataaaataaaaaagaaagtgcactattacgtattttcaaaattgggatattcaaatgatttgggaatcgctatagcgttagaaatttgtttgcacatgaaaaatggttgcggttgaatttgtagtgcgagcctgaggttgcgtggttgttttgcacaccaactgtttgattaaattaaatactcgagagggcttggaattctaatgcacttcaaaattatattaccgtggttattgcatttaccatagctaatatgtttaatttgttctaatgttgcagctgaagactaagagcggttttgaactcgcacgcga

SEQ ID NO: 23825 - DNA, 607 bp, Glycine max
  Intron number 1 from transcript Glyma10g42050.1 (locus Gly ma10g42050) derived from phytozome v7.0 (chr-ID Gm10; pos 49065191 to 49065797)
aatcaagcccaacctcacctcacctcacctcacaggtactactccttctaccacttccttcttcttcttcttcttcttcttttcagatctctgctcggaaccgatttccttttatcctttttcaatatttctattttctaatccattttagaaaacataaaccaaacgcttttctttttctagatctaactcaatttgttgatctctcaaataaaactattttcatttacttagaaattttattatgtgaataattctatggttttagttagatctgtaggtgaggtgtgtagctatgataggagctaggtggttgagatttgagaaactctaggcgtgattataattaattttcgttgttaagttttttgaatttgattagatctcagccttgagctgttcaaatagttaatagttatattcatgtacgtttaccatctcgttgaatataataataaatttgctctgacacgcttgatttgtttactccttttggtttttgaattttcgtttgatggctgcctggttctaatttgtggcttctgctatatattataacaggttttagttgttaattaaatatatagatagaaatccaaggaagaag

SEQ ID NO: 23826 - DNA, 798 bp, Glycine max
  Intron number 2 from transcript Glyma10g28800.2 (locus Gly ma10g28800) derived from phytozome v7.0 (chr-ID Gm10; pos 37665302 to 37666099)
ctagaaaggataaaacacgagcacaaaaggaaaatgttggtaattttatcttaaccttcaaaatttccaatcatcgtccaactgcgaacgtttcagtttacttcaacagccattaagattagcctctatatgtttcacagtttattattattattattattattattattattattattattattattattattttgttttcgtgggtggaatatggatgcagcattaacaagtaacaactaagactttaccttgtttgactaattcgtccacttttcaaatggttttattgtatttagtgatactttttggtcatttgtgtggattttcttctttatataaggaggttagttaatgtgttacagcttgtttcttacctattatagtacaaaggaggaaatgtaaactttgtgaatatgctgtttgaaaacaatagacatttatgatgggaaatgagaaattttatagtgctagaacgataggttcatgtaactaggctgaaatttgcactgttcactcatatgaagcaagaggtttatggcatattatttgtttgtggaattctggaagcatgatttctttgcaagtttcttctattaatttccatgcatccttgtactaaaatggggcaatgacgtgggaaatgactccttgattttgcatatcctaaatatgtttgttcttgtgtatgtatgtatgaattaattaatacatttttgatgtgatattctgaccacaattcaaaaaggcttcatcttcacagcttactggatccgtgggtgtggagaaggcatcaaa

SEQ ID NO: 23827 - DNA, 988 bp, Glycine max
  Intron number 1 from transcript Glyma09g32220.1 (locus Gly ma09g32220) derived from phytozome v7.0 (chr-ID Gm09; pos 38776174 to 38777161 reverse strand)
aattaggccttttcttcttcactgttcctttgaaggtgcttctcttaattcaattagcaatcttttaattccgtttcaattgttttttatttgaaaatgtgttcacacttcatatgctgcacgagcactttggttaaggagtaataagtttgtacattgacttatatattaactaacttacaagttatactaacgatgatttctgattagtttacactttacaatgttaaaattacacgtttagtgcttagattctaaattctaaggagaagagagaagaaagaataaaaaaggcttaagagaaaataataaggaatcaaatgtggttttatgatcctatagggtaaattacaagttagaaaatgaaaaacaatttggtcaattgatggaacgagcaatactgtattctcctacaaaatctaggagttggaaacataaaaatttaaagctttcttcgtctagtaaataatatgtttaacagcaacatattgttggagaattagaattattcttgaggtaaatcaggttagttacttgcatatttcgtttcatgctatttagaattttcctatgaccagattagtcagatttggcatttaatttattcggaagatgctttaggggtggaaggtaaaaaaatttctcaaaatgtgtaattcatttgtgggtagctttgtctgttaaggacttttttcacaaaaataggagatttggcatttaatcaccttatgtttttattaactttagcatagcttaggagttaggagaaatggtggtaaaagtttattgttattattattactactaactttattttttgactgaaaatgtaaagctcaaaatctcctatttgatgggtggaacttgtcatctggttgttgtatttacttgaaattgacatgattactgtgaatgcttctgtctttttgatacctttatatctaaagtactgtatgctaaatccaggcaacagtgtcgtgcgaagtgg

SEQ ID NO: 23828 - DNA, 798 bp, Glycine max
  Intron number 1 from transcript Glyma09g30900.1 (locus Gly ma09g30900) derived from phytozome v7.0 (chr-ID Gm09; pos 37689197 to 37689994 reverse strand)
cttcaaaaaagccatttgctccaaagaactctaaggttagtcgtgtgatgattttataattcgctgaaatctgaattattatttgtactatttcattgtgaattcatggtactagatattatttaatattccccttcacttgaaacataaatttttatattacaagaactatggttgtaatctgtttcatacagttaatggatttgaatgggtaatattaaataggtatggagaggaagggttctctttcctattaaacatggataatatccaataggtatggagaggaagggttcttaaaaattcaagatatataccacctatatatgttaaataactaaattactttacatcatagttacccatctcaaatagtggcatgtagcagtcatctttgtagatgctatagcaggaaacagggtggcggctattttaaatattataatacactaaataatttatagtacacatataaatactaacaaaatgcaatgtgccatgctatagaagtgtgaaatttacaggctttgttatttgaatttgattattgattctagtgttatgcctgttttgggtgaatggggattgaggggtttgaatctattgcttagtagttactttaacagttcaacctaataaacgagtgcaaagatttaggtaatttagttgttttctaatgtactggctggtagcatagcatttgtcactttcttagtattctcagttgtcaatgattaatatttgtaatccttgatttgcctttttcttttctagcagaaacataaaaaagcctctgca

SEQ ID NO: 23829 - DNA, 759 bp, Glycine max
  Intron number 1 from transcript Glyma12g35400.1 (locus Gly ma12g35400) derived from phytozome v7.0 (chr-ID Gm12; pos 38521741 to 38522499)
aactcatctccaagctctccgctacctccgtcttcgtcagtcccttctccccttttctgctatttttcttctcactcacttttcgttcaatttctctgttatttttttgttattcaatttccctctctaatttctgggtatttgaggaaatggagattaaaggtcacttccttgatgctgcgtcgtttgcttatttggattctgagaatgtttttgtttttgttataaaaatgtcattttttttcttcactataccgccctcaattgcagtgaagttgttcatgcttagtgctctcgaattcgagtattgggtatgcaactgcttatactttgagagagaatgttattgctcacagtggtcttactgccggagctcgagcaggaatttctcatgtggaggatggaggatacatgtggtcttaaacaaaactaaaaaaatatttcactatcctgcatttatatctttttatactgaaaataaggaaaataagttctgtggttttggtctgttttgtttttgtttttttttttttcaattttcgggaatttttttgaaaacagtgtgatgattaatgaagattgaaaacgaatacaaagtgcatttttcttaaaaccaaataagtgtttggaaaccattttatcttgcaaattgatcaattggattattggttttgatatttttgggagttgtattgtctggaaatttcaccttgttagttcttggttcatggttgtaggctatagctgctctgggaactt

SEQ ID NO: 23830 - DNA, 217 bp, Glycine max
  Intron number 3 from transcript Glyma10g36290.2 (locus Gly ma10g36290) derived from phytozome v7.0 (chr-ID Gm10; pos 44505817 to 44506033)
gcttttcacttggttggtaagtttaacttcccaaatgttactagtaagtttgtccctgttctcaaatctcataccccattaatttaaacttatttttcttctcttttctagatatcaaaatctttgcatttttaattagtgatcaggttaattatcaatgatattacttttaatttctgcaggattataaagtgtgtgatactcgaaggtcaggact

SEQ ID NO: 23831 - DNA, 189 bp, Glycine max
  Intron number 4 from transcript Glyma11g37100.2 (locus Gly ma11g37100) derived from phytozome v7.0 (chr-ID Gm11; pos 38329799 to 38329987 reverse strand)
tcacttgtccaaaaattctggtggagttgacagaggtaaatgatattgtattattttaattattcttagctttgaatttctttttctgtttgtccatgaaatcttcctaatttcaatttgataattttaaataatttttaatatttttcttttgtttctctctagttgattttatcaaaatttttcaga

SEQ ID NO: 23832 - DNA, 823 bp, Glycine max
  Intron number 1 from transcript Glyma08g45140.1 (locus Gly ma08g45140) derived from phytozome v7.0 (chr-ID Gm08; pos 44571868 to 44572690 reverse strand)
gaggtctctgtctaagaggaaactgggaattcaaggtacatttttcaatatgctattgctacccactcttttgtattttatttaacagaagagaatcaagagatgcttgttttttttttttttttaatgaaaatgtggtgtttagatttagatggatggaatattcagaagaagaaaaaagtggaaagtctctatttgttatattttgttgctttgaagttggaagtgtgtgattttattccaagtgattcttgcatgtgaaatggttaggcttttgggaaactcctgcattgcatgatctggggtttcagaagctccttcaagctaaaccagagtcaagtgtatatgagaaatgatttcgcctcaaacctgattttagtgtgtttgggtaaacacatacaaacttgattttgaattaaagtgattttgaaatgacgtgatctgtatttgaattttttttaatcaatgcagaaactgcctaatgatatttcatctcaatcaaatttctcaacatagaatcaaatatgtgaaaaattacattagcttgtattttaacatgattctggattatctaacagattatctaacatgaatccaatcatgccattataattataatatcaagtagaattgattttaagtgataaaagtagcttttgtgttaggttgcaaaatttacacagttttacatcatacttgctttcaaggtaaaatccaaatttgtgaaatcaattttataaatgctcgcccaaaccaaaccttaagacttgctagaagaggaaatgaatggaggatctaaatttgtgaaattctatatgcagca

SEQ ID NO: 23833 - DNA, 955 bp, Glycine max
  Intron number 3 from transcript Glyma11g09930.1 (locus Gly ma11g09930) derived from phytozome v7.0 (chr-ID Gm11; pos 7091874 to 7092828 reverse strand)
caggttctaataattgaataactacaacatgaagatccttatttatattttttattctataacagttgatattgcctaaggaaaagctttttcatctgtttttgactttactgtcatgctctctgcatacttgtagattgatgaacaattgatttctttttattgcttatgttcttatatttcagttatatacaatgtctgattgtttgttactttttatttccttggtttgtaccctctcacccaaaattgttgtcttaagtatttgttgcaatgcaatttttttgttagtgattggaactcacgttcttatagttgtgatgtgtttggtttgaagtctactcttactctctcaaatgagagtactttttctggcttcattttttgttcttatatctgatgattgaagtctttcacttcccttcaataaggagtggttttgttcatcacattttcttagcgtcttggtttttcctttaattcacgatgtattcatgctcacttgacatgatattgtatttcagaatttccattattgaaaacagcatacccctaattattttgatggtctcaatcctgccctgaagataaagtaaaccattaaatattttggatgtaatatgtaccttctaaacttctaatatctaggaaggtccactggttatattgaaaaattctcacagatatggcgattgaagcataaattgaatgcttgaattttctaattttctgtgacttccagatttgtgttaccacatggcctgtatcacactcttgctgattgcatgctttccatctcaactgctatgttatgttctgtctatatctcaaccttataatttctattcgctgcttgcttttattacagagaaatcatgtatagagcatcaggctgatcttgatgatgtgaggacaaataaccctgctaaacaacctactttatgtaatgaagcta

SEQ ID NO: 23834 - DNA, 393 bp, Glycine max
  Intron number 2 from transcript Glyma09g36390.1 (locus Gly ma09g36390) derived from phytozome v7.0 (chr-ID Gm09; pos 42146053 to 42146445)
atcctgtttctgcattgaaacaaactcttgagtaagcaaatagaatctttgaagatgaaaatttcagatacacccgtatcttaacctttgccttttcatgatttttctcaagtaaatgaaagcaaattaatgacctaaaatgcatgtgatgtatcatcattacctaaaccaaaatctcatgggataacaaaaacaatggagtaaacttgtggccaagaataagtgaatactgtcatgccccacaagtggacttaagaatcaaatatgtgacagaatctttttaatatcacagctaattacttaattttgaagaatggaaacaattctgtgttggaaatctgatgttgattttgttcttgtttttttaattgaatgcaaaacaggaatctgggc

SEQ ID NO: 23835 - DNA, 734 bp, Glycine max
  Intron number 2 from transcript Glyma12g36480.1 (locus Gly ma12g36480) derived from phytozome v7.0 (chr-ID Gm12; pos 39532070 to 39532803)
acctgtcaggcgttgtttcatagtcactcagaaaggtaagggtaaagggaaaaggcaaaatttacacccagtttttatttttgtgatgactttatttgtgtacagtgtctttttttttttcctttttgaatgatgaattcattttatatgtacatagcttctggattgtttggataaaatgtatgaaatttaatgcattttgcagtttattttattgggaggataaatggttctgtttctgctctctacccttttgaacacaagttggtggctgtttttgtttgaattgacagacttagttataacttataagtgagaatgtggtaattttgttgcatcatgtttcatgcccaaccccaaagctatataatctgagtttagtagtagtattatggttgttatatatgtaacagaatgctaacttgtgatactggaactgctgtgctaacatggttcaatttgccttcatgttgggttcactgtttgggttctttgtgttgtatattactataagcattggctgtggaactggaactaataaatgcaatttcagctagcaactgatcactgatgtatattaattagatgccatgtataaaatatatgtatgtagagactgaagacataagtgaagcatatattttcctattttcctatgtatatttttaacatcttttatccttgtttaatgatccacagggtcagcccaacatcgtggttttggttacgtccaa

SEQ ID NO: 23836 - DNA, 735 bp, Glycine max
  Intron number 3 from transcript Glyma12g36480.1 (locus Gly ma12g36480) derived from phytozome v7.0 (chr-ID Gm12; pos 39532771 to 39533505)
tcagcccaacatcgtggttttggttacgtccaattgtgagtttatttcttcttccaaaagttcaatttgttgtcgttgttgtctttggttgattggttgtcttaccagtttgcttaccatgtcacttttctcttgctttcctcttgtctacttattgaatctctagcttagcttatgttattatgttctcaccagttcttttgttctggtttctttcttatgctttgactatggactcattcaattgaagctactattaagtatgaatacccagtaaccaagcgaaagtttctcctttttggaaaatgcactctggttgtatggatgttgaaatatcctcaatcgaaatatggattgtgatatgctattctatctcagtaaacgtctgtgatcttgccacaaagttgctaataaaacttgaagcactgtgatttacgaaaatcactcaaaaggatatcagtgggcaaacttttataaaatttattctagatatgctaattgcctagtgcttcaataatatgatacctgtttcttttgatggtgactctgctgtataactgtgttgttgtggtgattggtaaattaatccatgattagaatttgtttgttgactctgattttatgtaaagatagatatatgactcttctgtttcacctttattagaattagaatttgtgacttggctttttctagttttgtattaattgttgtcatctccagtgccgtcgaggaag

SEQ ID NO: 23837 - DNA, 484 bp, Glycine max
  Intron number 2 from transcript Glyma09g26560.1 (locus Gly ma09g26560) derived from phytozome v7.0 (chr-ID Gm09; pos 33059877 to 33060360 reverse strand)
tgaattcgagaaattattgtgggcaggtatggtggttttttttttttttttttaatgtgtggttaatatggcaggttgattttcggtttgaatttatgttttgtgggtgttggttttgatttggtgaatatacacggtttgattgcaaatggcgtggtgaacttaggtgaattttgatgttggaagactattttgtgtgttagaaattgaaacaaaaatgaatttttaccatttttgagtatgattctattccgtgccacactgatgtagtagcgtgtggggtgtgcattgtgattattcacagatcggtggatctggtgcctattcaataggtgccagcatgataatgtgaaagatttatacaattttctttggatgcatgttgctttgcttttttatgcatgtgtatgatgcactgattcagaatatggcttactaaatgagattttggtttgctttgatccttgatttgaagaccgctttg

SEQ ID NO: 23838 - DNA, 621 bp, Glycine max
  Intron number 2 from transcript Glyma09g41160.1 (locus Gly ma09g41160) derived from phytozome v7.0 (chr-ID Gm09; pos 45882824 to 45883444 reverse strand)
aagctactgtcacacggcttcacccatcttctcaggtacttttctccatactatattactttagtttcatttcttgatattcctatgtacggtaattgctgactggtcatattaatagtggagatttaccaaatatagaaaaataatgttctattattttagaagggccaaaattcaatgttttatcttttgtgtattctttgtattgtatttattattgagatgtgctatatgttgtatgtaagccttatattgcgttcaattgaatttaacccatacacgcagtagaggaattaggacgcacatcaaaatgttttcaagtttttctatatttttgcctttgaatttgctattaagcagggtttaatcatagttcttggtatcctccttactctgttatgtctccatgcatatgagaatgttgttaaacccttgcaaatttaactgtttgaattttatgaattatgtacctgctgattgaagcttatttatcatgtaccgttagcgttatgtgtttttctttttctttttgggacattgcaaaaatgctcaatcacctgagtgcattctgaagtggtctaaatgaatctgtcttctttcagggcttgaaggaattcataa

SEQ ID NO: 23839 - DNA, 762 bp, Glycine max
  Intron number 2 from transcript Glyma11g12700.1 (locus Gly ma11g12700) derived from phytozome v7.0 (chr-ID Gm11; pos 9048117 to 9048878)
gccattcatcaggagttggtaaatttctaatttgacaactttttctttggccgcaactcgatatttggtggcttttctatgctgtgatagtttaacctcgttttgagtgtgctgatcctattgttgaagcaaaattgatctagttttataataattaactgtcttgcgtaatttaagatatttgggtcctgtttggataaaatctttaataaacacttgtaggagaagaaaataagaaggtaaaaatgaattgaatttattccatcagttaaaattagtccatgtataagttaaaatcagctttttgagaagctagagagagagagagagagagagagagagagagattctataaattatcttatgcataagttaattttaacttaagagacaaatttatttcattttagtgcttattgagaaatgagaagtttatccaaacaagacttaatcaagagttcaattttgaccccaataccacaaattagcacattaaagtatcacatcgttgtggtgactaagattttcacttgttgcacaggtttgtgaacaattgttaccttatggttcattgataaatgaaaactctttactctatctgcgattcaaaattgagtcctattaacaaataagcggtattttgtttgtctattaagctacgagttattaacatggactactttgcataataaagcaagttaccatgtgtatattttattttatacagggttatcaagtaaaagccgtggttttcctttaaaa

SEQ ID NO: 23840 - DNA, 965 bp, Glycine max
  Intron number 4 from transcript Glyma12g28480.1 (locus Gly ma12g28480) derived from phytozome v7.0 (chr-ID Gm12; pos 31744090 to 31745054 reverse strand)
cttgtgggtaattatatgtcttcatattctctagcatactgttagctaatgtggagcttgtgtgaaatgctggttaagaacataaaaattacatgtttttgttttagtttagtaattgtgctaatactgagatcaattttgtttctgacctcgaaaaatattgcagcattgacacttagtttgaaatgatgcataaatctttgtaaaactaatatgccgcttcacattccagcttttaactgttattggtgttactagaacttaaattggatgttaccaatacctccttcaatttgccatcatggtgggcaattgatagtttcttattttgtttcttcaacaaagcaaagtttgcatacttagacctttgtgagccttgcattatggtgtagctattatacccttatgaaatggatggtatggttcataggaagacaaatagttccccttgctgcctctttagtccttaccccaactgcatggacactttcatgcatgcttgccagaactttgagattgaggggattccctaaggctcactcatactatgagtcaccctccggaaatcccctcaatctctcatagtcactatataacattttaaaatctgtctttgagtttatgttctcaaagattgaagtttgaatgtttttatttagagtaatgctatatcctctcctaatactcttataatagtagctactatagtaagtattaaatcatatgtaaaatacatttaatattttggaatattaaatgtattcaaattttttttttcattttgtatgtaggaggatttttaggaaggcgttgtagaaggatttacaattattctttcttttatattttgagcccaaagaatccatttatgttcattttcagcagggcacataattaatatttaggaccaattctagctaccttaacaagtaacaacataccatttgtgcttaccaggcttgaat

SEQ ID NO: 23841 - DNA, 448 bp, Glycine max
  Intron number 1 from transcript Glyma12g28480.1 (locus Gly ma12g28480) derived from phytozome v7.0 (chr-ID Gm12; pos 31745331 to 31745778 reverse strand)
ctccaggtgagctttatttattttcctcatttcaggtgggaaagaagtagagggcaacgtggtttgctttatccagtattttgcccaaacctaaattggttcaacttttgattcggtgtttctcattttccctaaaataattgcttcattgcgtaagtgttctctgttcaattggtaaccgttaatggcctttgggaatttcatgaaataattttggtgcgaggtctctgaatttcgtgaaatgattcttctcattttatcccacaggttttaacccttgaatttcctatatatatatatatatatatatatatatatatatatatatatatatatatatatactttattgttgtttattgctttctgattttgtctttttaaccagcatggtaacaatacgattagagttcctgtgactataagaattcaaccagagaggttttgtc

SEQ ID NO: 23842 - DNA, 981 bp, Glycine max
  Intron number 5 from transcript Glyma09g02130.1 (locus Gly ma09g02130) derived from phytozome v7.0 (chr-ID Gm09; pos 1413175 to 1414155 reverse strand)
accttcatagcttcaattgtaacgggtatcttggtgtaagttttttttacctcccattttgaatttgctatttttacacttggtacgcatgtcttgttctggggtgaattagttatcgatctcgggttgcggtgcttaaggactaactttgaaaacactatggcgggatagtgggaagtgaaatgaccaccatttaaatattatgaaggttttaaactgcggtcgtagaaatggtcgtggtttcgctgcgatccttgatattgtggaaaattgtagacaattgtggtcacagtaaacccaaaacctcaaagatagggttgaaatcacagacgcaaaaggttatttaaaagcttagttatataatgcatagtaaatagtgtttgctacacatacagtcatacatataaatgctcaaaaccaaaacaaaatacccaaaattaaagaaattcatgataaataataactcaatttatgcacacaatcaccatcaatctgaggtaataagaacattgtaatgaagtaaaaaaattaaaagatgatagtgaaattaatagaaaatgaatataacaaattagataaaaaaaaatttagtagaatgtgaatttatatgtttaaagaaagaagagaaaacagaacacttgaaataaagtcctataaaatttgaaggaacagaggtctaaacataggcaattttttttggaatattttacccccaaaaccccaaacaatgtattataggggtgaaaatgggtttttgaaggctgtatcatggtagtgctgctatactgcaaaaaaccaatattttggctgctattgctgccgttattgaaattgctccactatttgaatcccatattggttgagggccactctgctccactatagcactgctatagcatgctattgacatcaggatttttcaattgattgcttattgtttttcctctatgctgcagttatcttggtggcttgctctttctg

SEQ ID NO: 23843 - DNA, 675 bp, Glycine max
  Intron number 2 from transcript Glyma08g45450.1 (locus Gly ma08g45450) derived from phytozome v7.0 (chr-ID Gm08; pos 44830634 to 44831308)
ttgcagtgtccaggtgagaaactcaggtattggtggtatttggttcttttttattttcttgacactttggtcttactgtttgtttgaaataaaaattaaatgatgtgagaatggattcgttgcaattgtttgtgtttgattgttaccagtgtattgtgtttaaagtttagagtaggagccccatgcgctgggtgtattttaatacctgagatgagttgaaagataaaaagttatccagaaaagccattcattctaggggggcttttcacctcttcttagaacgctagggagtcaaagggaaggtatgtgtgccttcttaaaactttgtccagccatttttcaaccacatgcaacaaaggactgcaatttgtttgctagttcctagtctaaaccctctaaattgttatagttattatattacttgtccaattttattagttcacattggcatcctagaggataagtattgcttttttcattttcagttttctgccacgggccttgtgctaagtctagtattgttgggtcttatagtggcttaaaatccttacttttgagtcttatccttaatgtatttggcataatttattatttgagaataaagaaattgagaaatttataaaatttgatggattatatacttgattgagtaacatcaattttattgatgactag

SEQ ID NO: 23844 - DNA, 775 bp, Glycine max
  Intron number 1 from transcript Glyma12g01190.1 (locus Gly ma12g01190) derived from phytozome v7.0 (chr-ID Gm12; pos 678102 to 678876)
aggctgcaccaattcccatatctttttcttttgtagctgcacgttgtcacagaagaataagatccagatagacaggtcaaagaagaagaataggatctagataaaaaaagacaggatgatcaattaattatttctcttgaaattacccacatgtgagaaaaacaataatcattttttttctaagctctctaaagcccaatttttagattgttcttcctcacagtcaattcttcaattttctatacaacatatttaagcaataaactttttccctacacattaaagtttgtttatcttaacatatttaatcaaaatggtaatggcattcatttatacagtacggtgtagtaagatttacatatatacaacacccatccaagctcattgatctatatactcttgaaggtttagtttctagagtctactatggtacacaacaacatgcaaacaagaagtttcttgggggcctccaattaaaaatgccacctgaccctacggtttttcaatctctataacaacaacaacaaaaccttattccactaggtggttttttcgatctctagttgtaataaataccttgtgtgatggataattactattggacgcaataactgtatggtatcccaacaaactgtctagtttcaaatgcgagttagccttatttataaaataataaatcatctaaattctagaacttcccattcaactaggcagtcatattaattgctattaaggaagagcgattgcctgattcggagtggcagcatcaggttga

SEQ ID NO: 23845 - DNA, 993 bp, Glycine max
  Intron number 1 from transcript Glyma11g34700.1 (locus Gly ma11g34700) derived from phytozome v7.0 (chr-ID Gm11; pos 36487202 to 36488194)
ctcttcaaactcgcgcgttcttcccccttcgcctcgtacgttcaatttcatgctatttctatgactttgcctccatttaacgtttgatttgtgttttttttccaatcatttgcttgtttcgtgctccttgatatttgttcaaatgaaattaactcattcgttgttgttttttttaactagccttttttttcggtttatttcgctgaccatatcaaataatttagttgtagaattatatgcttttgttggaattttatcagctttggacttgttttgaatcgtgtcagtcattttcttgggggaaaataagatgaaaatcagaatgagattttattttcctgtttatatgttaaattaagaaggagaattttttggtgtcaggaagaatttctttttcatgttagtcaaagtaattcatcatcatattagtttgtgcttgtgtgtagggatgtttaggttaaagaagaaagataataatctagattaatagtattgtgccattgtgtgtaagtttggtgtagctaccctgtgcttattgtcaacttttacaggccatctaagtttgattttgtgcaattggcattgaacttaaaacaatttttattgtttgattaacccctagtatgttaggatggacgagtttgcatgggaaagggaagagaggttagtttttcatttttgaatttactgaattattaaatgttttaaacagaagaatgtggggtgattggaaggttacataataatctcactgttttacaaatatcaattatggagaatgtttacttgaaatggaaaattacccctcccttcccttccccaccaaatttgtccatccatgaatactcttaaatgattcaaatccacccttcttaggtgttatggctttcaatggatttagaaattggggaatcctaactgtgaagaaattaaacaattctatgattgacttctaatattatgtttttttgtcaaagctgctgcaggcagtat

SEQ ID NO: 23846 - DNA, 425 bp, Glycine max
  Intron number 3 from transcript Glyma09g04300.1 (locus Gly ma09g04300) derived from phytozome v7.0 (chr-ID Gm09; pos 3157067 to 3157491)
ttgctcgcagagtttggaaggactattttgctcaggtttgtttctgctacattttttgtttcatgcttataattatatacctttaactcatatacttatttttattttaataatgataatgattgtggttgtggggggtgtgatgtagtgtatatgttaagtgttagcattaacagtcgttcaagcttcgaaggaagataggaaatttttttattggtttgatctgtaatgtgaaaggtgtattatgtattttttaatctctctcaaatttattgatttttctttgaataacttagctgcgttactaatttcatgaagatggcataaactgtcagtcttagagtaccccaagaagttttgaacaaattaggcctcataataaaattctaataattaattgacactaactacatatttagttcaac

SEQ ID NO: 23847 - DNA, 520 bp, Glycine max
  Intron number 1 from transcript Glyma10g03910.1 (locus Gly ma10g03910) derived from phytozome v7.0 (chr-ID Gm10; pos 2911482 to 2912001)
gtcttccgaagcttcgacaatcatagatagtaagttctgaaaccacttttctcaactctttcttctactcgcgttagggtttctgcattattctttgtttccactcttcaatttaattgtttctttcgcaacgaaaattcaaatgcgagttctggcgttttcgctgttcgttaaagttgcgtaattgcattctctttcttcacttccctttcgcatctgaacttgtactctgcactttgttctgttatggatgaacgctggatttggttattttattcagcggatttggttatggatttttaattttagaatttgtattaatatcgaatggtgattgatgctgttaactagtcttctccttgatgagcaagtgtagatgggataatggttgaattctttatttcccctttttaggttcttttgtgtgtgtgtggtttaatttttaatttgatttttggtttctgttgaaaaggatactgataagttgttgtttcatgagtttggtttcacagctgctgag

SEQ ID NO: 23848 - DNA, 783 bp, Glycine max
  Intron number 1 from transcript Glyma11g19220.1 (locus Gly ma11g19220) derived from phytozome v7.0 (chr-ID Gm11; pos 15914848 to 15915630 reverse strand)
ttctcagtcgcttctcgaaccctacttcttccgcggtctctctctctctctctctctctctcttcatttttctgtgtattttaactacttcgtgcattttaattctcgttgttctcttcgttcgcaaagttcctttccactctgcattgcatcaacttcgcatttcaaatcgtgtgttttttccttcttccatttctcaccttcgcataaatccatgcttctttctgttgtccgagccaaccccattgtttattttttggttaggacggtgtgaatggatacgtagacattagttttactaagatttatgaactcgttagttaatagaactaagaattgcatttgcagtgcttaacctaggaccagacataactgattaacgttttattcagttcttttggtagatttgtgctatattgtagcttgatggtagattgtgatctgggaaaaatcactgtttttataggtagctttagtaagtgtaaactgagtgatatatattatgagaggagtggtttattgtgaaaggtgaaagcaacaaacaatgtaatcaagccctatatatatgtatagggcagtgcctcctcagggtgagggggcctctgcctccattttttgatacgcgatactgttaatattattttcaatttggcttgcccaccttagtacattagtctagctcttccttactttgtatagagtgtagatgtagatactttttctttgattgattattgagaggatatgtttctctattcaggtgattgcatttgaattcctgta

SEQ ID NO: 23849 - DNA, 980 bp, Glycine max
  Intron number 3 from transcript Glyma08g44120.2 (locus Gly ma08g44120) derived from phytozome v7.0 (chr-ID Gm08; pos 43849471 to 43850450)
gggtcgtggtacacctttaaaaaatataccaagtatggtgctttccttttttgaattcttgttcaataatggtgttttaattcccttctgtgtatgctcaagccaacagaagttgatataatgcataatgtacttacacaagcattccacattcttcctgggttgatgacaaaatcttgataaaagtgtatgaattgaatttaacataaatatcaggcaagaatttgccagatatattttgtttctatactttcccaattatggtcaaggatgtgccatttgtagagatggttgattgaaggttttcaaattatagggttattgtgacgcttcaattcaatgattatgtgagccaaggacatatgcttaactacatctttccccccaaaatattgagcccctcaccctgcagattttcaagagttgatgttccttacaacattagctgttactttgataatgctgtttgcaaaatctattagcgtatactgatttgattctcttgtgaagtataatctatttataaaatagttactttttgctttccttcttttcctattaaaaggggaaaatatttatgtatatttccttttccctcttactgtatcttcaatgacaataagaatgactcaaacttagaaatatctgagctccttcctttttaatggcaaatgagattatcagctaattatagtttatccatgttatttaatgtcatttaactgttgggtctatggaatctttagcactcaagataatgggagagtgttagcagtaataggaaaggttcctgttatcaatatataaataaacttgacacgatatatgggggatttatttattttttgttcttatatacattgattacattcgttatgctatgaaacacaaatgctcgtttgttcttcagaacaactaaaacttaatgactcttgcattttctgctttagtggcatttaagttatctagaaggaagactg

SEQ ID NO: 23850 - DNA, 541 bp, Glycine max
  Intron number 1 from transcript Glyma11g33200.1 (locus Gly ma11g33200) derived from phytozome v7.0 (chr-ID Gm11; pos 34988294 to 34988834)
gaaagccgaagctctgtcctttcagactttctcaggtaggccataagtgcgatgacaaattattttagaaggttcttatagttatgaccattcctttaatatgaaacttgtttatggaccacgtttcttagtacatttgttctccaaatttcttatgtgttgaatttagaagcaccatacccattgatgttccatactatattatttccattgtctttctcaaaatactggctttgaatttctgatgttattttgtatctatatttttctaaaaataaagaagcaagttagtcttcgattgagtactattttttttttcgtgaacttttgtatatcagtgtcaactatcatttgatggaggaaaattaaatttgacttctattaaataccaattaagaaaaattagatcagatgttttttgttgcatgaagatgaaatgataaacatcacgggattttgaaatttcattaattggtcttattttctccattgcattatgataaagttactaaaatatatcttcctctcctctaattctagg

SEQ ID NO: 23851 - DNA, 782 bp, Glycine max
  Intron number 1 from transcript Glyma11g33660.1 (locus Gly ma11g33660) derived from phytozome v7.0 (chr-ID Gm11; pos 35509517 to 35510298)
ccaatttcattcattctattgttttgcaggttacaatctacatctacataccttacacatcaatgcttctttttttcactactttggttgttattttttattgcaaatgttagttaacaaactcaaaaactaaaaatgtttttattgggagatatgatatttttgccgctctcttatgattttttacactgaatgttttcctctttttgtttcttgaccttacaacactgtggttagccagactagtaatgtttttctaattatttatgcgaaaataagtttattgttttcaaatgttttctacaagacttttgtcagccggagcatagtgcagctgttgtttgtttacatttgtttggtttgatttcttagataacaaaaatgcttagcgaggccaaaggacgtagaaacttgtgattaaatggttgaaattatatccttataaggaaatatgtgcttaaaattaatttggcaaaagatgttcttatttaaggtaagatgtaagtaatgtaatgtgtgaataataaataaaggtatttttctctcttatctttttgatagaatacagatagtagatacttcgtacctatactatgataataaaaataaagaagaatatggatggatggaatttgcttttatttttcctcatcaacctgcttgttgttactaatcttatgtggagatatttaaaaatgttcattcataagttttatttaaacgtatgattatgattctgattccaattgtaatatttgattttttttttttttttgtgcagg

SEQ ID NO: 23852 - DNA, 666 bp, Glycine max
  Intron number 1 from transcript Glyma10g28290.2 (locus Gly ma10g28290) derived from phytozome v7.0 (chr-ID Gm10; pos 37178200 to 37178865 reverse strand)
tgaatcttttaaaaccccttactataccttgcaaggtttgtgcatgacatacatacgtatacttataagccattaaagtatttgtttgtttgactgatgctgttttattagtttaattatttaattatgcatcaaagtattgtttctccctgataaggacttgtgatattaaatataaagtttttttttttgtttttttttttgtaaattattgctgtgatgtaatgttaatgtaagcttgttttcttctccttttataatcataccgtagtatgatgagtactgcgacttacgtcaggttttcttctatgtctttctacttcatttggattccaaaggtttcccagttaatatagtagagtatgtaggaagcaacattaggtggctaagtaccttagtttgatttgaggcctttctgagtttttcggttccgtggatcgattgattcatcaccatgcctttatatgagttataccggctggccagagagaagcttggtaaagaaactaccagcacacgtgctcctgatcaatgttcctcgtaagttcattagcataacctgttgtaagctttttcatatatgtgtttgaattttgaattgtattcttttgtttatttatttcttaatgcttttttgggtttgaaatatgatgtgcaggccagaga

SEQ ID NO: 23853 - DNA, 741 bp, Glycine max
  Intron number 1 from transcript Glyma11g02220.1 (locus Gly ma11g02220) derived from phytozome v7.0 (chr-ID Gm11; pos 1389026 to 1389766)
ctttaaggcaacctagagttattgcagagatcattgtaagttcatttcttttctttgatttttaatcaatctaattaacttagcttatattttctggctcataatataaataaatagcaaacaggattgacacatctgatcgagttttcttcacacacttgtgatttggattcaattctcagatttctcctgtttgcaagtgatatttaaattctactataaatcctcgctaagattgggggtcttctctgaccttgtggggggtgtgccttcccctaataaactttttttttcaagaaaaaaataaaactagttatttgaattagtaagatccaattctttttctctgtttaatagttacaacttacaagagagtccctagcaaatagggctaagagagagcaatatgactcacagggaataaaccattcatcatttgcttcgtaatcaagttgaattgctactagttcacgaggcaattggcatatgacaagagtttttcgtatccaatttctatataatttcatagtctccagatttcactgtgtttcactagtctaaatgagttatatatataatgtgaaagttatcgtgtataatgcaatgtgatttaaaacaattcataagtcggggtagagatgttagagaaacacacatgccaaaatatgtacaatggttttaaaatgtgtaagactgctattgacagggaggaataattctcgggccatcagtgcttggacg

SEQ ID NO: 23854 - DNA, 658 bp, Glycine max
  Intron number 2 from transcript Glyma10g30020.1 (locus Gly ma10g30020) derived from phytozome v7.0 (chr-ID Gm10; pos 38710919 to 38711576 reverse strand)
aacgagtctatcactgcccttttgattgtaagtcttcactgttcttgagcttgtttgccataagctgttgttctaaagaattggttaaattaaaaatttagtcctactgctaacattgtttgtcgttttagtcccttcatgaaagatctatattttggtctatacggttaaaaatgtttacaaaattatctttgataatatttttgcttttgtctgtgtatgaaacaaatttacattttgatttggctccatcataaaaaaaatctttacattttggcccctacagctaacacacttttttgatttagttcctgttggaaaaatattctaacaccgatgtaatgttaacaaatggtggggagtaatttgcaaagtttttccatgtagggaccaaaatgtagaatttttttttcatgtagaaactaaactagaaaataatgtctaagtgtaaggatcaaatttttaatttaacctaaagaattcaactcctccaaatattttgccatcctttaagaggcaattatatctgtttattgatgctttgtttgagcaatagtgggtgcagcttttctttttcttgtttctgttggatgatgattaaatttcatttttgttgttctcagggtgtttgcactggcgtagtcattttgctgtttag

SEQ ID NO: 23855 - DNA, 561 bp, Glycine max
  Intron number 1 from transcript Glyma10g30020.1 (locus Gly ma10g30020) derived from phytozome v7.0 (chr-ID Gm10; pos 38711672 to 38712232 reverse strand)
ctgctatcgtgagttctggtgagcattttggtgtattactttgcagctttctgaaaattgaaatctctttccgcgtttgttttgttatagcagggtttcatcttctggtgttgaagatttaccaaaactaaatcatgatcgtttcttaaactgcatttttataatttcctcacagaattatgtactaacatgcgaatctttttgatccttgtgctttgggattaaatgattaatttccctccattttttttaatgtctgcatctgaaataggatcatgttaggtggccagggtgagttttttttcccttgttatggaaaatcttaaaaaacacgtttgttctctgattgcagtgattctatttgatggtgagatcgtggagttcttaacatgggaacttcggagaaatagatttgtgcagtaaattggctttgaacttgacgactcagcaatactctgaatttgtgtaaaatctgctcgtgcaattatttattttggaggttggacaaaatggtttttgaaatcagttctgttgtttcaaaattgcaaacgttatccacct

SEQ ID NO: 23856 - DNA, 746 bp, Glycine max
  Intron number 2 from transcript Glyma10g06430.1 (locus Gly ma10g06430) derived from phytozome v7.0 (chr-ID Gm10; pos 5154108 to 5154853 reverse strand)
gacaggtctcgtgttctcgcaatctttgcaaacactttaattcaagtctttgacgtgacaatgcattttttgaagctcaggaattgaaatcgacctgtttgtatgaaatgaaattggaatttgtatggtttgaggaaacattttctgttttttttttttataatgtgatctaagcacaaattgctatgaatggtaaatttgtttacttttataacaattactataaacgttgtaccaatttactaaagatgatttctgattgtttgatagtgcaaaaacttttatattgacaaaacatgtctattaaactctacttatttttgttttttttaagagtttaatcatacactggcagtgcagagatttttatattgtaagacaatcagaaaagatctcaaaacttttaaagtaattattataaaaaccaataaatttaccataaatgacaatttgtgattggatgccattctaattaaattcttattttagttacaaatattataaggccatatttttttaattaacaataaaagcaacaaatggaaacaaaaaaagttttttgaaaccaaaagcttctaaggtagcaataacatgatgctgcttcttttatttcctattcaaaatgaagttacgcttacaactgaattactgagttcgtgagttgagggaagaaagaatgtcaatgatattcaattgatgctttttctgcaggagaaaagactagcagaagagattgctgctcttga

SEQ ID NO: 23857 - DNA, 382 bp, Glycine max
  Intron number 6 from transcript Glyma10g34180.1 (locus Gly ma10g34180) derived from phytozome v7.0 (chr-ID Gm10; pos 42361592 to 42361973 reverse strand)
ttccagtaagtgtgtccattgatgtaaaagtttgatgttctgttattggatgttgattttatgtttggttaaggttttcaatatcttaacctaaatggctttactgaaaattttgtttttgaaatagcataatggtgctgatggatccatgtagccagcctcaattaataatgggacaaggattggttgttactgttgcattatcttctttttcctacttctttttcttttttaattatgtatgtagaatattcaattatgtaaaatttctttgtaaatatctgtatatgtaatttgggagtcattttgattttagttgaatagatatttgaatgttttgaatttatttttccaggtagctcgtgtgggacagtctgccaca

SEQ ID NO: 23858 - DNA, 1033 bp, Glycine max
  Intron number 1 from transcript Glyma10g34180.1 (locus Gly ma10g34180) derived from phytozome v7.0 (chr-ID Gm10; pos 42362956 to 42363988 reverse strand)
gtgtttcgatatcttacatctctctctagccacaggttccactccttttcccatttaattccaatccattcgtttctaatttgctcaattgctcctatttcgaatttccatgctatcgtgttgagcatgactcaaccatttggatttgaaattcgggttgattttctgcggtgtgctcgatctcgatttgcaatttcagctgcttatagttgcttagtcaaagcattgtcaaaaaatcatgtgattgtgtgaattgtgaagtttgtgatgggaatttggaagattttgctttcttttggaacttgattgttagttatagtggagagtaatgctagtggttgcttttttttcctaatcaatggtaatgggagagctgtggcacacaatggttactcattgtaaaattatgcatctcaaaaacgtgagatcacaaaatgtggttaacagtaatccttttacatgccaccagttgacataacttcagcaaacctgctagattaaaaacacgtattattttaagaccgaataaaagctcaatctgtttgttggtgatctgggtgtaggaatagattctgatctctttgtggattttgatgtgtaattttctgttaaaatatcagggagggtgcggatgtggcatattcttaagttttgttaagatgtcccatattggttaggaatatggttgaagtactcctcataaggcttggacatgtatctccccttgaggttacttttagggtcaagttaaggtcaaggtggtgttgaagtcacgtatgccatgctgcaaactgttttcagtgttcacgctttaccttgataacaaattaacaataaatgccctgaatttttaaaatttattgtattctcttgtccatgctttctaagtttaactcctctggacattttatgtgtgttctctagagaatttgtcatttaagatccattgatgacagttaatcctgaagtgacaatttaaaataaaaggtgatttgaaacagttcttcctggtctaaaggagtagtggagagat

SEQ ID NO: 23859 - DNA, 979 bp, Glycine max
  Intron number 1 from transcript Glyma09g32540.2 (locus Gly ma09g32540) derived from phytozome v7.0 (chr-ID Gm09; pos 39064508 to 39065486 reverse strand)
tttggggttcccggtgccttcactcctacttgcaggtctttactttcccttttcaccataaactaaactgaaacagattcatgggtacttgagattcagcatttttacccccaaagtttttatttttaaattagatatgaactgttgctttgttgatccaagtgattttttaactggggtatgatgaattggatattggagggtcttgattcttatgtaatgggttttggtgttgaatccccaaaattttggggctactttgttgttgtttcgattgttagtagggttttgtgttgataaagtatagatggtggtgttttaaatattttgatctgaatttgtaatagcttgaagcacgttcctggcttcattgagagagcagaagagctgaaagggaagggtgtggacgaaataatctgtatcagtggtgagactctaaacacatcataatttccccctccatgtgtgcatggctgtatacttgttggttattgatttgggatgtcagcataagaagatgaagggggtgtacttgttggttaatttgacttgggatggtcgattgttcaatcaattgataatgatggtggccaagtgatgtatactgtagtattgttgacttgtgtttgaaaattcttctcaattgttgcatgatttaatctaaatttccaaggtacttgccttgaaattcaccatcctttttctacttgttgagcctccgggttttttctggacatggattcctaatagcctgttgttgcttgattgtttatttaattattggctattgattgttgatttgcttttatcatgggtataattctatatggattgaactggccttttgtgtggtgtggtgagaaaccatactcatactatgacctacaaaagaaactactcatggtgctagtaatagaagtcttgaagatagatcgtttgttaaatggctaatctgaaattgcctctgattttgtagtga

SEQ ID NO: 23860 - DNA, 771 bp, Glycine max
  Intron number 1 from transcript Glyma09g38760.1 (locus Gly ma09g38760) derived from phytozome v7.0 (chr-ID Gm09; pos 44044931 to 44045701)
ctcctcgggtactactgctgccccctctttttctttcatgggttttcgtttaaacacgctaaagttccaatcttcatggttcccatatgaattgcatgcttcaactttcggggaatagcttcaattcaatcaattaagtaccccctttatcatcaaaataataatgatgataaattatgtaccaggtatcaattttatcatttttttggacaacatgcagttacttcactgttttttatattgttttccaatcagaattgaagttttatctggtttatttgcatattaaaagtttgcactaattgacaacgagccaatgaggtgaaactccaatcctgatccgagaacagcaacaaaaacgctttgcatgtgtttgatttctattttaaaaaattattttggtttttaaaacacttgttttggaaacaattttctaaactttgtagattttggtgggcgagtcctagtgctgcggttaagttgtgccttggtaatcagttgatcatgggttccccatacttttacatagcgaggagccttctgacaccgggatacattagtttatagattttggatgaaaaatagagtgctgagtaatgttaaattgttttaaaaacaacttttaaaatcaaaaggtgaaaaggaaatcaaatagactcagagaactgcatttaggttgtcttttgtttttatgatttcagaaaaaattataactttgggttttggtttgtttcagcattgactcctcaattgaagtctaccttggatcaa

SEQ ID NO: 23861 - DNA, 388 bp, Glycine max
  Intron number 2 from transcript Glyma10g29710.1 (locus Gly ma10g29710) derived from phytozome v7.0 (chr-ID Gm10; pos 38486335 to 38486722 reverse strand)
agagaaagtaaagaaaatcctgcagaaaattggtacgtacatctctattcaccctcccttttgcttttgtcttctttttaaaaattctcatttgatgttaatttgcttcaaatatctcaactttaccatgtcacttaaatcatccccgtgtttttcacttattttgatgtttatttgttaatatattgcaagaatcaaactttacttttttttttcttggtacatagcttccaactttaccatgctgtgagatattttagtactgtttctgtttttgtaagcaaagataaagataattagatttaagatttgacagattagtattctttttttgtcgtggagcataatgagagttattgttgtgcaggggtgtattctgtgaacatag

SEQ ID NO: 23862 - DNA, 456 bp, Glycine max
  Intron number 1 from transcript Glyma10g40330.1 (locus Gly ma10g40330) derived from phytozome v7.0 (chr-ID Gm10; pos 47774747 to 47775202 reverse strand)
caggggtgcaagaacttgctcttgatattgttagtgttttgtttttattgacaaatattagttgttagtatggttagttttttattattaaaagttctgatttgggtatttactagcaccaaggtgtccatgaaacactttcctgtcagtatgtatagctaagaagctcaattattttgaggaaaatggtgcatggacactagtgtgttactagatagaagagaaaaatgttaatatgataaatgatatgacaagaagagagagagagagagaaaaataaagaatgtcaattaggtgtattgttgtcaaataattgtgcttgttgcaggtgacaaagcaagacttggaggatacggaccagcctccgttcaagagttgtgtggtggagggtcacgttagcagtgctgtgttcttataatagagtgaagggattcctacgtgtgccgatccagacct

SEQ ID NO: 23863 - DNA, 664 bp, Glycine max
  Intron number 1 from transcript Glyma10g28530.1 (locus Gly ma10g28530) derived from phytozome v7.0 (chr-ID Gm10; pos 37420928 to 37421591)
ggtatgtatgccattatcatcatcgatctaactctaactctctctttctcttccttctaaccgccgcttccgcatctcgcttccttctcttccttctctaactatatatattttctttttctctctgtttcttcctttttattttatgcttttttctccgatgtgactggcgtttgtttggtgtgtttttcgtgtgcgtcgaaccctctgcgttcgttaattttgttttgtgttttcggatcgacttgtttcgcgttcggttgcggggatcttcggtttaggtttgtttagggattttttgttttttgttttttttttctgttgttcatgagtttttcgttggatttgttgtgttctgtgagattgatgggctttttttttaaaatttatattccttcaatgttttttcttttttggcaaaatgaatatttatttatgggcggaatgtatttgcgatttttgtctcttaaattcatgttcgaacggtggtgtgactttcctgtttggttctgtttttatgaagcctgttgactgcaattttgcttctgaaaaattaaaaaggaaatatgttactgtcatttttctacgcatatctaatatatcttctttttgttttttatttatttattttaattatggtggaattgttcattctggcaggtaa

SEQ ID NO: 23864 - DNA, 812 bp, Glycine max
  Intron number 2 from transcript Glyma10g01030.1 (locus Gly ma10g01030) derived from phytozome v7.0 (chr-ID Gm10; pos 738006 to 738817 reverse strand)
gcccctaaaccagaggactttccatctgtttgcaggtgcatgtttcaatcaggtcatcaattcagcttaaattatttgtctttcatgatttgtagctgtgtaatatttgctctaggtttaagtaatcaaatgaattcctaatccaagaactagttgatttggcaaaaaatcctaatttgatatttatcatagtttcctattttattgatagattcatatttgtaatataaccaggatatgtatgtgatgtagcctgtaggcatgtcggactaaaccaaccacgttatagtcagtgcaaacttgtttgtaattttttttaatctaatttcaggtattcatgctagcatgggaaaaagtagatggtattcccctaaagaacaaaattgattttacagcttacgttagactgccagtagtgtctcaatttcttcactttaggaattatttattgaagtttcaattaacaacctagtatgctaactaccataagttgcataaaattgacgataacaatatacagctgaaggagatttaagatgaaatatgatgataatctaccgaagcaaagtcaaagcaatggggaagaaatttataaggatcaaaaccaagtttgaccaaaagtactgggaccaaaaacacatttttcccaattataaaacattacttgttatccaacactttttgattgtgatgatttagctttgataacatgtaattctttctttatcttatcttcggcctaaaatatagtgacatacttgcttgttttatttgtttgtagagacatactggtgggttactcaaatcaagta

SEQ ID NO: 23865 - DNA, 898 bp, Glycine max
  Intron number 1 from transcript Glyma10g24620.1 (locus Gly ma10g24620) derived from phytozome v7.0 (chr-ID Gm10; pos 32179028 to 32179925 reverse strand)
aacagcctgagtataacctcttgtccaggcacaaggtatatttgctctgcagcgagaaatgttttttttttttattttttatatctgtaggaatccaacatgggatcaggggtttacaacactcacacacttgctcaaccaaccaacaactacttagcaagatcccttggtaacagcgagaaatgctagtaacatgttttctaacacattttattattggcatgaatatgtttgtatgaaaatgtttgaaatagtgtgttagagactctgttgataggaccaacaatggttaaccaagtggtccagggttcagaatcctggccttagatatggaataaaccatgttgttggaaggcaatactcacattatgtgcgctcactgtccttgaggaatattagccaatgcatctggcgggcactacttcgtactaataggatcataaaaaaaaagattgttgatagaacattttttatcataaactcgtctaggcacaaggtatttgttctgccaggagtgctagtgacacactctaacacacttagttattgatataattgtgttcgaaagagtgtattcgagactgtatgcaagcatttctgttatttggttttggttttggtcttttaattggacaaatcttagatgctgttctttaagagcttttggtactgttctctaatcaggattggattttcacttcaagaatctgcgtgagcctttagtaattctgacaagagaataaaacgaaaaatacacttttgaagaactgcatttatgttttgtgcatttaatgtctcttcttttatttggttttgatgttttcacctaattgggcttttgatttgacttgatcatgttgcaggttgagtcggagtttcttcctctgtacaccaacta

SEQ ID NO: 23866 - DNA, 1000 bp, Glycine max
  Intron number 2 from transcript Glyma11g36690.1 (locus Gly ma11g36690) derived from phytozome v7.0 (chr-ID Gm11; pos 38068572 to 38069571 reverse strand)
acatataaacaggttttttttttttttatacctcttttttgccatgacttgtgagaagaccaataaaagccctagttagaagagttggtcgaatgagggatagctcaataattaaggtagaggaaaactcttaagtgcaaactgaaaactattaaaaggattcagatctaaatggcctttgaagaatcagttttttacagaacacactgatgtggtttgatccatgtaaccaacccacctactgggaaaatgctttgattgttgttagtgttgtatatctctagttttattaatctttgtctccacttactgaaactgtaatgttctggtcataagttctaatatgtgacttaatcccatttagttcatgttttagaaagatttttttatgtctggctgtctggtctgagttgatggtatggtgaatgactatatcactgttgttggaattgggtatgattatcatttcctataatgtttgaaggatcattgagtttgatcaatgacctttgtctgggattttatttttttactttaagaactatgggtgagttctatggatgatgagacatgtctacccaaatattaatatgcagaatggatatgtgaaataggatacaaatgagcacaataacatatgccggagatcaattgaaactgttttaagacttcacactcttgcaccatcaagtaacttcttacacaatatgattgtttattttgaatctttgattgttgaataatatgttatcatgttgatgctaaatgctgcacaataataaatacgtgttttaaaatagtattgtattttaatctaaagatctattgatggaatgcaaatcaatttcaaattattataaacttttatgagcttgacatataaaatgaatgttctttgttccaacgttgaattacatgagaaacttatcgaaaggcatgtcatttagtcgcatgctattctgattctctatatctttctaatcaaaatttcagttggagg

SEQ ID NO: 23867 - DNA, 617 bp, Glycine max
  Intron number 3 from transcript Glyma09g01050.1 (locus Gly ma09g01050) derived from phytozome v7.0 (chr-ID Gm09; pos 608718 to 609334 reverse strand)
tcacctctgaatatatttatccttatagaaatcaggtttgttttcttttctctcttttacgagtttttggaacgttgttttgttgaattttggtattgtgtgatttttatcgtttgctaggtttcacatcttctatgtgtttgttgaactaactttggctttttttttttagaatgatattattattattcttttaatcgtttttatatcgcgatttgtgatgctgcgtaagcgtgattcgtttgaagtttgatattatcgtaaatgttgattttccacgaattcacactgctggcaccttggaatcgtctgatgaagatcggacgactcagattttgtgttggtaaatcaaccataaaacacatttgaaatctaagccatctatcttcatccaacggtcacaaatgtcaatgcatgcaaaattgactgcacccaatttagttttgtctggaataagtgatgtgatagagactcatagagagaaaaaatgagggtgtagaaactgtctccataatttgttgtaagagaaacattactgattttgttaaattataatcaatgatcattagattttgacatcttttaataaccatttctgctggcagggtggctttgac

SEQ ID NO: 23868 - DNA, 900 bp, Glycine max
  Intron number 1 from transcript Glyma10g04090.1 (locus Gly ma10g04090) derived from phytozome v7.0 (chr-ID Gm10; pos 3091640 to 3092539 reverse strand)
gccatcttttggaagctcaaacaacgggctcggatgtatggttcatgttcttctcatttttacttgtccttcttttttgaggtttatttgtgtaggttaaattagttttttttgttatttaatttattctttagatttaatttggtcttctaatttttttcggatttaatttggtcttctattttttcaaatcagttcaatttggtcttaccttccaaattggatcaaaggtattaagaaatcacactttttgacggttttgaacggtcacaaaatgcatatttcctaacacgtgaatttaatttaatataggcgattggaccaaattgattagaggacaaaacactaatttaaccatttatgtattggataattttagtgtgaaaaatgtttgtccctagcctatcttgttttcttcttactagtttggtgatttcatgtttgagcttagtttctttcattatagcgctttataggtgattagatttgagcatatgtatgatacttgttagaattatctatttttggattttaaactaaagggcatgacttgagtatatctagaacccatgttttctttcatagtaatttttggaacgggccaagtatgggaggggtttactcttggatcttctcagttttggattaaggaaaactagtgtgttctagaagcatctagttttatggattcttaccattctgtccagtcagagtcatatgtgttattattgttgttgtgtgtctgcattgggataatatttgcatttattattgttatgataatactgcgtggttatctattgatttgttggtctcacatgtacttagcccaaaaatttaaacttgattagtttccttaaattatttctgtattgtgttgtttgcctgaaggatcttgac

SEQ ID NO: 23869 - DNA, 606 bp, Glycine max
  Intron number 5 from transcript Glyma11g13480.1 (locus Gly ma11g13480) derived from phytozome v7.0 (chr-ID Gm11; pos 9569271 to 9569876)
gtttttcaaaggtagttttctttttgcctggaatttgttattttggtttgtagttgtacatttataggattcatttgtcaaatcgagggggggtagagggttatttttaataaaattgcctaatgtaggctttgcaaaaaaaatgttttgcattcttataatcaggttgtaattaacatatgtcggttttggcaaacacttgaaaagaaattatttaacaactcttccctttagccaattttccctctcaaaaggtcatgaccaatggacagattttggattcatgcaacatcttggagttctttgttgtgtaactatttgaataaatcccccctgccccccttcctcctctcctataacaaaatagtgttgtctttctaagcgtgggaggtaaagatatttggtttggtctttaactgagttgtatgatattgtgtgatctacgtagcttacctcacatagtgggataacacttttgttattgttgttgttttcatatatcatgtgattcatattggttggtgttgctgacttcaagtctttattttagagtaacaatttctcatttcagtttattatagggactggtgataatctttcagattt

SEQ ID NO: 23870 - DNA, 180 bp, Glycine max
  Intron number 1 from transcript Glyma12g34990.1 (locus Gly ma12g34990) derived from phytozome v7.0 (chr-ID Gm12; pos 38082725 to 38082904 reverse strand)
ggagctacccggtatgttcttcaattaatttcatccaacgaatcaaaagattcaaacttcacgttcaaaactcaaatgggtctgctttgttttttttatttattattattatgatttttctttatattttgtttgtggttaacagctaaggccgcgtttggggagcaggagtggtatttc

SEQ ID NO: 23871 - DNA, 736 bp, Glycine max
  Intron number 1 from transcript Glyma11g11080.2 (locus Gly ma11g11080) derived from phytozome v7.0 (chr-ID Gm11; pos 7895885 to 7896620 reverse strand)
tcccaatccgctagcttctgctttctgtcttccaggtttgctctacatgtactaaacatgttcaataatatgtatatatgggttttgttttatgtttacacgaaattctctttctgcgtgatcttgattataagctaggagtataaatatttatttgtggcattctgttatgcattgcactagagttttattatttatcttcctttggaaatttaataacttgttattcaataagttagctaaaagaaaatcaacaagttaacccgcaatttagtaaccagtaccagctagcttttcagttattttttttatcaaacatcgtcttggtcttaaagtagaatttgggaaaagcataagatgatctctttgatgttctctgcacatggatggagttacgattgttagttaactaaattcatgcttctaattctaagcttatctatttgaaaaattgtgaatgatcagagtaataattgtctcaatctattattatccgtggcctttttgtttctataattgttaattggtcttatcaaattctgtaattgcttcatgatgttcgatcatgacctacttttcaaatgcccattttgtcttttatccacaaaaaagaagtctgtgttgggctgagatttgagaacaatatgtttattttttatttatttttttggctgctaacagtattttaatttccactttccatgcatattttgaatgacagtgcgtgaaggatacg

SEQ ID NO: 23872 - DNA, 649 bp, Glycine max
  Intron number 1 from transcript Glyma11g18320.1 (locus Gly ma11g18320) derived from phytozome v7.0 (chr-ID Gm11; pos 14990223 to 14990871 reverse strand)
atacaacgtcaagccaacgtcacccttattgatccgtgagctctctctctctctctctctatttgtagctgctataccatagtctctttgtagtttaattcatgttcttttctatgtttaattgaatttttatggttcacttcaaacaatatttaagtgtttgttagttgttacttaagagtttaattataaagtttattgaaataagttaaaaagaaaatttattttaataaattacctctagaagtttattagaagtgaaaaagcttattctgctttggtaagttcaaaataagcttataaccttacctatagggattgaatctaacagaaggggctaatcttcacaacttgatgactaagatttaagctcagtaggaagaggtgtccatttatagtgtatgacagttcctggaacaggattgactttaaaaaaacgatacatggggtggaccaaaaaaataagtttagaacatttttcaaacacacccaaaatttgagagaggactaagattttatcatgtttcatgtagagtgataatttgtttgagaaatatttgatgttctgtttgctcacaaagagcttgttatgtatgtggttggattgactgagaggtgttgaacacaggaaggaatattttgagattcc

SEQ ID NO: 23873 - DNA, 626 bp, Glycine max
  Intron number 1 from transcript Glyma12g06980.2 (locus Gly ma12g06980) derived from phytozome v7.0 (chr-ID Gm12; pos 4757653 to 4758278)
attaatcaaatcaacctcagccactgcatctgcatgtacgttttcttaatcctttcactatgcaatttttttctctctctctatctaactaacagatatttaactattcagtagaaattttgatttttttttggtgtttgctttttcaaagtttggtatgatgccacccttttgttttggtgtcgtcgccattgcttaagacctttcattatgctcttcaactttccgtgagtttgaaggatcccaaaattcatttttttattattaaattattgattctttttggttaggaattaagtcgtaatttaaaaaaaataaaaattaattttgcgtttggtggggagtttctaagtactggatcctctttcttctataaattgttttctgatcgtaggtcctttggatcagatctgtgatttggggttttagatttgtgtgtctttgcttaagtttgcgataaggtccattgttagctctctcactctctttctcttctgcatgttattcaagtgtctgatactaattactagatttgattttatgaattttgtaactaatgtgtgtgtaagaaattttgaccctttgagaattggttcaggatttgagcttcagtggttttttttact

SEQ ID NO: 23874 - DNA, 632 bp, Glycine max
  Intron number 1 from transcript Glyma10g35310.2 (locus Gly ma10g35310) derived from phytozome v7.0 (chr-ID Gm10; pos 43545620 to 43546251)
attagcaaagagtctactttctgtgtcaaagatccgtgagtttctttgctttttttttattatttaattatatgcatttttttccatctgtttggtcactttggcaaccttctgagctggggtgggaatgcatagacattagacagtttaattataaggttggacaagtagatcagtaagttttaaatatgggtctgcaaccacatcatggccgcattttttcgcagttgtccgcaatgtaaaagtttttctaactcaccgcaactgcaatttaaaaatatacgtgtgattgttggcatttggatgcaggatgctcattgtcatgatggttagaacttaaaatcaatgtttttaagtgtatggaataagttggtttactagtagaggaaagcttaaaactcaaaaatagtttcgttaagtttatatttgatgttgatggagatgttgttagtgagaaatgcagttgatgttgaagtgaatcatatgaagttattctgcttcaactgtttaaaatttatatttttatttatttattttaacgagggttgaaaaagaatagagagagatgaatttcgtgataattaatggaaatcaatggaagatagtacttatttcacacttaaattacaggg

SEQ ID NO: 23875 - DNA, 657 bp, Glycine max
  Intron number 2 from transcript Glyma10g35310.2 (locus Gly ma10g35310) derived from phytozome v7.0 (chr-ID Gm10; pos 43546292 to 43546948)
gggcttcttggcgtcttgcattaagaagactagaggtaagaaaatacaccttttttttctatcatttctttcattttccttattctgtttccgagcagccaacccaacatgttcatgatttagctagaaaatctgaatgagcatgttcgcagatctaaggaaacagaaatttttgaaacatactacatgcttattggcctttgaggatgaaaattatggatgtattataactaatatggatgtaacttgaaagggaaaattagtacactttattttgatcttgattagggataatagtacaagacaaacatggaattcatgaatatgtttatgctgggactacattgttcacagttaacagaaggttcctcgttattctatacaccatcttttatattagtgacttgtttgtattctcctattttgaccactatttttcatttcatcatcctgtaaaaataaaaatgaggactagagaaaaaagaaaaagtgtttcttgctacaactgaggtgaatggatgagggaaacgagcaacatttgaatttctgttatatactaccggaaatctgtttgtctaatgagacaactcttcttatgctttggattctggtgatttaacaggagatattgcaaaacgtttgtgtacagcagcagaa

SEQ ID NO: 23876 - DNA, 978 bp, Glycine max
  Intron number 1 from transcript Glyma11g05400.1 (locus Gly ma11g05400) derived from phytozome v7.0 (chr-ID Gm11; pos 3775535 to 3776512 reverse strand)
aggtttgtgcaaatcatgttctggtttatgaattatgattattgtcgctgatgaatataacctcaatcataagtttaggggtagttttatttgtggctaaaatattgtagatagcttagttaaaacgaatcattgtattcctggctaaattagagcttgaattaaaacgaatcaaccaagtttggcttattgaagaatgccataatattatgattagaggacatttcatatactgttgtgtttagtggactgaataattggttttgtttgaatattctgaatacgaccaatgtatatcgaagttgattattaaatggctgcgaaattgagaaatgacatgctcataggaaccttttgatagtctgttttatttccccattgcgtgtttagttagctcttgaacacagaaaaattgtcaaattgatgcaatgagttcgaaggctcccgtgtgttaattaggggaacagctgtctattgcccttgaaggatcaaggatgttctgcattcaatagttcaatcaaatgaaaaaccaaatgggaagttgcttaatggatgtctgattgatttttgatagtttctaatgcccaaagtttgaataaataatttagtgttcattttactacattggtttttggtactgcttgcattggtcaagttagcagtggggcaaactgactatatgtgcttttcttttcttttttctcctgaattttggatatgttgtacatggtcttatacatattttgttttggtccttgctgattaattggctataatatgttcatggtattggcaagatgaccacatacttcatgactttaactactggaaatcttgcagagcatacattattacattgagtgtgtgtgggtaactataatgaggttttcccttggttacattatagggaatattgacttaacagaataatctatgatgcattgcagattctttcagattctcaaaagagagcccatt

SEQ ID NO: 23877 - DNA, 630 bp, Glycine max
  Intron number 1 from transcript Glyma11g13750.1 (locus Gly ma11g13750) derived from phytozome v7.0 (chr-ID Gm11; pos 9773454 to 9774083 reverse strand)
acgacgccgagaggatcgagtctcgccgccctgaggtccttctctctctctctctctctctcgatttacttacgaggcggcatgcaccaaagtagagaaatttcaagccaatcaaatcaatttatttagtctttgagattggataatgccaagtttctgaaattgttgtgattttcaggaattaaggtgtcaattgattgttgctcctaattccatgactaattagggaaattacgagtgccagttgagtttttagggacactaattcagtgtattacttgtttagttatggtgtgacaaaaatgtatgctcaacttatcttcttagcaccaatcatttctttatatatattgagagaagaggaggttggtttcaaatttcaatggttaaatatttcattattcccaaggttcattttagtcatattcatgaaaattcggatttcccccccttggttttgcatggattggattgaatgtgcgttctacagtttttcagttcaaaaaaccgtgttgttgccgggtgctccattttttggtttctgcgatcatacatcagtttttcactaattttcttatgcctgtttcgatttcagcaaaattttaccatattgaaggaatccgatatccg

SEQ ID NO: 23878 - DNA, 861 bp, Glycine max
  Intron number 1 from transcript Glyma09g31560.2 (locus Gly ma09g31560) derived from phytozome v7.0 (chr-ID Gm09; pos 38242900 to 38243760 reverse strand)
ggcactctcggtggctataatctttctgtggtgaggtaagattctgacacccttttaagatttgagtcactctgcaacttcttaaccaaaatcaaaggaaaacggaacaaaagttctgatttttgggttctctgcaaaatttgttcatttgcgcaatgtctgccatgaaaattcgattgatgatcgtgctttgttttgttggggttatagggaatttgctctagaaaaaagggttttcttatttatttgtatttccttgaatgagattcagagacaaggtagcacctttagcattatctggcagtgataacaatactctatttatgtgtgctcgttaactattgggttaattgttaggcttaattgttatgtcacgcttaatgtaactattgggtgttgtaactatgtttttggcattgttttattcataaatgggtgttcatctttctctcattatgtattgatcaaatgggataagcatataattgtactttcaaactagtgtttgaattttaaaatcagtaaatgacactgataagaagaagtataagttgttgtcaccagggctgttgttatcttgacaatgctgaaaatattttgtttattcatactggatatgtcctgtaatctcggcagtttgttgatgaaaatgatgggagatgtaactaggaatttgacaacgtgatcaacttgtttcttcattattttagtatcggtgtggtatctgatatagtttcaattaatctatataaacttcatgatgggctggtgcttgttgtctgtttacatattgaactttcattttatgcaactttgaaaacagcattcacctaattccgttctttgtttacagttgtcaag

SEQ ID NO: 23879 - DNA, 328 bp, Glycine max
  Intron number 1 from transcript Glyma11g11630.1 (locus Gly ma11g11630) derived from phytozome v7.0 (chr-ID Gm11; pos 8303121 to 8303448 reverse strand)
agagatatttgtaggaacttccagcgaggcaggttattctcttcttcttcgtttcaatttcaaatgattgattaacaattgtttcgttgttcccatgcgcaactattttcttttgattcctcactgtttctgtgccaaatctaggacgttgggttttctcaactatagaaatctttgcatttacatattattatatatgttgtggttcggccttgcaggtcgtgctatcatatagtaaattataatctatttgatctttaatcttgaattgaattattaatcacaagttttgaaaatgtgtccgtggttcacctttttagctgtcaat

SEQ ID NO: 23880 - DNA, 555 bp, Glycine max
  Intron number 1 from transcript Glyma11g08990.1 (locus Gly ma11g08990) derived from phytozome v7.0 (chr-ID Gm11; pos 6358213 to 6358767)
atcaacccctccaaagctacggtatccacccatcttatttctcttttgtattgactttgatttgatttgttcgcatcgatttaacgattttggctcatgtttaatatataaattaattgaaaaattatatatgatgtgtttttcctattggtctgctgatttttttttaatttgttatggttttataactttcatactcttcggtctcttgtaatttgtttatttttcttggagatttttgcgagcgtggaattaagtaatgaacctcttctttgcatttgtatggcttaaagataacaataatgtaggattaatttgctgaggaatttgtggtattttcgacgagtactgcttgtgttaggtgttataggaagattaaatgttgtgtggcttgtattcctcttgggtgagaagtgagaacataacatgagaattgggaaatcgtttcactagaaaactggtgttttggagtagttctttaatgaacgaatatgactaacttttcaatttgtatttgtaggtttggaggctgatcacactgtccatttggttcgt

SEQ ID NO: 23881 - DNA, 697 bp, Glycine max
  Intron number 1 from transcript Glyma12g12830.1 (locus Gly ma12g12830) derived from phytozome v7.0 (chr-ID Gm12; pos 11177564 to 11178260)
cacggagtgcgaatacgtttgagaggttgcataaagtaagttactgccttgtgtgctctgtctgtgtttgtattatagttaaattgttatgtgattcttactgctgtctgctatttcatgaatgcttgtcccaaaatactttgaacactggccattttcatgcacttttgctggaatggtcaaattattaatggaaattttttaaagtgcgatttaagttaattgggatttccatgcatcgtgtactttaaagtttatgaaccagtcatggcagagtggatgggagggagttggaaatgttggtagcctgatattaacatttcagaagacagtgaattttattacataataatgtttccggtaggaatcgtttggttgctttactaactaaatatagatgagtgttaatgttggctggtgtccactctcctggttttgttaaagaaaagaaaatggtcaatgaaatttgattgtgtagaatatagaatgtgtgtgaccagattttgcgtactagtcatactggattaattttgtcttgtttctgtgagtataagcttcttatattggtgaaggaaggagtctatgtactctgatattctttatcattgattatagtagtctttttctttaaatgaataatttgatgagattctgttatgcagattgggcaaggaacttacagtactgtatataaggc

SEQ ID NO: 23882 - DNA, 599 bp, Glycine max
  Intron number 4 from transcript Glyma10g38960.1 (locus Gly ma10g38960) derived from phytozome v7.0 (chr-ID Gm10; pos 46682917 to 46683515 reverse strand)
ccaagattagacaagataggggatacaactacgtaatattctatttatcttttaattttattttgctttctgtaattagatagtgcttcagttgctacctcttcagtcttcattgattaatccaggataggaatagtatttagaattcccagcatgctatgaatacatagagcagagttgctacagtaatcagtgaagttcaggaaacaaaaacagaattcttgaaaagataataaattctgcaaaatttgttaaaaagaattttaaaaagccaacgctttatgcccaatccggataacgcttgcaaaatatctttatactttatggagaaaagtgtgtgtgactcctgggataggacatacagagcttagcagctacactatattgctttgagactgtgtccatttctcagtacttagtagcatattttctaagagcctaagactaaacatgttcttgcctgttgatgagtccatttcaataatcaaggagaacaaggtgatctttcaagtttgctgttgtttgctaaccattgttatgaatattgtaggtgatataaagatttgtttgcatcttatactgtaggacctgcttgattt

SEQ ID NO: 23883 - DNA, 640 bp, Glycine max
  Intron number 1 from transcript Glyma12g14050.1 (locus Gly ma12g14050) derived from phytozome v7.0 (chr-ID Gm12; pos 12739099 to 12739738 reverse strand)
gaacccccagaagggtacactactaagcacccatacttaaatttactttgcatatgaatatattcatatccaatatgtatctgatattgaaactcttggatgacacgtgaagtatcaagcctttaatttttttttttatgaaaattcaatgcagttacatatgaaacatataaatattatcctttgatgaatcagaaatgaagattataggacatagttttttatgatagtgatttagcctttctttgcaattatatgtttattatgttggataaaaacatgttttatgtttttgttcttttgatgaagctttattttagtctccgaattttaattttaatccatttgatcttaaacttaaaataagaagtgattttcaattcgtctccccttactgcaaaagtgttcatgaggagggatgaaaactactgttaattcatcacaattaaatcatgggacctaatcccaaaatttattgcaagtagggactaaaaaatcatagtttatcacatatttatatactattttatgattttctatatatgtatcttatatttatcgcatcctatatatttttagactaatcatatatcgtgtctatgcatcatatataggtaccctgactcatcaatcaagctcc

SEQ ID NO: 23884 - DNA, 782 bp, Glycine max
  Intron number 1 from transcript Glyma10g30400.2 (locus Gly ma10g30400) derived from phytozome v7.0 (chr-ID Gm10; pos 39070818 to 39071599 reverse strand)
ctatccccttcttctctctcaaacaggtttcttcctcaattcccaacccttttattcactcacactgcaccacttctttatatcaaaccttttttttttatataaatttatcatctttgttttttagggtttaaacgttgaatactcattcatgggtttgtcttcaacgtctcatgtaacggttttgcctgtatggatcattcgttttcgttttcgtttttttcctcctcttctcttcgtatcattcctttttttgttttactctcacccactatgcctgttgttatgtatacgcatattatcctttgcttcaattcaatacccttcacccaaaggggaaatatatattctagtttaatttcccccctttcttttgggaaaggtgggtcggaggattttatttatttatttatttttaattctccatacacctattttttaaagttttattttttataagtgccaactacaatgagttaattgttttcattattaattaattgcattctagtacccctcatgtgccagcatgtgttgtatcacttgtatgtcgtgtttttctgcctgttttgttattccttaaaatgggggaatttcgtcaattgcacttttcttcttcctcgatgtcacattacccttgcctcacaatttcctcacagtgaaaaaaatgttttgtttatggagtatttgataatgttttggatttaattttcttaaccattttctgcttgtttgccaaattaatgtggtgtgcagaatgggaagtgctggaagaactgatt

SEQ ID NO: 23885 - DNA, 876 bp, Glycine max
  Intron number 2 from transcript Glyma10g42290.1 (locus Gly ma10g42290) derived from phytozome v7.0 (chr-ID Gm10; pos 49271507 to 49272382 reverse strand)
tcatttcagtcatagacaggtattggcctcaatttgtctttttttacattttttttatgttggattggatttaaattgttttcttgttagttgttactccaactgtggatttaaaaccagtttcagttctaatgggctcagatctcttaaacaagtggttaggggtttgaattttgactcttgtgtatgaagaaaacttggtcgggaggaggtaaacccaccttttagtgccttcagttctctcgaaggaaattagtatccgtaaacgaccggaaataccccttgtaggtttgtaatcatatgtgtatcaagaaacgttgtgggtcaaaagacagacattgaccttggttgttagtatggtataattaagaataatttgccattgttttgttttttcgggtatcaattcactgttcttttagaactggaaaaaaagatgttttttttcctcataagctaatgggattggaatagtaagttattcttagtattttggtttatctaaaagtcaacaatgcatctcaatttagttttcttctttgccgtgtactgtaaaagtggcgattgatttgcatattttgcaggacaatatctctgttacataatgtccttgtttgaatatattctctgttttttttgccatccaattcctatgttttcaacagtgtcccttccctggaaatgcaaataagcatttgtgaacttgttattccatttttaaataatttttctttgtatgtcttgaaagattaatgttgccagtttctaattttgtggttaagtttttctgcagcttctttttagcctttgtataattgattgagtccataagatggtctcttgtggcttcttttcttctgcagacttccatttacg

SEQ ID NO: 23886 - DNA, 400 bp, Glycine max
  Intron number 1 from transcript Glyma09g27100.1 (locus Gly ma09g27100) derived from phytozome v7.0 (chr-ID Gm09; pos 33782677 to 33783076)
aagtcaacattagttcccaagctacatttggtaactcttctcatttatattttttgaagttttaatgttatttatatttatttgcctcttatgtttctctcttggttttgtttgcctttttcatgattgacaaaacttagatatatatgtttaggtgttttttggttctattgttgttctttgatcaaaattagagtttcttcaggtaatttgtgtaataaaggttcgcattaaatttaaatgactaacatagattactgaggttaaactccgattctgattggagaacaataccaaaaacactcaaagaactgtctaagttttgtcctttcttgttttcgttatatcggttattgtgtgtgtgtgattaatttctggagttgcaggggagttgaagaaa

SEQ ID NO: 23887 - DNA, 1004 bp, Glycine max
  Intron number 3 from transcript Glyma09g05960.1 (locus Gly ma09g05960) derived from phytozome v7.0 (chr-ID Gm09; pos 4741231 to 4742234 reverse strand)
tagctctcctgatctttactttttacaggaaacaagtacgtacggtaaaaaattatttattcttttaatttatctattttttgttaaaaacttctaaacttattttccttttttcaataaaaaaacaaataatgttaattaataaaataaactatcattttcttttttataattaagataactagctccaaattaaaaattaaaaaaatataattgttattattctctttgcatatattattagttaagtagaaagtaattgggcgaaaatagtgaattgatgatgcgttccaacaatcttaaatactactaattaataattaattgtcaacatgatatgattaatagatagcttattttatgtatgtgcttaagggttcaataatcatgttgtgtgtgtgaaaaaaacatcaattaagaaaaaacaaccacttaaatgaattttaattcactcaaaataaaaattaaccaatttttttaatttttgtaaattagtttaaaaaatgtatatatatatatatttgtatagaccatggatatccttttcaccgtagcaatcatattcaagtcttataaataactttggatggttatatatttaatactcaaacttaaaacgttaagttagctagaacaaccccatttttttataaaaaaaaagatatattttcttctttcttatatataagacacttaattgtcaaattcttcaaaattaagaaaaataattaatttatttgataataataaatttataactttttttaaaaaaaatttgtcattaatattcctctctactccaattacttgtgaatatactttctcacttcttttaattaatacaataaatatcataaattgggtactatgaaaacaacaaacatcaattcatctttgggtattatacaagttgagggagtactgttatactaaaaaaaccaaatataaacgtactgaaagactttgtaggtgtcctaaacattaggtttgtttcaggggaatcc

SEQ ID NO: 23888 - DNA, 535 bp, Glycine max; identical to SEQ ID NO: 23345
  Intron number 1 from transcript Glyma12g00270.3 (locus Gly ma12g00270) derived from phytozome v7.0 (chr-ID Gm12; pos 50888 to 51422 reverse strand)

SEQ ID NO: 23889 - DNA, 970 bp, Glycine max
  Intron number 1 from transcript Glyma12g31930.1 (locus Gly ma12g31930) derived from phytozome v7.0 (chr-ID Gm12; pos 35468467 to 35469436 reverse strand)
tacaaactagacaacctaatatccgttgctttcaggtactttttatatgctacttttttctatgattctatgaatattcttttccatatgctaaatccatgcaattggattgtgtgttgtacattaaatggacctctcaaggaaggtcttttctattccttcgtctgtgtgtatgccaatgaaaaacgtttttaatttattattttttcaaaatcatacagcaggaattccttttaaagaatactattaccttttattactttatttgttatgatctgcggcgaattacactagatgtataatctatgtcggaaataatgaaataaagcagtaaataaaccaagacattctcccataatttaaatggtagttttcaattaaaagatccatcaacaatcaaacgcataaggatgcgtttattatcattggtgggttgtagattttgcgtacggaaacgctattgactaatgtttttcaggtttaaagtctccaagactgatttattatcataaaattagccaatgtaaactgagcagaacttgtgtagttgaatataacatgttgaaatatagaagatcttaacttcgatagatggaaactgaaaacccccatttccaattactttgtgccaagtgtatatatatgttatacgtgaatcttcaaaatttctaatgctggcagtggccgctttattggcggcgacacgttacctccaattgataatttttctttttatataattaatctagtaacaaattaaaacatgtacctaaccggtggcaataatataatagtttataatttggactgttttcaaccatgaaagggatgtttgtttcttaaagaagaaaatggttgcgctggcataatttattagtgcttcagaaaaaaaaatttaaaaatggggaaatcagcgttaatggcgtttttttttataatttacatgtgggtttgtcatttgtacagtgga

SEQ ID NO: 23890 - DNA, 953 bp, Glycine max
  Intron number 1 from transcript Glyma11g16070.3 (locus Gly ma11g16070) derived from phytozome v7.0 (chr-ID Gm11; pos 11768175 to 11769127)
gcaagatcaagttcgttgcttcatagaagaggtaagggacatgcactgtttgttgatagaatacgatatttagctatttgagtccagtttttgtttgctctgagcctcaactatatatgatgaaaactattccaggtaaattagtatctgggtttgcttttttcgctctgtagttttagatttatcttttgggttacaataatttaaaactactcgcgtgtctttatctaacaatttaagcttttggaatacttggtctgtgacatggaaccaaagcatgtaagaccaagttgtcttaactcttcagtttgatacttgtaatactttcttaagctgtattatttgttgcttaagtattatgaaaaaggattatatgtggattgtatccatattttagtcagacaaataatttatagctttgtgaactttaaagtactaaacagtttgctggtttcattaatattcatggtgggatatggttgacacaaataagtgagaacatttggttcaaatgacttattttattatatgtgatgctaagaaaagctcaatacaattaattcattattttgttagacacacagtgtttgatagcaaccaagccaatttttagctaattcagtcctgtttatgttttctcaaactatttactgaaaaattttgcaggaaaatttgcttctggatttcttgtaactttttcttaagataatattcgtttaagtatcaggagaaggattatatatggactgtttctatattttaatcagacgaataattgatagttgtgtaacagatagcatggttaaatttatagtattacctagttagctggtttgcaaatattcatggtagtttatactttgcttttggaaatttattattgaagcaatgatccaaattaatttgttgttacaacaggtcattggtgaaccagtctatcttgtgggcaactc

SEQ ID NO: 23891 - DNA, 525 bp, Glycine max
  Intron number 1 from transcript Glyma11g27460.1 (locus Gly ma11g27460) derived from phytozome v7.0 (chr-ID Gm11; pos 27180502 to 27181026 reverse strand)
ccgctgccgttgatcttcacggtcaaccaaaacaggtaattcataaataaataaaaaagaggttttcttcatttgttttttttttcctagaggtatggctttgaatttgtttaacattgccgttggaatcaataaaaaaaaaaattcaatcaattagtgatggttttttcccctcattttaatgtcaacaaaaataattagtgacaaactttattggaaaaaaatcataaattatcattttgtaacggttttaagttattttatgtcatttatatactattctaatttaggggttcaaataaaaaaagaaaaaagaaactagacggttatttaagaatttataaattgtttatgaacccaattaacaatctaatctaaattgttttgtcactagtaattttcatttttgttgaagtgaattttgtttcatatatatgttcaatgggaaaagtggacgcaatgaaatgagttttcacatgcaattttgtttacttgtttattgttaggcttttttcgggatatttg

SEQ ID NO: 23892 - DNA, 978 bp, Glycine max
  Intron number 2 from transcript Glyma11g34040.1 (locus Gly ma11g34040) derived from phytozome v7.0 (chr-ID Gm11; pos 35872760 to 35873737 reverse strand)
taccgcgccggcatcgtccccgtctcatatcgccggtactttcaactttctcattcaaagttttttcatcccaaaaaaatgggctaaagatcaaataagacagaatatataaatttgagaaagtgttcatttttaagtttaaattagacttaaactcacattcaactccaagaatttacaaacaggtcaaagcataaatgatagcaataaatcaagatagagtataatacagatgggagaaacctaattctaagaatctagcatactttacttttttaaatgatagcaataaaaattatgaaaatcatataagttggcatcgtctctgagacggttgttctttctcaaaacgacagcgctgcgtggcgttcgtggactttaataaatttgcatcctgtacaataattattattctcgatctattgtgtcgctttccccatatttcaatcttctcacgtagcttttcgcacaacagcatcacgagaatagaaaaagagacggaatatataattctagttctatcaagctggtactactactgtactataatttttactcctttattacgaatgaaatatatgattttatgtttgtaaaaacaaatggagagggttttgagaatctttaagaatttttaatttataatactacctctagtttggtccggttcttattataaaaaacaagggataatataatacacttgtatttcttataataagaatctaaggtagtatatttcttgagttatgtataataaatatattaatttataagataattattttaaaaatcatttcaatttccaattggctcacatttacatgccaattattaatctttaaaaccatggtgggtctttatttttataaaatgttgtcactaaataattgtactttttgtatgatatggttaatgtggtggtgaatgtgattgggtgtggtgggatgcagggtgccttgcaggaaagagggaggg

SEQ ID NO: 23893 - DNA, 540 bp, Glycine max
  Intron number 1 from transcript Glyma09g10370.1 (locus Gly ma09g10370) derived from phytozome v7.0 (chr-ID Gm09; pos 10460177 to 10460716)
tcctttcatcttcacaaggtataaaatatctatatctattcttttagttttttccaatttccatgacatctagttgatgcagtattcaaacattagttcgcttaaagttctagctaaaaacttgccaaagtttacatgaagatagacatagcagaatttacactaatacattagcaatatcatgttaagaagaatttttccaatttactggttattgaaaataattgatattgggcatgtttctgtgttaataaaaacttgataatttttgtttttgtctttgggcattatgtgaatgcaatatggtgaagggcattattttgttctgtttatggaaagcaatggcaaattactatattctactgcatatatcaatttagcacatatttgattttacattttaacacagaataactttccattctaaaaggcttgctctcactattttgaagataagatttagtgaaatactagataagctaattcaaattaatgcttaatgcagttccctttgctctctagaagtggagttctggaaaa

SEQ ID NO: 23894 - DNA, 790 bp, Glycine max
  Intron number 1 from transcript Glyma12g08980.1 (locus Gly ma12g08980) derived from phytozome v7.0 (chr-ID Gm12; pos 6753957 to 6754746 reverse strand)
caggcgctctctttgtcctcaaatccaaaggtattcctcatttttttttatttttataaccttcttcttaatgtctctttgttcttctgtttagtcttttatgaaacattatttagagccataggattcttgtccttgtttctttcttcttctcccacctttccttcttcggaatatgctgcacggttttaaaaagtcttggtccttccataacctttgtgagttcaaaaacaaaaccgcaaaaaggaaaggccatgtttcttcccctaaaccaacaccaaacacctccaccataattatagaaaagaatatgagcatcatattttatcaagaaaaatgttggagggacactcacaatgttactcaacacctagaaagagaaaataaatataaatatatgaaattttttttatttcttatctatttagtcaaagaatttgatgaattttaatatctaaaaaaattgtcatttaacttttggtagatgaatatactgaatcgaaagaagaagaaaaaagccatttaatttatacctattataagtgggagcttaatcattactaactggctttcagtgatttcatcgtataaaaatcatttcgttgttgattgttctcccagccgactttgatgaacgaaaaaattgatgcaattttgtcttcgttgactaccttggcataataattggagcacatgggatgtacttgaagcaattaagacgagaaaatattctacatacattataaaatggatactatatgatattaggtgtgattttgtaggttcttgg

SEQ ID NO: 23895 - DNA, 849 bp, Glycine max
  Intron number 2 from transcript Glyma09g27380.1 (locus Gly ma09g27380) derived from phytozome v7.0 (chr-ID Gm09; pos 34192081 to 34192929)
aggttgattacaattttgcatgaccaataagcatttcctgactattgttttgtttttatttagtagtttgctaattggtacctttggtttggaatgtgtgtagttttgatctcccaagttttttttttaactaattaaggtggtctatttatataattaagcaaattattcctatgttgattttcttccacttaaaactatcaaattattatttttagccaaattttagaggatttacaatgtttggaatatgaagtaatttccaaagtttagaagcaaatgatttagtggaaatttgaaggattatagagtttaaaagggggaaatttgagtttctttatcttttttttaaaaaaaaaatgggtggaatttgatattttttagttggtgagttttgagcaaaagaaggtttacaacattggttcacaaaaaattttgtgtgggtaattttagggggggggggggggggggggtaggtaggagaaaatggacagagggaccagatttgctcaattttaaaaataggtgaatcacatgtggattataaagagtagagagtgttcaaaagagtgctattagtattccttaaatagaaaatgtagtttctctgttcttgagatagtgtttcctaggagatttttctggtaattctaatgtgtctgtttttggggtaggggatacttaagtcatgcttttgtacttgattggtgaagctagtcagtgttttggtccttttgggcttgtataatactataatactcatctttcctgcacttattttataatattttgcttttaaactttgaatttacagcttgacggtagttacttcacttctcgaaaaattta

SEQ ID NO: 23896 - DNA, 881 bp, Glycine max
  Intron number 1 from transcript Glyma09g42060.1 (locus Gly ma09g42060) derived from phytozome v7.0 (chr-ID Gm09; pos 46714467 to 46715347)
gtgcaccgaacccttcaggtaagtgcctactacaccttcattccattttttctctctctcagatcccttttctttattctaaaaaactttgttgtttcaatttgtgaagtaaaataagctagggtttgtatatgcatgccagaagggctagcttccttttctttgttaggtttttagcattttcttgtttaatttctctcctcaaatgtatactaatgttgtggtgtggtgtgtattaaggatttcttccttagcctgcttcttatgttttctgtgtgtgtgtcatgtgaggggaggttttaggtctttatcatctatatttcattctcaaacttaaaggttgacccacttgagtgccttggacttggagggcagtttcatgttcagttcttctgacatagttattatagatctgatcagtacgttcaaccgtaatgtttaatttcttttcagtatggcatgtggtgggttatagatttcgttttcaaccacaatatatttgtgatattgtacttaatttaaactcttcaagggtctaagtactcttcatgtttatgaaatcaaagttatctcttttgcctgcatcgattctgtattattctacaattaactactagtacttttacattcacaatttcacatgttagatattattaactaataattaaaaatgtcagaccaaaacttaggggtacttttatgttgtttttaatatatgtatattctcaaaaacaaaatgttaattatatacggatggacacgattttcttttccgaaaaatatgaagtaatttacagatataataattaataagtttacatatatttggaatttattaatgtattaaattaaataattaacatgaaagacttgtgatcagg

SEQ ID NO: 23897 - DNA, 891 bp, Glycine max
  Intron number 1 from transcript Glyma08g46940.1 (locus Gly ma08g46940) derived from phytozome v7.0 (chr-ID Gm08; pos 45903905 to 45904795)
taattttctgcgttgcttcgtggttaattcttcgtgtaagttctctctttccctgtaggggtttttcagggttcattgttgtgtgcgttatcaattgattctgattttcttgaagagttttttttttttttggttccttaagatagaatttggggtgccaattttgtgttggatctataaatgtttgaaagtttgaattttggagttgggttacaagtgtggggggtcaaattgtgaaaatttcgaggcgtcttttttttttttggaaagggtcattgcgttttgtgttgcttgtggatgtggatgttgaattgttgtttcgtttatttatttttatgaaatattttcttattcagttgttccatgttgagatattattctgtttgacaatgtttagtttttgtttggaggcctactttatgggagattggaataatttgggcgaggttttattttcaaatttcgtctgttgttattttgcacacaaaaatatgattatgcatgatgaggaatgctagtggcactctctgctctcttctgaagactctttctttctttgattggttagaatttattggaaattggtaggtttcgttttttattttggcaagaagcaaaacctaccaaaattggtaatttccaataaatactaaacaatcatagggagagtcttcaaaagagaatgtcagatagagtgccactaacatttctcatgataacaaatggtggatgtacttgctttctggtaggatactattctcgtaattttgtggtttttgttacatgtttagttcataagggtgtttctcttttatggttgttttggtaggattcttaccgagtttcactgtttcaggttcttgtgatctttctgttggagtatttacaaca

SEQ ID NO: 23898 - DNA, 467 bp, Glycine max
  Intron number 1 from transcript Glyma09g36790.2 (locus Gly ma09g36790) derived from phytozome v7.0 (chr-ID Gm09; pos 42419424 to 42419890)
tgcttctgtctattgtgaccagtgccgagtcgttggtgagcatactcgccgagtcttgtgactcactgaccgtagactcatgcattttcattaactttaaaacacaaaaaataaaaaaatacacgaatcatggtagaagaaatttacgatacttttttcttttaattttaattcagagtagtgaaaattaagcaaaaacctttgtgttattttccctcttattttttgtgtgtgcttaaattcaaattatataataataaacttattttgccatttttttgtattattactattattatttatatcaaataatgatatcatgttggtgtgtgaaaagataataagcatgcgagatggatatttatgggacctttggtggatatatggttgtgttctaatgctgactttttgttggaaaaaaaaaaaacaaagggtggagtgggcatccggtgtgtcgaaagcgatac

SEQ ID NO: 23899 - DNA, 881 bp, Glycine max
  Intron number 1 from transcript Glyma09g27170.1 (locus Gly ma09g27170) derived from phytozome v7.0 (chr-ID Gm09; pos 33941686 to 33942566 reverse strand)
gtgtgttgaaaatcaattccacataccagtgctaagtgagtatcattcttaaacattaaaccatcctttcgctttcttctttttagtgcatatacaaactttctttttgtttctttcactctaatgttgaccctgtatatagtatcaatgtaattcaacatatttaatggattaaaaaacaatatcttatcatacatacataaataaagaacatactcacaagtaatttacataagtttagaataagagggtatgtattagaaacaaaagtactacaatactagctagtttggtcccttatctatgcacccactcacatgtttttttgtttcaaataaactcacattcatttcagcatcatttttggagttggaaagataatttggaaagacataactagaatacaaatggatatatgttacatgtacgcacttgaaccatattgaaagaaaatgatttaaaaggactaaaataaaattaaatacacatctataaagattaaagcattgctgttttactcttagatatacattaatatatgactaattttgtgtattctaatcgtttaagcttgatgaatattcctgcatagtattagagtctcttttgatgaaatggtcatgagttaatttttcaatcttattcttactgctttgattgtttgttgtccaatgatttaagagtttcagattacttgtgtttttttgtgtctactttcttgtctcttaatacaaaataaaataaaataaacaccttagcagaacacacacactaacaaactgaatagaaaatgttattttttaaccaaatgtcatttttctattggggagactgggaagaggacacaattcgtgacttctctttttttgtttcatgcagtt

SEQ ID NO: 23900 - DNA, 744 bp, Glycine max
  Intron number 1 from transcript Glyma12g32130.2 (locus Gly ma12g32130) derived from phytozome v7.0 (chr-ID Gm12; pos 35696613 to 35697356 reverse strand)
tcgctcttctagtgaagtttctacacattctactggtatactctattccttctttatatctatcaatattttgaaattttacttactatacaagaaaaatatttgaattttttatacatttatatatttataagatattcaacatagttagtttttcatttaaaagtttctttgctttggtagaataattaaaaggatatacaccggaaaaacttgagagtaatacacaaccactaatttttgcagttctatctactctaatgcttgttgtgggtcactctttcagtcttttcttatggaacaatacttttggaattcgtagtttaatttcttaatcttattctttgtggcccttcttttattgctaacttgcttttattgtaaggtttttatttgtgttgcacacatattatgaaatgtaatcacggggaataggaacacttaagcacactctagagtttatggtaaacactcaaattattagtttaacttattactatttgacatgcgtatttatggctgatgaaagtggaaatgatcagatataaaaatatgcttccggtaaaaaaaagttttttacacgtgtcaaatagtaataatttgagtcttttagaattgacatgataaattatgcctgagtaataactttggagttagctacttttttacatggtgttttaatcaatcataacactttatttagattcagggaagcgagggtcttccaaagttgaattttctgaa

SEQ ID NO: 23901 - DNA, 668 bp, Glycine max
  Intron number 1 from transcript Glyma09g33190.1 (locus Gly ma09g33190) derived from phytozome v7.0 (chr-ID Gm09; pos 39703326 to 39703993)
ttcggtttttccggcgaggagtgtgggattttctggtgattccttggttgtgaattgagtttggcggaattctcgattttgaccctaaagcaaagggatttactcaaaagttttactggatttcgtgttttttttttcttttgattttttgcattgagtagaccgaacatgagtttgtgtcattgtgtttgagatctggggttgatattttttggtaaataaaaaaacaaggtaaaaatttattcttttgagattctgataactatcttatccttttcttctttattttttttaatattctcttgtgcttttctgggagcgtaaatgtctagataatttttgctgacatttaattttgggaaatgggtcagtgaatctaggctaagttcttcaacttgctaaattaggtttgatatttgaaaaaaaacaaaaccttttgtaaattcactgaatctgtttcatccgtgtttgtgctcttttatctttcaaaaaaattgcgtttttattggttgttatcgatattagttaataggtttgttgggttgaatttatttttgtgccacattttccaattgatttccttttgctaatgaatcaatggatcatttcctaatatagtggtttccgcaacaggcaggaaccactggccattccgtttctcaaatttt

SEQ ID NO: 23902 - DNA, 723 bp, Glycine max
  Intron number 3 from transcript Glyma09g36280.1 (locus Gly ma09g36280) derived from phytozome v7.0 (chr-ID Gm09; pos 42074405 to 42075127 reverse strand)
ttcctcaccctcttcaatacaaaattatcgtcagggttagcatcttttattactactactgctgtcgacttctttctatttcatggaatagttctgcttttttactcctcaaaacttctccaagtaaggttttagggcatgttttggtgtaagcttgtttataaacacttctaaatagaagaagaaaaaaaatgaaatgagcttctccacaagttaaaattagctctctcatatagcttctctttaaaatgaaaggacatctacaaattggttaatggagagctagttttagcttattgagaagctcattttattttattttttcttcttattttcttttcttcttagaagtaaaagcgaaataataatgagtacacaactaaaaatattcaaagtgtctatgtagtgttcctcaaagatacttatctgccacagttataacatgacatgcatttatttagaagtgtctttgcttcttagttttagacctatttggattgcttcaatttggattcattttaatcttttgataagcggatgttgacttcacacttgtgactgtgtgtgcacacacgtgtatatgtaaagtcttttttagtttccttttcttataggaactggggagtacaaaaaatctttgttctgtatttgaatcaagagttcataaattattatttgttttgttatttttttcagatacacaccactagtcagtcttcgcca

SEQ ID NO: 23903 - DNA, 959 bp, Glycine max
  Intron number 1 from transcript Glyma11g06830.1 (locus Gly ma11g06830) derived from phytozome v7.0 (chr-ID Gm11; pos 4820937 to 4821895)
caaccttaacctctcctcactttcttttcaaccaggttctttctttctcacaaatctgattcattttccctataatttcccacttctactattttctctatttcttttattccctttatctctgatttcccgacgatccctttgcgttagggtttttcgctcgcttcttttcaattagtgatttaactatacctttgattgagatattggattggattctgtattgtgtaaaacaactctctagcacgattgtttcgctttctccgcgtctattttctagatcacagtgctctttgatggaccagaatgttttcgttttcacttttcaatgcgaccttttgatcatctatcctccgaatttgcgttaggttttttcgctcctttttcttcttcttttcaattgcctcaccgcaattactgatttagctatacctttgattgatattgaataggattctgtattttttaaaacaactctctaactcgattgtttcgatttctccgcgtggatttactagatcgcagtgctctttgattatctatccttcgaatttgtaaggaaataaggaattctaaatgagtagctcagtatgctaagcttatgttaaatgtacaaaatatgatagtgtttcctacttggaatgattgaccatgttattgcttctttgccttggatttgctatcctaaaaatatggtggtgtttcctacttaaaattccgaaatgtttggatttgattattggtagagaagggtgaagtcaagtgtgtaaagtagctggttcaactattaagcttgtaaatatggttgttagggaaaactgctgtttggataaatatacttctaaagtatttttgttaattttatgtaaatgctttgcttgcttttctgttttggatgataatttcttagtctgtgatatgtgatctaatgctggagctggtatccttctcgtagaact

SEQ ID NO: 23904 - DNA, 469 bp, Glycine max
  Intron number 1 from transcript Glyma11g08570.1 (locus Gly ma11g08570) derived from phytozome v7.0 (chr-ID Gm11; pos 6071258 to 6071726 reverse strand)
aggctgtggctagactccgtgcacgcactctcacggtaatttaggtttcataaatactcacaaaattttgatgcaactctttaataaatacctttgaccttgttctctgattcaaattgaaacttcacttcaataattcgcataataaagattttcgttattaaaagcatttaattaagctcctcatataggatgcttatttatttgatcagtgaattgcatcacgtagttaatgtatgttttttcacgatgtgaagccgattaattatgtttgtgtttttttttttggtgaataattattggttatgtgtaataatatgtgttctgaatggatataattatggttatggttcttccttcctcatatcttattaagttgtttaccctgtgtacattattatttgttagtaagttggcaagttgatgtgttacaggagcaagagtacgagaggttcgagttgtctctgaa

SEQ ID NO: 23905 - DNA, 873 bp, Glycine max
  Intron number 1 from transcript Glyma08g45030.1 (locus Gly ma08g45030) derived from phytozome v7.0 (chr-ID Gm08; pos 44473534 to 44474406 reverse strand)
ggacccaaaatctagggttttctgttcttctctgggtaagtgagtgctttgattttcttggttcaatttttctcttgattgatttggggatttgctttgattgcgtgattcgtgtctctctgggtatttttgggattagggtttttgggttcgctcttcagagctgaaattttttatttttgatgatgggtcggagaatttggtgactgattgagttttgatgtgggaattcttgaatggaatcatggaaatttttttttcatggcgggaaggggattttagctgagctagggttgattgtgaatgtgggaagaaaagggagagaattggggattttgggggtggtgtcaagtgacgaatttggtgaaaatttgtgaaactgagcttcgtaggtagtgtgttgttcattgtctggcaccggccgacagttagactgcatatgttgttgatgtgtgctatggtttccctgtggttatgtttggttgtctgactaaatatgccttaaaaaaaattagtagtgtttgaatttccgttcccctggcttatatctatctatagctgtagctattaattgagagatgttgtctttcaagagttttgcaactctaatgtatggtctagtgacacaaaatcaataccagttttgtaactttctattagtttgttttcttttatgatgaatcatgatggtcaatttcacttgaggttgctggatggtttttatcatattttttgtttctgagattgaatttaatcttatgaaggttgtcagtgttgttttagtatcagttggctttgtttcagtgtaaggattaaggaataagatttatgtaattattatgtatgttgttgcttttgtagggatctgaagac

SEQ ID NO: 23906 - DNA, 921 bp, Glycine max
  Intron number 2 from transcript Glyma10g40120.1 (locus Gly ma10g40120) derived from phytozome v7.0 (chr-ID Gm10; pos 47623039 to 47623959)
gcactgaacagtgaaggtcttgaggttgattcattgtcaacattctttttccttgaatataatcttatacaattggtgatttcatttctaaggttttgttgccagtattgtccttatgttacaagtgtgaagtgaagtttcacatcggacaaaagtaaaaaagttaaacatcatataagtgaagaaaagacccataaacttgagtcttaaggttttggattaaagtatggtgtcaagtttccttatgtggttacttgtgactcattggtcacttgtgactttcttataagttctttttcgcatatttcaataagcttcacttatcaaaataatatgtttttatcttgctctactaagcttcacaatcaagcttatgaataaaccctcataaataagagcttattgaataagtatttaattaagttgtttacacaaatacactctaaatttgtgagaagtgtcaaatgtgcattagttacttgaaaaaagcattcatcaagcactctgttgtagtaattataacagtatgtattaagaaattaacatgatgtccatagtatgcaacggccctctgttagaccagtgtagacattggtgcacatttttgcattggatattacacgagaaggtagcaattgaagcacgatgaatgcttgattgtgactttcttataagttttttttcgcatatttcaataagcttcacttatcaaaataatctgttgttcaaatgtgcattgaacaaaaaacatctatcctattctgcaaaacaaaatgcccttgaatcagaactaatataatgtattattttgaagtgagctttgatgctttgatctaattgaattttgtttttggggtgaaatcacttacgtatttatccatttcagggcttggtacctcgtgctaaacttcttttgacaat

SEQ ID NO: 23907 - DNA, 406 bp, Glycine max
  Intron number 3 from transcript Glyma12g11610.1 (locus Gly ma12g11610) derived from phytozome v7.0 (chr-ID Gm12; pos 9700123 to 9700528)
gcaagacctagaaatacctcccaggtaaatcattttatatattatctatatctttaggggaaacgcacaaattctacattacaaaaaaaaaagggttattgaaaaaactcctgcattttcaactagccaaggatcaaactttctagtgacaatcaattaatgtttataatcatttttcagaacattgcttttatggttgttgctattgttgattattgaatgattattgtctctcacattggaaacttattgtatatggatgttttataaaaggctattagtatattcaatataatattttactttttcttcctctgctctgctttctgctacatgctgcctttgtttacttgaataacacctaatatggcactttccattatatctacagcattcagtcaattgt

SEQ ID NO: 23908 - DNA, 395 bp, Glycine max
  Intron number 1 from transcript Glyma12g08870.2 (locus Gly ma12g08870) derived from phytozome v7.0 (chr-ID Gm12; pos 6630462 to 6630856 reverse strand)
cctgtcaaaggcaccttcgatccctcacaagtcgggtaattctatcacctccttttctaaattttgcttttttgggtcaatttctctcatggttgtcattaaatttcttatattagtcatgtgtggctctcaattctgagttttttctttatgtttttgatataaattttgaatgctagttgtctttataatggtagaagaatgtatggtttttgaatttctctccttctgattctaatcttttgctttacgttttgtgctctcaattcaatgatttcttatttggaaaaaggaatatatatatatatatatatatatatatatatatatatatattaaaaattttggcttcttccacaggctttactatacaaaggtgaaattgggtactcctc

SEQ ID NO: 23909 - DNA, 273 bp, Glycine max
  Intron number 3 from transcript Glyma11g05690.1 (locus Gly ma11g05690) derived from phytozome v7.0 (chr-ID Gm11; pos 4005105 to 4005377)
aacacgaacacgtttggttatccatctgcacaaaggtcatctgcactacttaatcacagttttattatgtggaagttgattgcttctaactccgataaagcacattttccaaacttatagcgttattttgagcttctgttgcggaactcttccgattagaagaaaaactaatgtgtttgaagtaccgttattttttcttttgggagcagcctttgtatttcttgatatctcatctgattatttatttgtttgttttctgtaatagtcttggga

SEQ ID NO: 23910 - DNA, 957 bp, Glycine max
  Intron number 4 from transcript Glyma11g05690.1 (locus Gly ma11g05690) derived from phytozome v7.0 (chr-ID Gm11; pos 4005398 to 4006354)
agtgacagtctatttgcgaatctggttagtgttgtaaagtacccctctattacgtgcttcagttggttatatgtgtgttaaactgaaagtgcttttgattgaatgcgtctcattttttgttgcggcaccctttaacagaattcaaatttttttttccctctccatcccttttgttgatttggagaaaagcttctccaaaagtgagaatgcatttccctttctgttttaataaatatctgaggctgagaagtctgacttccttttttattctctttatacatttcagttatctgtggtaacaacataaagaatatatattaacaataataataatttaagtcatattccgcataacagtgtcctatctgttttctgcataaccttaaaagttttcccagtattatatatgcttcagttgattatatctgtgttaaactctaggcgcttttaattgaaaggtatctcattttttgttgttgtggcattcaaaaacttctttgcacttccctcctctccttttccctccaacctaacacactgataatttctcctagattgtttgcactaatctgattcttttcttgagtcttgagtactaagcaattgaatggtcctcggaatgggatgagatgaaaggggggctacaaactggtgggggaaggaagatggtaagctagtcagagtttctattctgggattcaacagttcccaaagggaattggtgcctacttgagctatgcccttgggtgtaaattttatctgttgtattcctactcttcataaacttcatttttagactgtcttgaaaaattttcagggcctttagttctatgattaggctgttcaacttacattagtatgccttacatgatagtatacatgttaaagtaattgttttgtttcttatcttatatgttgacagaagaagtcttcaacaccttacattcctcaaaactc

SEQ ID NO: 23911 - DNA, 808 bp, Glycine max
  Intron number 2 from transcript Glyma09g37950.1 (locus Gly ma09g37950) derived from phytozome v7.0 (chr-ID Gm09; pos 43475185 to 43475992 reverse strand)
atcaagaaagtcaggtatttagcactcatgtaaaagaccaaattttctcctttagaacattagaaaaatatgcaccttgattctacatcacatttttttatccaagtaatactttaaatacatgatgtgagctaaattcccaagaatatcctgcaatagcatgaattatttaagctacgaagcatagattttgacacagacactccagcatggctaatgtcccaaatatgggacactaggacacaccacacacacacacacacacacacacataagccttgcaaaaaaataaagattatttagagccttattttactatataatcactttatcttttcataaaaaaaaactcaaaataagatgaattttaccgtatttcttgtgggcttattttctctatctagccgacactgtgaacatactggtatgtggttttattgctgaagtgaaataattatgcgccaagatatcaatttagcctgcaatctttaaccttgaagatattaacttgggatctgttcacttgttaatttcaagtttggaagtaatggtctatcttgttccacttttatggagatttgccggtttttatgctttggatgcttaattgtgagaattagtaaaaactaaagtttgaattgaatcaaaggcttattatatcatcctagccaggggattctattccacttattccctttgcttaaacgcttaccccctttggtctgtgatgttcacattttataagattgtatgttgcttctatttgttctgactttttgcatattctattgcaatgtggcaggggtct

SEQ ID NO: 23912 - DNA, 798 bp, Glycine max
  Intron number 1 from transcript Glyma09g37950.1 (locus Gly ma09g37950) derived from phytozome v7.0 (chr-ID Gm09; pos 43476318 to 43477115 reverse strand)
acgcgacgcgacttcctccgacgacgcgagccgaggtaaattcttcgaccttttcagtttcgctcttcagttcctttctttcctttctaaaatgttagagtgaatatcattcactgcaatgagactattgatctgtaattcagtttcgagccaagaactgcttggtatgaaaactacaaaattagtggttctggtttgattagtaaattctggtttaagcagatgtttgagttggagcaatccgttttagcatgatcatgatagttttgatttttgtaaattgctatactgaaactctaggttttagcctggagttttttctattttcatctacattttcttgaaaaaggggggagggggtataggttatagtcatatcgaatcactaggtgaaaactctgttgtgtaccaggaaaaagttacaatacctgaaataatattcaataaggaaaattgtgaaatatatatgttctattttgtttaacagatagcagaccctttgataagcatatttgattgagaagtaagccattgtctaggttcttttgaatctatataatatccgaataatactccagttctaaatctaccctaatattacctaaacaacttaccaaatcccccaaaactaattcatatgaaagttccaataaatttataaaacataaaactatgattgaccctccatttttatgcatgatactatttcaagagcaatataactagatttttttttctctctctctcttttgctttttactagtgctcataaaaggaatagtagtaagcacattcatc

SEQ ID NO: 23913 - DNA, 870 bp, Glycine max
  Intron number 1 from transcript Glyma10g36960.1 (locus Gly ma10g36960) derived from phytozome v7.0 (chr-ID Gm10; pos 45003243 to 45004112 reverse strand)
agtgtcaagggtcccttgtgggaagaagtatccaggtgctgcttcactcactactactcaaatatatatacatatatatattaatctttctttcatccttatcttaattatcatttcttttcagtctgcttcttcttctcattcaattcgtgtcaattttgagactgctgaggagatctgagaattcaattaattttgctttgcttttaaattttattcttgcaaatgtgttagttagcttcaaattcatttccatcttttctctctcttggattttgcttccttttcccgttccttttgtgatttttttaaaatttcttttggagtttgagagtaaaataattataaaagaatttagatgtgcagggttcatgatttgggtgtgatgatttgcttttctgacattcactttgattcatgtcctattttccaaataagttaccgacttgaattgagttatcaaaagcgagatttttcttccccctttatttcgcttaccgactcctacgggaaattaaggaagaagattatctgtcaaatcttctaactcgccttcatgtgtttctcatgggagacatttttgttcatcatcaattcatgccattttgttacccaaatcttcaattacgtgaaacttttacattttctcccatcactttttcacttacttttttcctttgcattcccactgcttaattaattcaccgcatatatttttattttatgtttatctcatgctcccaatgctttttatcctttgtcctctagctgaatttgatgagataagataaacccagagaaaacactctcctctcctctctccttattatttttttttttcattttgtcttctccttgtgcatcaggaag

SEQ ID NO: 23914 - DNA, 724 bp, Glycine max
  Intron number 3 from transcript Glyma10g31510.1 (locus Gly ma10g31510) derived from phytozome v7.0 (chr-ID Gm10; pos 39995132 to 39995855)
tccagattgcagtcattgccaaaaggtctatttataaaatatcatgatttaattctaataggcattattattggtgtcattattaatgaatcaaccctagcttgttgtctccattctcctatctctcctctatcagtgttgtttcttttattattatggtaataacataatatagacatacattaattgttttttgaaagacagaatttattaagaaagagaaaagtacaaatgctagagagtagtaaggtagtaataatgacatttgtattggcaagttttatgaatttggattttcccatattgaaagttaaaacagaagtggtttggtctgccttctcatcaatcaaattggttatcgtaatgacaacaatgaacttgaattggtaattttatcatatatcgtagaggttgcttcattataaatagctgttatagggcattcctcttgcatgatgagtaattgacaattgaagtttctgacaggttgttgccagatggcgaccagaagatgctcgtaggccaaatattgaggatgctcctgttttctaccctactgaagaggtcttgttcagctcctgtgacacatttgaattcacttccgtccgtgtcactgttctgtttagttctgtcaattagctttatcagaaaatctttctgacgccatttttttccccaggagtttcaagatactttgaaatatatatcaagcattcgctccagg

SEQ ID NO: 23915 - DNA, 927 bp, Glycine max
  Intron number 5 from transcript Glyma08g47910.1 (locus Gly ma08g47910) derived from phytozome v7.0 (chr-ID Gm08; pos 46682276 to 46683202 reverse strand)
gcaagaacgttggtaagcaagtcattcgtgttgcccctgaatgattttttcagtattttgatagttgaagcttgatatgttttaaacatattcaattgagaatcttttatgtacttgaactgcggcagctggcaaggccttattctcaccttctgccttgagcagaaaatgtaaaattttcagtatgcataaattatgtagaagataaagtagctgcattaggtggatttggctctcctaaaataatgagatatgtaaaatgagaaaatcaacagtagatacgttcattctctctcacttaagagacaaagctaaatttgcatctggtttggttgaattagaactacaaagtagatgattgaaactgtgaaagaaatagatgagaggtatagacctaccaagttcaaggcatattttctatttaagtttcatgatcagttggaattatagataataatttcaccataacagatgatcaagataaagaaaggttaaatgtggttacagccacgataattgataattcgctggccattttgaatgcacttctgaggtgaacaagtccattgcacacaaatgctctatgctctcaaaccaaataattcttagacctgacatatttgttatgctagagtagaggctttaaaatatttcgcaattaagggaatttacgttgcagaggattagcctcatagatatgtgcaaatgtattcactataactaacccgcacctaagccctataattcttctttttttggtgcttacctaagccctataaatatagcatacagaggaccaccatgtacacatatttttccatatatcattacactactgattcattcattgactttaatattgaaatgtttttataactacttctactttcagctcatcttgagtcagcttcctctacatcatctcct

SEQ ID NO: 23916 - DNA, 231 bp, Glycine max
  Intron number 4 from transcript Glyma08g47910.1 (locus Gly ma08g47910) derived from phytozome v7.0 (chr-ID Gm08; pos 46683503 to 46683733 reverse strand)
cagctctacaaaggtgtgtaacaagctcgaaaagaatacaagtttgaattgttagctattgtctaaggaaagggaaatgatttttaaaaaaaaaactgttttgagaaggttccaaatattagtgcttctcagtcttttccttcatgacttccacaatcaaaactggaaacttcatttatcctggatcacatgataggtatttccggcaaggcatagatatctactttgaca

SEQ ID NO: 23917 - DNA, 604 bp, Glycine max
  Intron number 2 from transcript Glyma08g47910.1 (locus Gly ma08g47910) derived from phytozome v7.0 (chr-ID Gm08; pos 46684149 to 46684752 reverse strand)
tcggtcttcttggtatggaccctcaatctaattaggaatcattttctgaatcctctttcgcagctacaaccaagaaattaaataaaattaatttccctctagataattgatctgcattctctgtctaaggctcttgcatttataacagaatagaatattctgcccgcgtgccacagtttccctttctaacctgttccttcttctccagagtaatctctccatatattattatattacgcccagcatggccttcatccactaattggcctctctaatagagtgctaatactttcagatttcaataacttcaaagtgttgatagtttctttcggcctatttaagcactattttctgcatagttattattttcagattatgaggttgtcatagagcgaatcttctagtttagagagttccttagtttgtttgtttttttttttttttatggcataattgttaaaaccttgcatatccttttaccataggctttgtgtttttattttttctggcttgtgtatggaagtgaaatcattttccagtcttctagtggtgctccagttttacaaataattaacccttcaattttccttttacttttatagga

SEQ ID NO: 23918 - DNA, 402 bp, Glycine max
  Intron number 1 from transcript Glyma10g42430.1 (locus Gly ma10g42430) derived from phytozome v7.0 (chr-ID Gm10; pos 49372301 to 49372702 reverse strand)
ttctttagtccacagtactcgcaaaaagtaagatgaaatgctagtgaaaagctttgagtgtgtttgattattttcattttttgtttttattttgtaaaaattagaattttgaaaacattttttatttgattttttgcttgaaaataaaaacactgattgactttttgttttttttattttatttttaaatttgtttaaaattattttttatcactttattttcaatttaccaaaaatgaaatttctgtcttcagtttaaatcattaaaaataagattttattgttcaaacacattttcaatatcattttctattttcgtcggaaatgaaaataaaaaataactaaaccaaacatcccatcccgtaattttgtgaaatacaaggattggagcactgacccaga

SEQ ID NO: 23919 - DNA, 386 bp, Glycine max
  Intron number 1 from transcript Glyma10g43460.1 (locus Gly ma10g43460) derived from phytozome v7.0 (chr-ID Gm10; pos 50145984 to 50146369 reverse strand)
tccggtgcgaatcctatttttcttatcctctttcgctttcaccgccatttttctttcttctcacttttgaattttatttgttcttatgaaaatactatccgcatgagcatgtaagtatagcgcaccgtaagaaagactgtggaagtgttaatttacttaagagccttggctacaacttacagtggcaaaaaaaatgcattgttggcttaatttgagtaattgaatgcatgcactcatctacatgattaccaagtctgacctagcgattatctattactaattacaactaatgtacttactttgctctaagtttgtagcaaatttataaacgttttcttaaatttattcgtgcacaagacaaaacgcctcccagacagtagatccta

SEQ ID NO: 23920 - DNA, 614 bp, Glycine max
  Intron number 1 from transcript Glyma09g01310.1 (locus Gly ma09g01310) derived from phytozome v7.0 (chr-ID Gm09; pos 795985 to 796598 reverse strand)
tcctctcattcttcgaaaccttccaaggaagaacggtatcttttcctccctgtttaggtaggcttaattttccgtttcttaggattaagttcattgtttggataagaatattcaagcaatttaagtaattgtttaagatattttctactcatgaagtcatgatatatgttaaaaacacactcttttaaatacatgtcatcttattgattaaaatttattcacattataaataatgtttttctttctttattttatatttcttaatcaattttaataaatcaaaatgtattttaaattagttgttataaaaattaataaatttatcatatataaatttaatttataattaaataaattattgttaaatttttatattatgaatatgaatgcgtacattatttattcatgaataaaacacacactaaaataatgcttaaaaccattttaaatatctataaatgcttatccaaaaccactattatagtttgccatcaaaacaaggccaaagtcaagggagagaagaccttaaatgtagatgtgaaatatgaaatatctaattcatattgtcttgcattgcagcaagtgttggaattcttttcttatctgacaagtat

SEQ ID NO: 23921 - DNA, 587 bp, Glycine max
  Intron number 1 from transcript Glyma09g33320.1 (locus Gly ma09g33320) derived from phytozome v7.0 (chr-ID Gm09; pos 39808494 to 39809080 reverse strand)
tagggcaccaggtcagtctttgcttctcttctttgttcttgtttttgagcagatatcaaatagaatagaaaaaaaaagaatttaaattttattcatgtagagaaatttggtcttgtagggaaattcctgcttcctttttaaaattgaaaaatgtttatcatttcgaatttgtatatgcatgaaaacctccaacagtcttgaattggagtcttgagtattcaactacactaagtattcaaagagagttttatcatccaatattatcctacttagctcaagcacaattgtcttttgtgaaaaatatttgtgttttttacaggaaaaaaaaatgcacataagccgttataaccccaattacctttgatttctgtcaaagactattttgttttctgatattcaaccaatagtgtgtagactgtagacatatgatttcatattatgttcgtgggaaaggttttcgtaaaatatagaattacagtttcatttttcttttcctcagaattgcaatgttttgttttgtataagagtgtctgagtaacaatcaaattgcaggcatacccacacaagattctcacaggtagaaggtc

SEQ ID NO: 23922 - DNA, 752 bp, Glycine max
  Intron number 1 from transcript Glyma12g13180.1 (locus Gly ma12g13180) derived from phytozome v7.0 (chr-ID Gm12; pos 11525633 to 11526384)
gagaatttcccccggttcaggtgttaatccctcattctctctagttatgatttaacgcattcaaaacatagtggtatatttgacaaacaatcttttcccttaagcttgtggttagaagtttcatccataagtttctgcatatagaaaaaacatatgttgggagaggtcagctcttaaatggatctcagtgtctagagaaattggtctttggctcccaacttggagataccctaagttcacaaaaaaaaaaaaggatttaaggcattcaagcggtcagtgaattctgactgaactgttggatgaagatcagacgtctcgtattttatcttggtaaatcagacttaaaatatgcatccaggatttgaaccgtttgatcttcattcaatggtgtagatttacgactgtgaatgtgaatgcctgttttcctctagttatagtcaccacagtgattgcatttatgcacaggataattggatatcatttaaaaatgaaaacaaataaataaatcatggtactgagtagtgaatagattgcacattgtttatgaatttatttaatgatgtggtttttatagaaattattgtgggtagaaaaatgtgctattagcaaatgcttaggttttgtaaattgaatgattttcaattttttttagatgagataagtgctgaaatttgaaacacgattgaatgttgttgtgagctgttttcactgtttcaggttcctgcatctataaactgtagactgcttgagca

SEQ ID NO: 23923 - DNA, 775 bp, Glycine max
  Intron number 1 from transcript Glyma10g07550.1 (locus Gly ma10g07550) derived from phytozome v7.0 (chr-ID Gm10; pos 6246313 to 6247087)
cagctaccaacaacaactctattcttcttctttgggtgagtagtagtagtagtagtacggtataacgttgtctcttgtttttttttttttttgtttctctttctcttaggtgttgttgctgctgatgacctcactcatatgtactaccactgtttccttcccaagttgacttacccgccaaaccaaaaatccctgttcctagtccaacccttttctttttctctctcccccttaatttccttactcatggaatctcaaatcctcgtacttgttgtcaatggttttttgttgctccattgtctccggggttgtgtttcagatttttttcttttaagttttggttttgggttcatggggttggttgggatcgagatttaagcaccgtttgttaaagggtggcttgattgatacaaaaggatgagtctttttttttttatttgtttctttctggtaatggccaaacagcaagttagggattgtgatcggttacaaaaaaaatgtgaactttacccttttgtggctacttatctaaggttgttggtgtgtacattcgtttgatttttatgtctagaaaaaaaaaatgttatttttcgcttagatcgactggcacgagactgtttcagcaagattattgtctctcacaccccaaaaaattttgttctttgctgggtttattcatcagaggcttccaattttggtggtgaaaattagttaaattaaaccatatatggcaaatgtgttgattgtgtttttctgtctgtgatgtttttaggtg

SEQ ID NO: 23924 - DNA, 661 bp, Glycine max
  Intron number 1 from transcript Glyma12g20220.1 (locus Gly ma12g20220) derived from phytozome v7.0 (chr-ID Gm12; pos 21323688 to 21324348 reverse strand)
tccttcacctcccctcgcaaccgcaacctcttcaggttcttcttcgcctctttattcaactaaatatactaaatcattttgaagtgaataatcttttgagtaaaaacgaaaaaacggggagactcgctaactccacggagaatagtgatcagtaaagctgcggatattccgtttcgaacttgatggacatcgggaaaggcggtggatattccgtgtagtaaaaaaagaaaaaagatttttttgacatcgaatgcgcaaattgacaccttgagagagaagtatagtatgattagtgatatgatttgatagagaaaagaataagggtgtcaactagatgtttgaaagtagtgggtgttaatcttttgagaaacagagtaaaaaaattgaatcattagcgagaaaatttatgttaacagtaataatgaagaagaacttaatttatttccttgcaaaataagtctgattactctttcaataacttttccaagcaattaactctttgcgtatacctaattttgaaggacactttgggcgttaaattgaaaattaactccgtatttatctgctgttctacttttgttggtttagtttagcgttttttttaatggtttttgtttttgttgtagttggttttatcggatcaagccatcggtgactcacg

SEQ ID NO: 23925 - DNA, 381 bp, Glycine max
  Intron number 1 from transcript Glyma10g05730.1 (locus Gly ma10g05730) derived from phytozome v7.0 (chr-ID Gm10; pos 4488684 to 4489064 reverse strand)
gatcttgaattcttccaacaactaagacatattgagtatgattcttccctttctattttatgcactagttctatttctcttattactttgatgatgatgatgatgattataaacattgattaattggcactatgtctttatgaccatgttaagaaaagggaaaaatattgctaatgggtgaaatggtaagcttaaaaaaaattaaatttcaagtcatgaggtataccaatgactaatgataactacaatcctaacaataatgcactatatttcgcacttgcaatttgatttaaaagttagaactaacatgagaaacatgctccttgatgatttggaaactgagcagggtatttggaacgtggccaacagcattgttagcag

SEQ ID NO: 23926 - DNA, 899 bp, Glycine max
  Intron number 1 from transcript Glyma12g07070.1 (locus Gly ma12g07070) derived from phytozome v7.0 (chr-ID Gm12; pos 4818357 to 4819255)
ttatctcataaagcttctcttgatcggtgacagcggtaaagttttcttttttgtttaaataattattttgttggcaaaaaatatgtttttaaaaaaaaaagtaaaaacaaggggaaaatgtgatttaagattggggctatttttctatataatggtaaatgatggatttcgctgggggttcccttcttgtaatttcgtcatttttattttattttaatcttgaatcgttgagtttggagttcgtggcaaatgcacatctagttttttttttttaaaatcgtgaaaggtttgatcttttcatgatctggttcgagtcagcgtttgaatcattgtttctgtggttgtgtcgcaaattctggtgtcaagaggtcgaattgcaaattcgagctgatctagatggttatcgtttaaaattaaccttctctttgatctatttatcatttgtttaattcaaagtatttgcttgccaaaatacgacttaggccgtctagtttcatctaccagatgttcttgtgttgttgataccttcatttcctttttcccttaaaaaaatagagtaaacagtgtatgcactgacggtgtaaaggatttttaccatccaattacaaatgactatgtatgataagaataaccatcttaaaagttatatcaaattattaacgatgatttctgattagttgattgtgtaaaaggttttacactaatagttcatctaaattaatctcaaagttatggcattggttgatgcctcaggatggattagaagtatttaatagacaacatagtaatcacagtggaatagttgtgttgcttttgtctgaaacatagctgtaagttaacctcttaagttttgtctttttgcaggtgttgggaaaagttgcctccttctgcgtttctcc

SEQ ID NO: 23927 - DNA, 694 bp, Glycine max
  Intron number 2 from transcript Glyma09g09970.1 (locus Gly ma09g09970) derived from phytozome v7.0 (chr-ID Gm09; pos 10007481 to 10008174 reverse strand)
agttgaaattggctgcagattctgaagccaaagaggttagattttcaaaccctagcaatgtatcatatgatatgtctttgtttctgaagcctgtttggaatattttattatcctgtttctctgtttgaatcttctgtcctttgtttttgtggatcacaattgctggtgatcttattatccttgtttatgcagtttgaagatttgttgcaattcttgtgttattattcccgttttcttttcttgttctgcttttaacattgtgtgttcacttgttagagctattgttgttcaatacttgtagtttagttgatgaactaacttctgctgttcagaaggatgatttaaattttaattccctcatatcataaattgcttaacatttttctgtaccctgatataaagattagaaaattttcatcaagtggtggtgactagtactgcctttgtttagccttatggaattgcatacaccagtggtattggtatctctcagtctctttgacattaaactgttacacctgtttgtaccaaatcctttgtcaatatttggactgtgacattattagttataatttgattcaattcattgttttccttcattacttttattagtgagactgatgattttaacaattttatcattcttacatatttttcaggataagtctttggggcacaagccaaaaaataacaa

SEQ ID NO: 23928 - DNA, 168 bp, Glycine max
  Intron number 1 from transcript Glyma10g08510.1 (locus Gly ma10g08510) derived from phytozome v7.0 (chr-ID Gm10; pos 7378270 to 7378437)
cacttctgcagattactgtaagatttcaattctcattgagttcaactagctttgattttcttcacacaaatgagttttaccgtgattattactggctagtttgttacttacatgaatgttctttttctttcttttttcattttacattagtttcggctaattttagct

SEQ ID NO: 23929 - DNA, 1013 bp, Glycine max
  Intron number 2 from transcript Glyma10g08510.1 (locus Gly ma10g08510) derived from phytozome v7.0 (chr-ID Gm10; pos 7378597 to 7379609)
ccacacttgttgacaacatattcaacattggggtttgttcttaaactaccaaatcactcctttgtttttttccttttccttttcattccatataagcataattggataagcatttagctagatgctcatcatatgcaactttacaagttcatataacttgaaatacgagagatgaaattattaggtgtctaagagattaacattactacttgttcatagcaactggttgatccgagtgttattggattcgatctttttaattaagtaagattttaagttttagtcgtgtggataaaaaaacagtgattaaaagaaaaaatttcattaaatgtgatcaacaagataagtcatcgacaaagtcaataaatacttcacactaatgtcatgatgattcaaaaagactaatacttattcatagtctcaaccaatctctctacatgtgtgtattcaagtttttcaatttaaaaaataattaaaaaagcttaactatatgtcatgaacaggttagtcggaaaaaaaggatattattatatgatctaagatgagaaaaattattacatgattgtgatgacatgtaattataatttttaattttaaaaaataattaataatatatcacatatgaagattggttgagatcaaatgattccatatgattgtaataatttttccatatataaattattatgtgtttatgacatcgactaattttcatgttcacataaccaaaattttcaatttatgagaaagtgatagtaaaatttcaaaacatgttataaagattgatcgaaattatcgtgatgtcagactatataataatttctattgctaacaggtattttgtttttgttacgtagtatatggctacccggttgataattcatcattttgttatcatgaacaaattacacagttataaggttaggttgttaaggaatttccggtaacaattaatatgattaaattctccgtttataggtgcactttgaaggaaaagtaggggatattaatat

SEQ ID NO: 23930 - DNA, 528 bp, Glycine max
  Intron number 3 from transcript Glyma10g25710.1 (locus Gly ma10g25710) derived from phytozome v7.0 (chr-ID Gm10; pos 33742070 to 33742597)
tctaagattgaagtaagtctctttctttactctattgcttgtatatccttaccctttgatgcaatacataaactaggtgacactggcactggcacactttctttgtttttttagatataagattaataaaatgtttcaaattgatgatgcagcaaatgatgcttatccatgtcacgtcatagtcaattttcctcatctagttggttgaaaaattttaattttttttggttgtcgaaacctcttctagtgaagctgctaaggaattgtgtcaaattggaatttctatgtgaaacagttatttgtttgtcattttggctttgaaaatggaacttcttcaaattttatatgcctaattcccagcattgcctaaacattttttattggcatgctttgctactaattggaagttttagagctgatatatagctgagtcctgaatattagtctttattggaaaatgttgtctaactaaagttgcttctatgctccacaattgttttctgtttcagagattggaacctgttgttc

SEQ ID NO: 23931 - DNA, 531 bp, Glycine max
  Intron number 1 from transcript Glyma12g01280.1 (locus Gly ma12g01280) derived from phytozome v7.0 (chr-ID Gm12; pos 726847 to 727377)
acttggatccccaggacaaccatatatcttttcaggtttatataaattaagtgatatatattgtagaattttttagatgatgttgtgatcatttacttactttttctaggcatcatgggtgtcttcaattacaactccgtatagttatttactcaaacattatatttgtaaatagaacttaatttatatttttcaaaccatagtttggggtgtaaattacaattcaattatgtagttaggttgaaatgatatcaaaggaaagtggtgaggagcagggtaagtgttcttgaaaaaaaaagaaacttcatatttaatttatgagaaaaagaatacgtgtttttcctcgtatattttatgttttcataaggacatgtacaagaaaacaaaaaatgaaggagtatatagaataaaggaactagagacggttgccaataattgcttaaacgtacatgcatcagagctggtgggtggtgtgattaattagcattttctgtggttgttttattgtatgttagcgtgaatctggaagca

SEQ ID NO: 23932 - DNA, 1020 bp, Glycine max
  Intron number 1 from transcript Glyma10g00690.2 (locus Gly ma10g00690) derived from phytozome v7.0 (chr-ID Gm10; pos 438452 to 439471)
tcacagtcccttcaattcctgctgcagcatactgtgtatgcacatcatctcttctctatttttttctttttttctgttcatggatcaatgcatgttgttcgtttgtttcttgagaaaaatggattctaaattttgattcttttggaaaattagcataatgggtattctaaattcttcttttttctgaactctgtttcagtttctgggttagtcgcttgctattttctacaccaagggaaaactaattagctggaacaagatctgttatttatttattaattagcatgccatggttcagtgaatttgccactttttaattaagcctctcaagtgggtgtctcatccagaaatcctaggatggaaacttttgttcattgaaatttccccaatctcagtttgtaacgtattatgtgtgataggccagcaaattgtgatgatcttataggatttagaaccactacctgtaaccaaagtttaagcttttgatgtgttatgagtgcaatcaagtttaaattcgtttctatagaactactgttcctagagtgattattttttatttggatatttctcacagttagagcatgtttgggagttgggacaacttatgttttgagatttcagatgtttttgagttaaaaatctgtttacagaatattttttttaaagaaattcccattttttctattttacaaactatcaagatagaggagaaaatctatctatacaatgtcaagttaattttattttttcttcatttctctactttagaaattgttcattacaaggatacattacttgtatcagctgaatcaattactatttcccacctatgagtttgtatgcttcccatggaagatcggaatagttcttcctaacttcacattcttatatttgtctacctggagtaagaaaagcgatatttgtatacttcagtgacttatatgtagcttcaatttatgataagctaatgctaatgtatttgtttggtcatggtcttgccaggtgcaacaaagccctaaa

SEQ ID NO: 23933 - DNA, 985 bp, Glycine max
  Intron number 2 from transcript Glyma10g00690.2 (locus Gly ma10g00690) derived from phytozome v7.0 (chr-ID Gm10; pos 439563 to 440547)
cgtgcaagcacatattgcctgtaataggtgcatcttgttccttaccttgttattggcacaaaactaaaaaaagaaaagaaaattttgatgttattttggattatggacattttccgagcgtttcctccatttattttgtcttttttttaatggttaggggcaatctaattatcatttttttataatctgtggtgtgttaaatgatattatatttgctaagtttgaatgaattatcccctgtttgagccagttaagatgcataaaatgagtttttccataatggacttttgttgatcctgtcctctcagcattcatccagagatattcttttcatcacaaaaatgtggaaaatgttttgcttgcttttaatttatctttctctgtaacttaggtatctatatcttcatttataaggacagaattcatgataaagatagcagatatacaaaacaggatgataaggaatctttctagatccatgactattaatgtgaagtgatttttatttataagtctaactctgcaactgcaacatgtcaaacacaattgactgtgaacctatgcacccaagtttagtgcttgcttaagcattaaaggaatacttgtgccatggttgaaaagagctaacacttttcttatggcagataagtttggagctgctatggcccttgttaaatctgacataggtggtaacatatcggtatgtttttgtcaattgctctatctgactcttatgtgaccatatgctttgtcagatactttcttgcagctttagtaacatggtatagctatacattagtgtttggctgtgataaatcttgttttaattcgtgggtttctgtctgacttgcataaaaagtttttcattttaagttgtttaacaattataagtgtgtacattatctaaatcttaataatattgggatcatatgctatttgttctaactatatactatattgtttttcttagcagagattggaaact

SEQ ID NO: 23934 - DNA, 525 bp, Glycine max
  Intron number 2 from transcript Glyma11g09420.1 (locus Gly ma11g09420) derived from phytozome v7.0 (chr-ID Gm11; pos 6722671 to 6723195)
ccaagaaaatataatcattggtttcattgatacgggtgagcagtcttactcttacactaagctaaagcctttacgatagcttttttgtagcaatttcttcacccatacgtacaacatgcaccttttcttcaaagtcccgtgaagacatttattattcggttcaaaaggatttccactttattttatttctcttgtagcagaaagactgtatctttatccctctaaaacactggatttcacatgacatcattgtggtagtagtcacattcttgcttatgaaaactcctttaattaaataaaccatcatcactaaaaagttaaaattaaacctgaatatgtttttaattcatttcatgtttcacgactgatacaaatttcaatttacgactactctccaagagatcaaattaagaatgaaaatattacactgaaaaaagggttaggtacttaataatactggaattttgttaatagtgagaatcatggtgagttttattcataatcattgccacgattcatacagga

SEQ ID NO: 23935 - DNA, 646 bp, Glycine max
  Intron number 1 from transcript Glyma09g04870.2 (locus Gly ma09g04870) derived from phytozome v7.0 (chr-ID Gm09; pos 3670555 to 3671200 reverse strand)
ccagccaaacgcgcccttgcctttgcccttcaacggttctttccatttcatcctcatgcaaaacgcccttattctctttcttgcatgccacaatttcactaacatgttatgttcagttagcatcacatgtcccccctaatgatattcttttttttattattattttgttctgggtgatacctgggttattcgttaaccactggatttcttcacatttgaaatttataccgttagatttcatcttaaaattaattgacattaaaattattcaacagatgtataagctgcactccgagaagtaccggaggacaaggtcccagaataacagatatataagttgtactccaaggagtgagtaagcaaatgtggaacttgggtatctccgaacaacatgtataaaataaagctagcaatttacaagtttgttaatttatatatttttaaatttgtcaaaaatattttaaaatgaaatagggaattaattttcatcacccaccaccacaattgttgttcttactatataatgcaattaatttgagtgtaacatttgtgtggcatatggtttatatttataattataatatgttttggtatatatattcatgtgctatggtaatttacagacgagggtacgcagcggcgtctg

SEQ ID NO: 23936 - DNA, 565 bp, Glycine max
  Intron number 1 from transcript Glyma09g07920.1 (locus Gly ma09g07920) derived from phytozome v7.0 (chr-ID Gm09; pos 6908259 to 6908823 reverse strand)
gagtttcatcttcggaaagcgaaaaacacccgcaggtttgttcatcatcgcgttctctgtcgaaaataaaaaatgattttttaaaatggggttgctcaattttgatggtagagttatccccatcatcattttttttttttacattttctttaatttatgttcaattcgacataatcagatgtaccgcaaaaccttttcgtttatgcaaatattaaattctttgcttttctttcttgtgtggttgttgttttgcagatttaactaatgatttgttctattttatgttcttgttagcttttgtctcctagttctgataagattcagaaattgccttatgatttatattttgtatcccttttcttttcaatttcgattatgctttgtaactatgagaatcataattcataattttgatgaactacttgctggctcgtttagttgtgtacctgattcaaatgggggtgtctttgtgagggtattgcaattatgaaatactgcatattgatttcgtagtacatgaccatgaagtttgtgactttcagagcttctgcgggaaaataagagg

SEQ ID NO: 23937 - DNA, 1037 bp, Glycine max
  Intron number 4 from transcript Glyma10g28030.1 (locus Gly ma10g28030) derived from phytozome v7.0 (chr-ID Gm10; pos 36824365 to 36825401)
actactggtattgctgaggttcagcttccaatcgagtaagcattctcatatttgttgtgttgggctgtatttgtaggttgtaggttgaattatctgttggagaagcatataataatccagcatttttttcctcgtatttttctttcaagtcaatccttggctatctgttattcatctggttgataaattgatctttatgattgctatggtagcattttgtagaccagttaaaacgggacaaaacatataagttttattctatgtttggtgcattttttaaatagatcatagtgggacagggagttacagattggtatagtttttaagtcaaaacaaatgctaactcaatgcctatagtaggctatctgttattcatctgggtgataaattgatctttatgattactatggtagccttttgtagactgattaaaacgggacaaaacatataagttttattctatgttaggtgcattttttaaatagatcatagcgggacagggagtcacagattggtatagtttttaagtcaaaacaaatgctaactcaatgcctatagttggaaacaaacaaccagattttaagggcattggcttttcaactaaagcttatatttttcatgtactagtatttgatggttctagtttatcgtatcttatttaatctatttcattgaggaaaaaaatggtgaactttttcaatggatttggctatgcttttgcatattttatctgggtgattcttaatttcttagtaggtagtacccatagttggaaactaactaccaaattttatgaactttggcttttcagctgaaggttcttttttttcctatgatttatatttcagattcatcttgtccttggttcattgctttttaactgtaataacttatatgttgcaagtgcctggtggtctttgtctaattttactttcatgagtctatttattgaggaagaaaaatggtgatgtgtcttaatggggtttgattcaatttttgcagatataaattaaaaaatattgaagaaacagaagccg

SEQ ID NO: 23938 - DNA, 693 bp, Glycine max
  Intron number 2 from transcript Glyma09g40370.1 (locus Gly ma09g40370) derived from phytozome v7.0 (chr-ID Gm09; pos 45320546 to 45321238)
cccaaaatgtaatctttcatcgccttttctcttttaatttgtggctcatcgtttatttattttgattgtctatgaagtcttatgaattggtgacaaaaggagactctggttcattgagttgtggttgctgtaagaatttgtttgcttaggctatgtgaagttgttgctttgcttcttgtaaatgaattgtgggatgtgtgtaatacctggcattttgtggggggtacccctttactgtttttttttatcagcggtacccctttaatgtaatttactttagctgataaaagaaaaatctgagaacatgatgcctttgttggctccgttactgtagagattgatttataactcagtgagtcttgaattggatcatcttgcacattacacaattattattttctttgcactttcattcaatgttttaagttgcggcggccattgtggtttcattgcaatctttgatgttgcgggaaattgtggttttaaagtgaatcttgatttgatcatgttgttgatgttgcggctgaaatcctggtcacagaccctttttttttaaaaccttgcttccattgtttatcacctataagataatttaaacgtatagtctgtcctatttatgtcctaatctttgtatgggtatttattggatgattattttctctgtgcagaagactgccttaaaggacacaggtg

SEQ ID NO: 23939 - DNA, 755 bp, Glycine max
  Intron number 2 from transcript Glyma11g15530.1 (locus Gly ma11g15530) derived from phytozome v7.0 (chr-ID Gm11; pos 11179067 to 11179821)
cggatatatcagtttgtttcattgctttattcaaacaactttattatctgaatttcttaaaggctgtgttttggtgacttgatttctgtatttggtagaattataatgtgttttaggcttccacattttttgttttgattctgtttttagggatatcatggattgaatcttagtaaatttttttttgctcttgctgatttgttctcagcaatgaataagctcatatattttttattctgtcatgaatcccttgaatacattattggcaattagaataaagcataaggttcaacatcctgtggtaaacctttttctttaatcactatctttttagatattttagaatgcactttctttttggtgctttgctgattctttattatgtggaaaatatggattaccattgttctggtgtttactttgtatgagctatgtgctaacacaggctcaagatttggtaagcttctattgcaggagaatgttgcttgaagacctccattttgttgaactgattgtaatcacacatggcataaataacaccattttttgctctcccaattcaatagaagactaacctgttgttctaagaggggaaatatttacactaattgctaaccattttatgatttaggattatatatggttgcattgcataatgcatattaagatatgcacttttacatatctgagatgatatttgtgatgactattgtgatacaggttcagtaaagaagcttccggcttcgctgacaatc

SEQ ID NO: 23940 - DNA, 803 bp, Glycine max
  Intron number 2 from transcript Glyma12g14350.2 (locus Gly ma12g14350) derived from phytozome v7.0 (chr-ID Gm12; pos 13274627 to 13275429 reverse strand)
tacgaggtatgcctttgttgtcacttaaccttatcctatatcatataagcattgatttaggtttattaagaaagatgactcaagttaccgtagtacactgaacacatgtcattccttgttatacatgtcactgattgaatacctaattttatgttttgctttctccgttgctacaggtagagttgcatcttcttcatttctattttctgtcttttatgtccctactattctgcctgttattattgttgcaacttacaagcaatgaagcaatgtagtgtagtcaaaggcatatccgcatatggaaagtgctggaaggggtcagtacctctcgctgttgaagcacttcccttttgtgaggggtgatgcgtgcatttccaattctggtttgtaaaatgaaaatgtggtttgtttttactgtgattgaatgtcatgccgaatatatatgcaaaattaatgcaaattatgttatgtttgttgggtataatgtgcactttatggcacctattgcctcaatgcattaaaataccctttcactttgtgggtgcctttctcctttgactttctttattttcacttaaagtgtttgaatgcaactgttctcttatattttcttgtcatctatgataatctttctgaaagcctttctgtatatgatcataattttttaacagtaatgggttaaactgttcatgagactgacagttccctaccctgatattaattgtccttcttaccagccactatatttcttatatatgtttgttctttgggtataggatacagttaaatacatagagaatcag

SEQ ID NO: 23941 - DNA, 842 bp, Glycine max
  Intron number 3 from transcript Glyma12g03320.1 (locus Gly ma12g03320) derived from phytozome v7.0 (chr-ID Gm12; pos 2193334 to 2194175)
gagccctatattcaccaggtataaagtgtactcttttgtttcttacaagcaaatatattgaagataaaattatgaacatatttgataaaacagttggaaaaggatcacaattgatgtgcttcattcttttttagtagccaaactgactttatcaaattgaagctagagtattttatttgctaatttcaaacaacaatatttagcagttgattggcatagatgaagtaacctttactagtgtgtggaacttaatgtcaatttctctctcccttcactattgagtgtcaaaaatgattttcctcgtataatacagtctccttatttgcaatattgttggccttggaagaattgacttagcatagggatggcactactttgtgataaaatgtaaataagaacaatgggagttatgaactcatgaattttcaatcacttgtacaaaaaattgtttctcccacgttaaaaagttgctcaatctacgtgcttgaaaaggaaaaaaaggaaactatcgtgtaagatgagttttaatatcaaaatgtggttaacctttctcttagatatctcttgcactatctttacgaggactctatagccctaccattttcttgcttgttctatgctgttggttggggaatgttatgtatgaacaacgggtcatttttatacattgtgacactacaaaatgttttctttgatagttttattttataatgatcatctttgaaagtaatctctttaatatttgatgatggtggctatcaatgactcaaacctagattgttgcatgaaaattctgacctgattttacttttgtgtattttcctgaaattaggtgttaacat

SEQ ID NO: 23942 - DNA, 836 bp, Glycine max
  Intron number 1 from transcript Glyma09g06480.2 (locus Gly ma09g06480) derived from phytozome v7.0 (chr-ID Gm09; pos 5229687 to 5230522 reverse strand)
aaaactctgtcgctttccttcaacctcattgtaaggtgtgcttctcccttctaaccttcacttttttttcttcttaacccaatgttaacatgtgtttgtcatttttttttttctttgtactggttattctccacttgtaaccaacatatacactttctttgggtgttagaagcatgaaattcaaaaagggtgtcattgaaaattttgtcttcctgaaaacgggtactctgttcttatgtttatcagctcttctatgcttttattgttaaagtattttacacttctgttttttcttttcttcttatgttgtgtttgtgtgtgtgtgtgtgtatatatataggttttttcttttaattaattgctatatgaatttttctaaattaatatttatcttttttacatttgttcttctgttaatttaactaattggcaactgctttagtgtgtgccttttgtttttgcttctttttttttcatttgaagttggtctacttagaggcttaagctgattttctttttctttttaatttatacatttggaaaaaaaattcccagatgcaaagcagtgtgttttcttcttgcattctggtagagcatagtttggttttctgcaaatcataagagggaagggttttctgttagtattaagcatgcctttattttcatcacccttcttctggcttggaaatgaagaaaagcatcaaacttcattaacactgttaggcttatttgtttcaaatataatattatcttatgcatatttgttttttgggttaactcatgcttgatagaattttagtatgttgttgaaattctctatttttggtgacagattt

SEQ ID NO: 23943 - DNA, 920 bp, Glycine max
  Intron number 1 from transcript Glyma09g28460.1 (locus Gly ma09g28460) derived from phytozome v7.0 (chr-ID Gm09; pos 35427052 to 35427971)
actgtttcatagaggttcattctctctcttctctttctttccctaacacaaacaatcactcactcacacttacgagaaattattatatgatccagaactatcatgatgtcagacaatctctatatatatcacacataatttaagttttctttactcttttttgtaaattgaaaaactcagactatgtattatgtgaatattagttggaactatagataaataatatgttctgaaacatgtaataaatttccccacacttaaaatagatatgaatgaaacagcatggtgaaaaatgttagagatgtaatgtaaaaataaacatttgtgtcttcacttagtactttaaattaacttttgaagtgttgattcatgacaaaatactagaatctctttgactttgtgatctttaagttgatccttatctagcccatttttctaatgaaaaattgaatttcattagcatagggtagttgatgggctcgtgtgtctatatatacttgaagttagaagggttattgtgtgagagcaaatgttaaagatgtaatataaatcattcttgtgtttctatactaggttttaataaatgttaatacagttgcttcatgacaaagaaaaaggagtggagagaaaaatgattgaagtaaacgtacacacacaaaagctaagatacttatataagcacacatgtagattaaaatgtacgttttgtttgtaactattcgggtcaattagttgtatttacgtaacttataagatgccatgtcagtctttcaagggcaaattaaacttactaagttgcatccattttctaaacttataaactgcacacattattaacttagcttataagtaattaagtattatttcacgagtatcatatatgtgtggtgatacaaagggtttatttttgtctactaggg

SEQ ID NO: 23944 - DNA, 934 bp, Glycine max
  Intron number 4 from transcript Glyma10g31290.1 (locus Gly ma10g31290) derived from phytozome v7.0 (chr-ID Gm10; pos 39826164 to 39827097 reverse strand)
tccacaagttgtcaagcttcaagtacgtatgatactaaagcaaaaacttatttctttcttactcttttagaagttttaagtaatcaagcaaactttataatactatatatatatttatatatataccatcaaagataatttttatcttgtgttttgaaatccactttttctatattaaaagagaaaattaatatataatgacagtgtaattttttttaatattatcaattaataacaaatgaacatttatgataattgataaatatttaatttcataattaataatcttaaaagtaatatattataagccagatgactgaattggaaatatttggtaatataagttaattgataaatataaaataacataaaaagatacaattaattatttgattaaaaaagtgataaaaaaaactcaaataaattaatgaagatataaataaaaatgaataaaaaattgataacttataaactaacttatttttataattttctttgaaataaattatgaaaataaactataaactattaaaatatacttatatgtgttgaaattaatttgattaaactaatttataagctagttaaaagtgtttgtaaagttcctggagtacactccataacacttttttttttaattactaattgatagtataattttttttataagaaatgcatataaagtttttttccaataaggcatacaaattaagctttaaaaactcaaagtaacatgaactaaataacatatgctagctgcccacttgataataaaaaccctatgtcatttcaaaatcaattttctaaaatactataaggtgtcaagataaatcttgattaattttaccatttatatatccataagactttaagatttctctttcacattttaattaattgttgttcgttattcagaatccacttggagctgcaa

SEQ ID NO: 23945 - DNA, 743 bp, Glycine max
  Intron number 1 from transcript Glyma11g18940.2 (locus Gly ma11g18940) derived from phytozome v7.0 (chr-ID Gm11; pos 15547408 to 15548150)
atttcgacatcgttgtcgtgctcctttaccctaaggtactctcctttctctctcgccttgaatttctgtacggaggcaagctagagattttattattgcgtaaataacatttttatttatttatttgggatttctgtgaaatttgatgtgttgtggtaaagggttgcatcagtgatttagctggtagaagtgtgtaagtgtaatgaaccctatcttagtacgtatctgtaaatttgtggcaggaaggtgcacagattggtacgttttgtttggaaactgctaatatttttctgagattggacacttcatgattcttctttttgttctgccttctcgttcctttgatgcctaattgtttgttcatcaccttgcatcatttgagtagaaatttttcatatttacatgattttctttgcccctcgtttggctttgtgtaaaatagaagagcttgtgctcaccaacatgccgtttgaactcgggttcctttcgccgccttcgttaatctcttttttattgtttttgacttgcctgtctgccaatgctgttaattatcttatcattgtccctttaataaaagtctatcacattgctgccgtataagccttgtctgtctcattgcacggcttccactgagattcattcgctgcaaccccttgtttggcctttctttttgtttcctcctttcgatatgtgtatacttcttcccaggaattcttctggcctctgtgccttcttcacagttg

SEQ ID NO: 23946 - DNA, 831 bp, Glycine max
  Intron number 2 from transcript Glyma11g29460.2 (locus Gly ma11g29460) derived from phytozome v7.0 (chr-ID Gm11; pos 30156143 to 30156973)
gtcctaacatcattggtcaagtcgaagatcccgaggttaaaaatatttaaaatcacttaacacactccaatatttacataaatggcttaattactaatgtacttcataaatccacagaatctttatctcttaaacattactctttttaatctttacccacacactctttttcttcttcatccatcaaaagttattgatacaattaatttgatattttagtagtttcttaatcaaaatatgagatttgattttcattagaaataaaattttaactgaaaatacaaaacgaatcaatcttatagaacaagaaggattaatggatgccaaataagaaaccacaaatatcccctgattataaaaaacatatttttaaatctgttttagccaattttagtttcaaggaataaaataaaataattttttttatatatataataagattcaaaatgaataattattagatgtaacaactaaaatataaaaattgtacggatataaagattaaataagtaattaaatcaataaatataaaagtatatctaatgaaacatgagaagtaagaaaatgttaaacatatatatcttagccttaaccatatacaattctatatggttaaaactattatagttaactttaactttaaccatttattaaactatacaattgaagtgtacttgtcttccatctcgtttgtgctttccctgcatgtagggtccaaattagtagtaaatgttagtagtatttaatgattttgttttacattaagtaattttatgtggggtgtgagaaaatacagaaacagatattggaaccggcgataaaaggaacggt

SEQ ID NO: 23947 - DNA, 606 bp, Glycine max
  Intron number 1 from transcript Glyma12g08100.1 (locus Gly ma12g08100) derived from phytozome v7.0 (chr-ID Gm12; pos 5822190 to 5822795)
tctggaagctcgcctctatctcttcctcctctcccgtgagttctccacttctgaattcatactccgcttcattctcttccttttcgctctctttaattaactattataagcatcacttagttttaatttcccctttcaaatgcacatttattttaacgttggttgattgccaatttagtatttgttcttccacttgccatttcgtaatttccatttgcaggatccacccgtgctttaacttttaacgttttgtctgtaattttaatgagcaatgaaaagccctttagctttactaagtctgaaagcaaactcacttcaaattactgcaaaatttattatgaaaaacaaagagaaagaaaacccgcctgaagatttgaattcaaaggcaaatttgcgaaaacttggtatacttgttcaaaattatcttatcttttaccttctctgtaacgatggatgtttagtgccaaaatttgtaattggagttcttgtagttgacgggggagaattttaagattgtgtcttggttttatggtcaaactctcaagtggctgaaagtcttgtttctctgcaggtggaggtaatattggacaaggagaacttcacttt

SEQ ID NO: 23948 - DNA, 807 bp, Glycine max
  Intron number 1 from transcript Glyma12g06620.1 (locus Gly ma12g06620) derived from phytozome v7.0 (chr-ID Gm12; pos 4503586 to 4504392 reverse strand)
gtacgtatgcttttttttcttcttcttttttctgttcagattcagattatttatcctgcattgaatagttatagtttgtaaaaaaaatgatcaaatactattttggtacactgaaaagaaagaaagtcccatgatgagtgttaaaaatatatatttttagcacacttcttcaaaaacacttgttaaaatctattaaaactacacaatagaaataattattaaatatgatgtgagatataaaattttattatttttaataaattttaaccaaacaaaaaaaagtgactgcaaaagaatgtatttctaacctttttcaaattctcacattattgaactgatgtcaatgaaggattataattacttttgttctttaacctcttgtaatagccaaaataaaaccttggattgaacctaacagtgaacggtctaaaagagagtgaaatatggtctttctcggtctctcattttttgaaaatgtcatgtgtgattcatgttatgttaaaaataactacttttaattccccatttatatttatataaatggatcacacaaagcatttgcataaatgagcaataagtgaacaatttttttttttatatagaaactaaaagcatttgcaatgagtatagacataacataatcaatgtgtgactcaatagtttacagcttgatagtgtcttcaacacgtaattcctccatgttttgatgtaattgggtactattgcttatgataatgattgggattgtattaagtgttaactcttttcctttttccgtttgaaaggctttgccaccgactggctggg

SEQ ID NO: 23949 - DNA, 720 bp, Glycine max
  Intron number 2 from transcript Glyma12g35060.1 (locus Gly ma12g35060) derived from phytozome v7.0 (chr-ID Gm12; pos 38204845 to 38205564 reverse strand)
gttaaagcttgtgattctgcttcagcagattctgggtactctctgttcgtgcaccagaggctattataacttatatgacttggccattataaagggttggtttaaactttaaaatgtttaaatataggattttttattttagttgttaaggattgcttgctctgaatggttggattgaagcacaatagcgttacttgatgttagcttacttattagttaaaatcttatgttgtctggtcatgcaatcgggaaatttccactcgtgtgttttttttctttcttttttgcacgagaccattagttttctcctcgtaagataattatgctcaagaattaggcaggagactactgtgagtgacaaaactctccttttgaatatttaaggcaattgcatactcaaatgcaagttgatctacgcaactacgcactcagtggtatttccactagtgtttagttcagatttatttattctactttgcagttttctagtagattttgtgtgtgtgtctatgtacagttttttatagccaccatgttgctgtcataatctgaagacccttggtcatattttctgggcagatctttggcttgttgacatgagctgccatctgccgtttaataacactggttctggccctgtgttgaaacttgaaaattaacttattttggtttaattgagttgcagcaaagtgacatttatctgtgggcgtgctggtgttt

SEQ ID NO: 23950 - DNA, 863 bp, Glycine max
  Intron number 1 from transcript Glyma09g36120.1 (locus Gly ma09g36120) derived from phytozome v7.0 (chr-ID Gm09; pos 41974489 to 41975351)
aaggcaaggccgcattgcctctcaagagggacagggtaggctatctccaatttcttttcttttcctcatttcttttattaattgactctttttttttatatatttaaaattgcttctaagtagaagtcttttatacttcttttggcttctgtttctacttctcttaagtagctcacgagtaaaattggcgtctctgaatgtcctgtgcttatttggttaaccaattatagcttgcacaagttgctcacacttccatgatctattggaaatgaacttgcctagcgtttcatgaaagtgtggtgacatcccttgaaaagaggtcgaagaagaaaaagatcaatgtcttttatttttatgacataccagtttcagagcagacaagtccgtccataaaagtacatgctcatttacttttgtttgacccaagtttatttaccaactttattttcgtacaatgattttatttaatggtatttatataaaaaatatcttctgaaatttcaagggtatatagttcgagtgtgaggttgcaggtgcttgtgtgtggccagtagtacatccttgaatgttagtagtggtgtttgtcccaccattctgttcaagctttttgcttggtttttcattgtattttagcatttgatttgcctccttcacatttatatgcatcatcggtgtcttccagcagtgatgatatgatttttattagataaccaattgtttacttcttccaaaattgaggtgcttgtttgggttgctgaaattttcatatttgatgttatgcttttaccctttatttcaaggctgattgttctttcattgcctcactagacgagatctaagaggttcttggaaattcaacaatt

SEQ ID NO: 23951 - DNA, 639 bp, Glycine max
  Intron number 1 from transcript Glyma11g01120.3 (locus Gly ma11g01120) derived from phytozome v7.0 (chr-ID Gm11; pos 618820 to 619458)
attttgtgtttttggttctcttttaggtgcgattctgattctcttctcttaaatcattggctttgattgtattcattggtgccatggcgtttcccagtttgattacaacaatcattaagtcgtgtttggttctttgattttctttttctttttcatgtattgttacgataagtcttcagttttttcatatccttacttgcagccagttctgtttgccttcagtttttcatatccttacttgcagccagtcctgtttgcccaaaattagagaccctgtgatgttctgcagctaattctttgaatttatatatcttccaaatatcatgctgtcatatacactttttaatagggattgacttcaaagactccaagtgctgtgtactcaaaattagaccaagacgagagtaaaaagacaactatcttgacacttaaataaactggcaatctatatctaaaagcgtgtaactggtaatttaaatcaataaattacctatatattgttgaacacatcgagatttaacttaaacgattagtctatgcaactgaaaatatacttttccgttcaacctaaaatttaaaagttcattcattgtgggttttaaggcttgtacaggttggaaatcttgggcttcagctgcc

SEQ ID NO: 23952 - DNA, 860 bp, Glycine max
  Intron number 3 from transcript Glyma10g05130.1 (locus Gly ma10g05130) derived from phytozome v7.0 (chr-ID Gm10; pos 3969315 to 3970174 reverse strand)
caggacctgaagctccaaagatcttcaactgtgtaagcatataaacttaaaaactttcaatcctaaacattgaatgacttgtcatgcaatttccatttcaaaatatcaaaggatcattaaatgctttgctgagatttgggctattaatggctatgatacacggatataaatataatatgtatgtttgtttgatgaggccatatgagtattcctaaaatactatatgggaaacaatgcttgcttgcaatgtgtgtttgtgtgtgcgggcgtgtaaagagacatcaaataagtatgaagtatccaaatattggatagtggatacaatatgctaagcaaatgcaagtcttggtgctttgtagactgatggttagaacagggaacatattgaataatgctgattccattttcatttcaaatttatccagttaggctgtcttattatcggaaatgacgatcctattacctgactgacttgttggaagggcataatttgattatttgtatgggattctggctgaatttgttctaaacttgtactataggtttaagcatatctggcattgtgggacaactttttgtcaagtacccaaaataagtcctatattgtgtttctcttgctttctttttcttttcatctaattcttaaatgctataaaatgataagactaagctttttaagaattgcagtgcttgacctataacgtgcttgatctatgcagtggttgcatatcatgttgttcttgtgaccttaaattgttatgaattttattgtctctattgagaaattggatttgaatacttatgaaatattgatgaatcttgcaggtggttgaaattgggaaaggaagtaaggtgaaata

SEQ ID NO: 23953 - DNA, 783 bp, Glycine max
  Intron number 1 from transcript Glyma10g05130.1 (locus Gly ma10g05130) derived from phytozome v7.0 (chr-ID Gm10; pos 3970417 to 3971199 reverse strand)
caaccttcgtttcaccacacttccatcacttgtcggtgagttcccgtttttgctccttccactcccaccgctagggtttttccctctgttttaacgcatcgtcaccgttgcgatgctcctaaactgttttttatttccgcgaattttcttgaagcgccttttcttcaagtccacgtttctgaataacctctgtttttctttatcttttttcttttttaaataacaatctgtgcgctctcgaatatctcagatctgtcgccgttttagcttttacctgccgtttatttccgtcttttgtgtaattctttatgctctgcagtttcgcttgcaaaaatggcttctgaatcggaaaatgtcatttaagttattggaaaacgtgttttcttttagttgtaattgcaattgtgtcggtgcttttggtgagattggaaaagaaaaactaggtgtctctgcatataacatttagaaattaaaatatattttgtcaaatggattggttatagagtttttaagtcgtaattgcagacattcatcttttgtgacggtgcttttggtgaaattattttgtttttgcaatttttgtattagtttacgcgacaaatggattgattatcgacttgttattgtattaattttcggacactgttcttttgggtgattcttgaaaggtcaaaggtcaaatttggatatattggttttttttttttaaatggtgggtaaattatgtgtaaatgcaacgatggatctaatggaaaacattgttcattatttcagagtgtagaa

SEQ ID NO: 23954 - DNA, 401 bp, Glycine max
  Intron number 1 from transcript Glyma12g05550.2 (locus Gly ma12g05550) derived from phytozome v7.0 (chr-ID Gm12; pos 3695092 to 3695492 reverse strand)
caaacactcgaatcgtctctagtacctcaatcaaggtgagagcattcttctcatccccgattcttcgttgatctcttcacaaaacccttttattgaatctgaatagaaccccacaattattatttcatacaattgaattgaacttcttcagcgttgttcatgaactccctcaagttacagacactacctttctggctttgttctcgtgcaatcccttgagaaaagtttctgttctgtgcttggtgacgcatgcgcactttttcatttggtgggtatcgttaatttctaagatttcctaaaaattgaaaaaaagaagaagaaacccttgaatttgggagcgttggattgaattgactgtgttgtgttgtttgattgtagcatttaagaaggggttttgggaa

SEQ ID NO: 23955 - DNA, 343 bp, Glycine max
  Intron number 1 from transcript Glyma10g02410.1 (locus Gly ma10g02410) derived from phytozome v7.0 (chr-ID Gm10; pos 1688936 to 1689278 reverse strand)
ttggtagtgttttgtgcaagctgagccacatagaggtagagtttcctctttaatcttttgaaacttgaaatgtcagctaaataaccatgggtccatcttatttcagatttgttataacagaaaaatcatttgccaagcaaaaaacaaatctattttagatgttttgtgaaagatattaatgaaaagaatgaaattttatctcattatcgtagatgcttcccaaaatgttcctgaccgaagaaaattgctgtaaaacatttctgtttttctagattactgaccacagttatcatttgaactctgcacagcgtggaggttcatcgggtgcattactggaaatcac

SEQ ID NO: 23956 - DNA, 872 bp, Glycine max
  Intron number 5 from transcript Glyma10g41580.1 (locus Gly ma10g41580) derived from phytozome v7.0 (chr-ID Gm10; pos 48626075 to 48626946 reverse strand)
agggcacaaaagtttccccagtggacatacctcttgtaagtactctttacaatctcagggtctgtgacttgcctttgggtggtcttgttgattccatatatctgtgtaagtgacaactgacaatcttacacttacagtatgtgcaggatgaaattcttctagattataattataataggattacaagctcagaaattgtttttgatgactgatgagttagtttcaaattaaagcaaaaataaattaagaatttttctaaggccttctctatccatactactttcaaaaggttgaggtatttggtgtgttttgaaaggaggtgtttggtttcatttttgtagtcgttttcagaaaatgactacaaaattactactttcttaaagaaaataaaccaagaattctactttgttattgtttgattaaacatttttgttatcatttataattgcaaaaaacgctacttcgttttctaagtctcttgtctccaagatgtttgaaaggaaatggtgaaaagattttgttgttttaagtttttcaccatttcctttacaatttcttgtaaacaggaaaaaagtaaaaacgtgactttatttttataattattagtaaaatatatcaaatgaaaacaaaaaataaaccattaccaccttagttcctcgactttttgaatttgccttctttcatggcaaaaatatgcttagggtagcatatgcatttttgagtcatcagtgtcttgggaatgatctgtttcttgtccttttttcattttgtaatttgccactagctatattaattaccacagtataagctcagaatgattcaattttttgtatccagggtcatttgctggtcttgtttatcttgcttggtat

SEQ ID NO: 23957 - DNA, 859 bp, Glycine max
  Intron number 1 from transcript Glyma11g37150.4 (locus Gly ma11g37150) derived from phytozome v7.0 (chr-ID Gm11; pos 38359036 to 38359894 reverse strand)
gtcaacgaatctgcattagtttgacccctttacaggttagttagtcatttacaaactgtcaacgaatctgcattagtttgacaccacacattgctgttttacttgattcactagttgtagttttctacttaaataaattgttgtattacttttaatctcattaatatctggacatgttctgttttggtttatctagccgggggtactattggatttacttgaacctgttttgctgctttgtcatactctggacaagcttgaatgccagcttcttgctttctagtgttttcattgtgcttatgtaactgttcatttaaaatagaaaccctcttcaaaagttacaattaaagttataaaagttgggttttttttaccaatttgtgtctctctgtcagttcaagaagttgagccatttgtatattgtcctttttctcactcttttcaaaacctgctatttacaaatgcagaactttttcaatgacctgtgaaaatatatttcaagatagtttttgagaataactgaaaagcttttgaaaactaactattgatagttttcgaaggtaattgaaaaatgtgactataactagagtttcatgttggaaatgttgttttgttttctgggaataattgcagaaacaataattgaaaatgcattcataatttgtttccaaactgtctggtgctctgcatcataaatggtttaatagttttttttcctcaatttttttcttgccatgaatttgatgaggacatagagcagtgaggaaaacatgaaaaaaaggaaaagtaaatgaattcattgagcagcaactttgtaaaaattttgtaggaggaaagactgagaagactaaagcgccgg

SEQ ID NO: 23958 - DNA, 671 bp, Glycine max
  Intron number 2 from transcript Glyma09g13220.1 (locus Gly ma09g13220) derived from phytozome v7.0 (chr-ID Gm09; pos 14604839 to 14605509)
tgaattgattgtccaaaaggttggttaatcgttaccacagcatgtcatctcctatcaaataaaaaaaagggtaaaatatattgtgaatccttgtactttggttgaaatttagttttagttccgaagttcaactttgatcattttggttcctgaactttgaaaataaaaacaatgatttttgttcctcctcccggggaaaactgataggaatgggcctagagaggcccaaataaagtagaagatttatatattatccttttatgttgtttagttttattttatatgtcctaaaattactagattatgtcacttgcatggttgatatttgttgtaaatccctatttaacatagggtatgtgctgtgtaattgatcatctacaagaatatcaattttattattttatcttctctctaaattttggtagaatgatcggagtagtgatagaataggtctgtgacgaggacaaaaatcactgattttctaaagttcttgacccaaattgatcgaagttaaaataaattttaccaaaattacataagagactaaaaacatattttatctataaaaaataaaggaattatgtatttgatgcaggagtaattaatataaaaaattatttctctgttattgtgcagtttggattggtgcacatatcaacaggggatttgct

SEQ ID NO: 23959 - DNA, 774 bp, Glycine max
  Intron number 1 from transcript Glyma08g47060.1 (locus Gly ma08g47060) derived from phytozome v7.0 (chr-ID Gm08; pos 45988662 to 45989435 reverse strand)
tactaatagatctttacaaggtataaatctccttaagctcttgtttaattattcatttggtattatagttacaaaaattttccttcttaattcctatacttttttttagaggttcttatttcctatacttaaaaacgtcctttttaatctttacacgtaattttttatccttttaatctcgacggctaggactaaaacggattaaaaaatagtatgcataaggaccaagaatctgttttttaagtataaaggctaaaaggaattttttttcctataattatatgaattaaatgaataattaaatatttttttatttctttgatattgacatgtttgtccgtttacttttttttccctcgtttccttgttaatacgaatcgaatttttcatttgtaaacaaccttgaaattagatgaaagcatgaaactgaagatgttaattagtttttacattgttttttcagttatgttaaaataagccacaaaacgcaaatacttgttatttttgtagatgtagaacccaaataattaaagagtttcctcaataatttgaaggtcaactagttgaagagttgttttctagtgtgtacagcttttatttgattcgttgaaatttcctgttaactagctgtgaagaatgcattttttttttttgggtacgatgtacgtgtcttttaattttattctttgttggtacaatgaatgaatgggtgtctttatacttgggtctcataattaacttctaagttaaatttcatttgttgaaatgatagaa

SEQ ID NO: 23960 - DNA, 514 bp, Glycine max
  Intron number 2 from transcript Glyma12g09270.1 (locus Gly ma12g09270) derived from phytozome v7.0 (chr-ID Gm12; pos 7092687 to 7093200 reverse strand)
aggtaaatgcacaatattattagttaggttctgtttaatttggtcctttactaatttcattttctctctcttgggttgaaaatgtgtatatctatatagacataaataaccatggcattattcttttacccttttcttatagttagttagttaagcattagcatttatgattgttataaaccaaataaattaaaggcttcaacaagtagatatttatgtgttgcttttatataatttatgttattaattggggtcgtacaattaagtacatgtttggataggttttggttgttaaacgttcttttatataaagaagaatattctttgtatgttttattttgaatacacttttttataaagggtataaagattatccaaacataatagtggtctcacacactagctacctttctcaccatgtcataatataattaagcttgtggctaatatattctaattgtgttttgtttttggtgtagatcatagggaaggatttgtttagggtactaaagga

SEQ ID NO: 23961 - DNA, 629 bp, Glycine max
  Intron number 1 from transcript Glyma11g33180.1 (locus Gly ma11g33180) derived from phytozome v7.0 (chr-ID Gm11; pos 34954915 to 34955543)
gcgattcaagtatgtattcaatatataagtttctgctatgttttcattcgatatgaattgtttgatgattgatatttttttatactttactctcaatctataaagggtagctgagattgtggttcaatttcaatgttgattgtattcgttttgggcgggagatgcatcgtactatttgttaaagaaaggaggaaaagagagagagagagaaccataatggcgttggttttgcctatttcaaatgccaaatatgtatagatttcacatttcagaaaaagggttgaatttacactcctaaaaaaaagtttgaatgctttccttttgggaaagagttattagcagaaggggacctgcttaaggattatgaataaataacacttgttcttgtctttgccaaaggagttgtttcactggtgttttctttttcttcttccttcaaatatttcttgggtgtttttgctacttgtctttttgtggaatgaaaaattcgcctgaaaatgtgtctgattccttagtggataaataatttctggtctggttggacattatatatgaaattttttaggctcccttgatgattataattaattatatttctttgctctttttgaatcgaatgtaggatcaaa

SEQ ID NO: 23962 - DNA, 896 bp, Glycine max
  Intron number 1 from transcript Glyma11g12550.2 (locus Gly ma11g12550) derived from phytozome v7.0 (chr-ID Gm11; pos 8944622 to 8945517)
tatttttcttttcggcaaagtagaagatatttgtggtgagtacggtgtggtggttgggttgggcgttaaataaataatgcgtttccggtttcggtgatgtgtttgcatcaatgcatggttcctgctagtgatgcttttgtcctcttcctgtcttttttagccggctattttgtcttaaactctctacatagcagattcattcattttgctttgcgtttttttttctttgttttctccggtgattagttatgttgcttgatccatttgcttcactgcatgtgtgtgtttaaacacttaaatttcttgtttttcttcggcaaattggtggattgtcttcggtatggtgtaatttactgttcaattaagaaaaatgggggtatcaatcggattacagaaagagacacggctttttctgcagatttagccacagacttttgatatattcgaggactttctaaatttatctccttcactccctcttatcctctttttgtctcttctttcttcaggttcggacctttattattattattatttttattattctttgtttcttcgattcatctattatcttttggtttcctgaattcattctctctctacggttatcttatcttattgagtgccatcttctgtatcttcctcaactggattctgcgtcttcttttaagtggaactaggcttgtttcattttagtatttgattgctaattttatatttttgtattttgtttcatttacgaatctagatgaggcctaaggttagtgagggagttatgtcctttatgttagattcaatcaccttcccctttgtcatgctgatgtataaatggttgcctttttttgtcccccatatgtccagattttcttctgtgaattgaattcgagtcgttgctt

SEQ ID NO: 23963 - DNA, 838 bp, Glycine max
  Intron number 1 from transcript Glyma11g04340.1 (locus Gly ma11g04340) derived from phytozome v7.0 (chr-ID Gm11; pos 2964895 to 2965732)
acaaatttgacaacacttatcaggtgtgatcagatcactttttatgtttcaagtgtttgctctgatcaatgacaacaaatgctgcactgctaaccattatgaatgatgattgatctgaatctgtcatatgatgatagatcacggttttcctttgggatcatgggtttcaatttgtaatgattgatgatattctgtcaacaataaaaactgctaatttataacaaatgtaaggtgaaacaggacagaaaggtgaaggaattgaaagttgtagggagagaataatttcaatcatggtatctaagtgaatggaaaatattacctttttgtcaatgaacaaagccttaaggtggtagttagtagaagtctatgaaatgaatacctctggctttatatctctaatatgatcaattcaactctcctaaaatccaaagttgtgaggtagaaccatagaagcccatgaacgactttatgtctctaagacttctgattttgatatttgtgttgtagttagggagtaacgtgagaacttacgaattaagttctgtaaatatttatatcttgcaactaatcttgtctggcttgccttttcttactgtttatttgaggatatacgaaaaggattcacttgaaaatttttgttctttctcttcacttcattttacaatgatgcaaaacaatatatgtattctcctacttttacttccttttccattagcaaagtgaaatcatgcataaccagcagttaatatatttaaatgttatgtctgtcagtgttatccagttattcttcaactttattacagtttacagtacacattacgaacttgcggtgcatatt

SEQ ID NO: 23964 - DNA, 839 bp, Glycine max
  Intron number 3 from transcript Glyma11g15840.1 (locus Gly ma11g15840) derived from phytozome v7.0 (chr-ID Gm11; pos 11500725 to 11501563)
caaaaaaacaggctgaatttaataattttcttgaggtaaaattataaattataaataaagaacaaagaaggattcagttttatagcatgtctaggattctgtggtagtgttagcaaaaaccatctccaagggtggatcaattttatctgcaaacatttttggccattgcaactatatctagagcataaaataagaaaataatgtacaggaattgccaattttttcagttttttagttaaaaatattccatgttctaataaatttagttaaagattgctatattttttttatcacaaagacacaaacatttggtcacattgtgcacattcagaccttttattttttatttttggcaaaattcagggtgtccttgttaaatttttttgtggtgcaaggagaattattagagataccttaactagaatatctttattaatttccaatcttcatctgttgaaaatttgcccagtctctgtaatttttttttctttttttggttgggcttactcatttgcaggattgatgttaaaaaagtatgaatgattagctagtgactaatttgacagtcgttcaacatgtggtttatgattatttggttttctgattctcgattatgcatctaggcatacttacattttgtgtataattttgactaatgtctttcacccccttccaacatgcatttttcagtacatgtggctgttaatggtattcactttgtaactataaattgatactagtgtaggattttgttactgcatttattaacctttagttttaattcatgctcaaaccaacgaaatgaacattattattatattccctttcagagaaaccat

SEQ ID NO: 23965 - DNA, 933 bp, Glycine max
  Intron number 1 from transcript Glyma09g29540.1 (locus Gly ma09g29540) derived from phytozome v7.0 (chr-ID Gm09; pos 36390611 to 36391543)
ccccaacccctaattccgatcaacgctctccccaggtacttcaccgttttctttaatccattccgataaagataccatctcttgagatagcttttctcggaatattttttactggatattttcctggaaaatcatcgtcacggatcgaatgcttttggcaccaaattagacaattcggtcaagtagcagtctttgatgcttctttgtttctaaaccctaaaaaagtgttcttatttcgccttttttacttgggtgtaatgcttgcgtgtttttatttgattgcacttcgatgctagaatttctctttttttgttaatgggttgaactcttaatttttttttcttctctcaaacgggtgtgcaatatcccttgaaggtgaggtttttttttcccctttttggtgttttgtgtgaggatttgaagattctgaattgaaagggagagtttgagtacatgatttctgtgtctttggcattatagaatctagtaatttgacaatttttggttctaagactaattggtttattttgaattctcagaatctggttttggaatctttaaaaactttgtggctcttgctaggattagttttgattaatttttgtgtatatccgaggtgtttgcttgtgaagaatgtcacgttggatgtgatataaggaagatatatcacaaaatgttgattttgatattctaatagaatgggatttaaagtatataactgtattgtttcttttgattttcacgtgtattttctgatttacttagtctgtgtcactccttttccacccctatccccactacggggtttttggggaggttgaggaggtggttctctttgtgctctcttggttttctatgattaaattcagatatctgatgatctttattctttatgcagttggttagcggaaactcagttattctgttttattg

SEQ ID NO: 23966 - DNA, 888 bp, Glycine max
  Intron number 2 from transcript Glyma09g29540.1 (locus Gly ma09g29540) derived from phytozome v7.0 (chr-ID Gm09; pos 36391566 to 36392453)
attggggtaatgatatcttgcttcacttatttgtttgtacacgcacataacttgttgaatgttaatgtaattgctggaatgttgttttattggatgaattctttaatcaagtagtaggttattagttattactttcagtctcattgtgttggtcttttatattttctttttgtttattttacctccaagtccagacaccatctttaatatttactcttctcatcagttttttattgcttattccagatcctcttttcaaagaaggattaggatattatatttgtatgtatcacaagataaaactatattagttgttgctacctgctaatgaatttttggttctcagaagttataatgtgatttaattgatagttatcttacatgttgatccattgtatgtatgtttggaattattaattatacattattaaaaatggatttgattttattagcaatcaatttgtatgtatggaactaatcataacaaattgatttgacttcatttgtaatatttttgtcatatttgaatctttaaagattaaattagttaattactttaacaattttgctggattgcccttacttaaagtagttagaatggctaaactagtaagtatgaatttttcaattaaatatgaattatgaaaaccataaccaaatcacattgctcaaattcaaccattgttgagtaaattctaaatttatccaactaaaaaaataagatgaactcttatttaacttagcaaactaaaagattccatctataaatcaattcaattctcattttttgtttatttcaaacacgctaatatgtttgtaagcttgtatattatgtttcttctactatctactgtatccttgttaatttgagaatgactgttgcagagg

SEQ ID NO: 23967 - DNA, 637 bp, Glycine max
  Intron number 1 from transcript Glyma09g20280.1 (locus Gly ma09g20280) derived from phytozome v7.0 (chr-ID Gm09; pos 25132286 to 25132922)
tcatctgacaagcaagtattaggtatgaatttcatgattagactatccttttcttttcatgcattggttggttttgaagccaaattttcaggacataccatgttgttcaatgtttaagagggaggccatgctgctcgtgttttgaattagaattatatgctttgtggtaatgtcattataattgattttaaattttccggaattgaattgtgcctacctaaaacgagaaaacttggttttggttgagaaaagattgacaacacacaattggattcgttggaattttaactgaaaatggtattagcatttagctgtacatgcattagtatgaagtagaaatatggttattgggtgtttttgataatagctggcatgatgtagctgtgatatttggattgaattgaaccaaattgttattgcatgagcatatgataagtttgcatgaaactgaaaatttgtgtttgttgtgctcaaattttgaccttaggtttcatatctgaccattagctagttctctaaaactatactaacctgctgaaaatggtttattattggattgcatggttgaaacattttagatgctgtattgataattggttgagaatctgttaggcactgtgatttgatttgtgcaggc

SEQ ID NO: 23968 - DNA, 829 bp, Glycine max
  Intron number 1 from transcript Glyma09g38150.1 (locus Gly ma09g38150) derived from phytozome v7.0 (chr-ID Gm09; pos 43591860 to 43592688)
ccctcgctggaactatttctgtcaaggtataatttaaattttcaatttttgtttttgtttttgggggttttatgggaatttgttatgtgggtattgcttgttttgtgtaatagagggtcaagtaaggatgtaaatgatgatggggttgaacttcaaactgaccggcaattgtggtttcagctttttctaattattttttctgaattttcgagctttttgtgggaagagtttaattgccatgcattctcggtgtaaagttgtacttggtcaaaaattcattattggaatgacttttaagagttattataaaagtcgacaaacatgtcgttcatggatatttgtgattgcacatcggtgtaaacaaagaacaaaagttaaatgtacattgtcagtgcatttcaattaaattcttgtgggaattgagtatctgggcattgtttgtatatgattatgtgatcgagtcgtgtaaaattgttaatggtgacgataaggttgaaccttgaagttcaaactaggttgtaccttgatggttggcattttgtggtgaatgacttgtttgttatgtagtaggtcaaaatgtagtttgatgcttgtttgtattcaggaagttttcacatggacattaatttaaatttggaaaactgaactgggcatttatatgtagtaaatagacttttgggcgttgtttgagttgagtgtgtcggggtggtacttgactagcttgcttctgttattttatttggagcaaaatgtctccatttaaccaagatttcatgtacctattttttgactgctacgtgctgtttgtttgtggaatagcattgttctg

SEQ ID NO: 23969 - DNA, 880 bp, Glycine max
  Intron number 1 from transcript Glyma12g03210.2 (locus Gly ma12g03210) derived from phytozome v7.0 (chr-ID Gm12; pos 2109039 to 2109918 reverse strand)
tcactctcactctcactctcactctctcagctcaggtactctctctctctctctgttttaatatatactattcagatcagaaattgtggatttacgctctcgatctttcatactttatcatgtgtctccttgttctgcatttttgtttctctctcaacgcttttctatagcatgtttactgtttttctttatgttcgtactcgctgattgcttcacccgatttggttaaaatctgttttcagttttcgtttttcactctgtctttttctcgaaaaccaaaccgacgagccgtacctttgtttttttagtcaatgtgagttccattttcatgctctactcgcgtttccgtagcgtatgatctcagatctttgttaaccactgctggattttggtggatttttcgattattggccgtttcatgcacatgcagcaacctctgttttgattaggacttctgtggaagcagtttttgcatcatcaatttgttgctgcttttctttgctgactaatgtggttgatgcggccacaattgtggtagcagacacttaaaaaaccatgacgttgcacccaaaattacggttgctgaccgtgttttaaaaccttggttgtggcgtttgcattatcataattatttattgataactttatagagcaaggatcctagttcttagtgctgaggactttgtcttaattttgtgtttgtttccctgttttctgacttgatattaatttgtgctactgaatcaattgttattgtctttgtctttgttctactagaattgtagtttttattatttttttgttgtgtgtgtgtgcgcgtttgtagataactgttgattttaaatctttcatgctatagcaggagtgtataatctgagcg

SEQ ID NO: 23970 - DNA, 459 bp, Glycine max
  Intron number 2 from transcript Glyma11g08470.1 (locus Gly ma11g08470) derived from phytozome v7.0 (chr-ID Gm11; pos 5986609 to 5987067)
ctattggcgttgccttccccgtcagttccttctcctccttcctttcaattttccctgttccttttgatcatttcagaattttaaggttccttgcttgtttgcctaccatgttgttttgttactgaatttctaattgtccctgcaagtataagctcataaattccacaatttatgtttttttctgtaaatttcacccgggaagggttcttttttttcttttttctttttttaatttctgaattgtgaagaattataaaatgtttgtgttgaaatttttattacagggaaaaattatccctccctccaataataattcttatggctgatatcactgctcattagcaaacataaactatgcaagacgtgtcttttttcatgtaaataataatgtgcatgtagtttttggtgatgacttctgtagttatgtttcttttttgttttttacctgttagataaaaa

SEQ ID NO: 23971 - DNA, 734 bp, Glycine max
  Intron number 1 from transcript Glyma09g03070.2 (locus Gly ma09g03070) derived from phytozome v7.0 (chr-ID Gm09; pos 2153431 to 2154164)
cgctgcgccctcgaagaagccctcttcctcggcaggtataattacattcacaattgcattgtccctcaccttacaagccagttttattgtgttgagtttgactcataagtcataacccacattctaagacattgcagttacggttagagatacaattaattagttagttagttccgagtttgtttcttgttacatgttgtatagaaggagttggtaacttcatctttttcagttttcaattaattccattttactgattctcttcacttcggttctaccatgtttcgttatatttacttaatggacaaagattagatacagttctgtaggtgatgtagcagctattgtccgattagaattggagttttacctcgataatctaggttgacatttaatgcaagccattgttacacaggtgaaactccaattttgatttgagaacaacaccacaaacaccttggggatcacatctacttttttgtccttactaaaattaaatgaatcttatcaacacattcttctttaactcactgttagctgtaattcattaagaattacaaaattatgtgttacttgtgatttcaatgaatttcggccgagatagtgtattgctaggagctattactgtggttgtgaacatcaatttgaaagcttaattgtaattaattgaattatgaggactgatttgcaaataccaattgatgttgttatgtggtggttgcagaacttttgtg

SEQ ID NO: 23972 - DNA, 877 bp, Glycine max
  Intron number 4 from transcript Glyma10g41430.1 (locus Gly ma10g41430) derived from phytozome v7.0 (chr-ID Gm10; pos 48488016 to 48488892 reverse strand)
tttcttgcttattgcctactgcaagctccttctacgtgagtaatcaaatgaatttattttgtttagtttgatattttccatctacttattgtttttggatgtatatattagtcttgttgcttttattatattaaatttagttgtctggtatatttgttgagtttagatttagatccctagtaaaggtcttaagtatatcttagaggggattgagtatctgatcttctagtttctggtttgagagttggcgtttaagattttagttccagactttatcagttatttatttcatttttttaagttaaagagttatgttaagagaataataatttatttcattttatgttaagagaataatattttttttttcatttttcaagttatgagtttatgttaagagactattgaaaccgctccaaacacacacacatcactgttttagaacattataaataggccaggttatttgggacaatcaagatatcattcaagattggatggttgctgctagtttacttgcaaagaagaaaagttactggaagatgattcttttcaagcttggggttagagagagagtgtgtgtggaagggatatggaactgtataaagataattgggaaaccaagctgtttaactttgtttgatggaaactcattccataaaaaaattaatataatcctgcttaaaattgttctgctatgttatgaatctggaagaatattagtatagtatatgatggtggaagagtaataatattagttgagttttagttcagctgaagttgtagtgaattttctcttgagactattacctgaatatttttttcttattattttcattcagggttcttattaggccacatcctgcaatttggcgct

SEQ ID NO: 23973 - DNA, 651 bp, Glycine max
  Intron number 2 from transcript Glyma11g32920.1 (locus Gly ma11g32920) derived from phytozome v7.0 (chr-ID Gm11; pos 34655983 to 34656633 reverse strand)
tttttcttaagattacttctgtttgtaagattctatccctacatacttgtcaaggaaacatatttgccttaataactaatgcatataataagcatttagtctctgtcaatcaaatatcatctttattattactttttgataatatgataaaagtcaacaaacttatacatgatagtttgtgattgagtgaaaacataaacaaatatttaacacttctagtgcataatgcttcttccttcatcccataatgactaatgtttaagattttttttacacaaaccaataaaacaagtattccaagagaattaatatttattagaaaataattttattaaaatatccttgttctccctcttaattttaataaatatattattaagtcttcaagacaatattatttattaagggtaaaattggaatagatgttttaatatctcattaaaaaatgagaacatcggtcaatttggattttttttaagactaaaactgtagtcattttgggacggagagagtattatatattcattactaattctttcttgctttatattttacagaatggagaaaattgccaactttgcttttctggggaaaaccatagtgtagcttgttctagtgtacaaaacataatccggtctcaaaatctgaatc

SEQ ID NO: 23974 - DNA, 1035 bp, Glycine max
  Intron number 1 from transcript Glyma12g04930.1 (locus Gly ma12g04930) derived from phytozome v7.0 (chr-ID Gm12; pos 3264018 to 3265052)
atcatcatctccctctcgcgggatctaagacccaggttttattttcgtcaaagactttagctttttctgtttttttcactgtttcggcttttgggtctcatcacaatcttcatcacttctctgattatcgttgactgggaatccccaatgttctgaccaactgtttctcttgtatttttttttatcttgctagttttggatctactgccctcattatattttttttatcatttctgttgtcattttttcttgccttgtgttgaaactcgtatgcagtttcttgattgcttttgatattgttctctaatcagaattgaagtatcaccttagtaatctgcataataaaagtttgcattaaggatcaatataggttaccaagatgaaactccaattctgattagtgattagagaatagcaccaaaatcaaataaggaactgctaaattttgtccaaatagtaatgttagttttcaacgtgtggatactgacctttttgcctagattagttgatcctaaagaaaaaactgcccaggtctggttgatttctatggcgagggataaagcactatcctggtttagatctaaaaccggaattctgtttgtaagatgattggagatgtggctaatattgttaagtttttacacacaacacacatgcttaaaagtcaatgtgggcataatgcataagtctacctaccaaactttttccttggtttgtataaacagaatgttatttttctttgattggtttacacatgctttttcatgatttataggattgaattttagttactgcacaagctaattttatttttgattgaattttgccttgcataagtatctttttatatgaaggggagtgctaggttgctagcagcacactctctaacacactctttaccattggttaaaatttatcgaaaactgcaaaattataattgaaactcatttaatgagaagcagggtggtctacaaaattttgtgatttccaataatttttgtgatggatattgtttttacaggaaaattcagctgg

SEQ ID NO: 23975 - DNA, 905 bp, Glycine max
  Intron number 1 from transcript Glyma12g05240.1 (locus Gly ma12g05240) derived from phytozome v7.0 (chr-ID Gm12; pos 3496196 to 3497100 reverse strand)
gtatatatcacttgatttgctggtaaggatcacaaagctttatttcaaccttctgttgcttctgaaacagtgaaatccttttgtttaaaagcactagttaattaatgagatttgaaaaaactggtggttctgaaacctttttttttttttttccatttaagagaacttgtatttgtccaccaaggcctcgagtgaagccattttctttatacctgacgattgaaatagctagctagtggttgggaaaaacttgatctcaacactggtttgtggttgaatattacaaagagaaaatgttgtttacactttgagggtttcaaataggtcgtgtacggagcaaaattattattgtggacatggtagttgattttgactggtttctcgtgtctctcatgcttcttgtgttttattttaccttgtcagaaccttagtttgatttttttagaaaaggcaaaacatttcattaaaaaaaaaacaataaaaaagatcaacaagttgttagccgagtggtattgaactcaatcctcttaaacaagatttcatgttcgagttttatggacagaaaaaatgtgattgagaagagagaacctcactaaaaaggatcagacagcagattagtcatctacaaagttaataaatatttcgtaccaataatatattttaaaaaacaaaaataaacaattgttgtgccaaaagcagaataaacactggctaccttatatattatctctgtttacttctttctctttgtcattgattgacataagaatctaatgattttggtggctcttttttttttttttttttggttaatttaaaatgaataaaaaattaaactgcttcaatatttatccctgacaatatgtttttaattttttttattagattaacattctttcaattat

SEQ ID NO: 23976 - DNA, 622 bp, Glycine max
  Intron number 2 from transcript Glyma10g36180.1 (locus Gly ma10g36180) derived from phytozome v7.0 (chr-ID Gm10; pos 44363975 to 44364596 reverse strand)
cacagggagtttgcgttatcgagaggtatttttttgtttctctttctcttgtagtattctctacatgcaggtctcgttacataactacgttgtgattgtcaaattcaccaaattaattaactgtagtatatttcctaattagaataacaggctttgatatccgttgcaaaatataactacggatgactccttaattgaaaggaagtagtgctaacaaaatttagtgtaatcttcgaattttgattttgattagtatttctgagtttgactggattgcaagttagcaagcaagttgacacatatttgtcaccggtgttaatgaactagtaaatgtgcaagtttgataaccgtgcttactacctgttatgctaggcattggttatcattaattctcatatcgtaataggcatagagccatagacgcatagtagtcaatagcagagcggagtggctcaacagtgtgctggttatcattctttttcattcaactttgcatccggaaatcgcaggcattcctcttttttatttgtgttgcattttctacctttttgtaaagcattacttattatttttctttctttttgcagcaatcctgatcagtccaaacatttggaaacagcca

SEQ ID NO: 23977 - DNA, 954 bp, Glycine max
  Intron number 2 from transcript Glyma12g35870.1 (locus Gly ma12g35870) derived from phytozome v7.0 (chr-ID Gm12; pos 39005615 to 39006568)
gttggcaatatacggaatcacggtgagttttcttctgctttttctttttcagtccttttggtaatatttgcttcttcatgaaatattcataagcttgtccagcttcacttggaagttgaatatatgatattttttcttgtaccaaatcatacacacacaaaataaatattagaggcttgccccatgttttttgcatgctaaaccaatcaccaatttaacttataccaaataaataataaagggttgctccatgtgcaccctcccaagtagtcatagtcctgatgatgtaactctataaaaaacaccttacccaaattctcatagtgaagtgcaattttaaagatgttatagatcttgagtaactcttattcaaaacacagaaaagttcccttgctctttgatattaaatttagtgtgtataaacttctcaacaaaacaagagaagaaaataaaataaatcaaagaagtaaaatcaattaaacttctctctttttctatggataaaagatctaattgaaaaagaagcacaataagaataaattaacaaggttgagtctatacaataaaaattatttacttatctcatgatagaaaagtcaagaatccacttacgtaataaagtagatccccaaatattttgaacatattgtgtagtatcaaatcccaaatttacaagaaagaaaaaactttttccaagattctctaaaaaaaagtcactaggttaaaattaacttatatatactctctaactttttcgaaaacttgtactcctataacttttcttatagttaacaataaaatacttgactaaaagcttacataagctagaagctaatccaagttggaccatagttatttacttatatggaatccatttaagtgcttgacatcctgattcaattctaatggaaatctattttgtgtattcagtaagagttagttctaggccagctg

SEQ ID NO: 23978 - DNA, 414 bp, Glycine max
  Intron number 2 from transcript Glyma09g03240.1 (locus Gly ma09g03240) derived from phytozome v7.0 (chr-ID Gm09; pos 2284968 to 2285381 reverse strand)
cattcattcatctatcttttatgtcagagacttatgtttttagtctctttgatacacttttgattttggtcacccaattaaaattaggttaaatagttaaatttgcgtgaatcgcaaacaaattggtcccgaaatatgatctttttacatcctaaagtttgtggaatgttgtatctaatggtaaagtaaatttgagagaatataaaaagaatattttccttttcaacatattttccttattctcactcattcacatgattggaggatgctctatttgtagcatgaaaaatcttgcttaaatttaatattatgtttgaagaattatttagtaaattatgctgaagcattcatgatttgctaaatataatggctacaaaagctgttgagcattggcaatttgaacgtaccagaaat

SEQ ID NO: 23979 - DNA, 739 bp, Glycine max
  Intron number 1 from transcript Glyma10g37550.1 (locus Gly ma10g37550) derived from phytozome v7.0 (chr-ID Gm10; pos 45514942 to 45515680 reverse strand)
ctgttattcttgcatctcaggtatttcctactgtgccattactttttccctctttttttgtattgaatttttcagagtatatatatgatgctctcttactttgtagtttgtagcatttgagcaatcgcgatttattaaggatgtgacacaagatagaaaatcaattccagtcctacattataatttaaaatagacaatttgaagagtgaaattctcacttctttctcaatctcttaattaaacttttttaatattcttctcttctttgttcttagctagatatacatacactactccacatctagtaaaaaggattatttctccatcgtctcaaattacattccttttatatttgtctatatatttgatctcctataatttaaaactaataatacataaaaattaaattcttaaaaaatgtttatctattttgaattttaattatatacaataaatatttgacttatgcatttactattacaaagactaaaatagtcaacatataagtacgattttcctttattttgtcctttatattcctttttctcttatttctttttttccctaattcacttccaatatggataaagacaatgtttagttcgacaacaactgacaacactttatttttttagaaatacaacaaaattgatatctgtttattcatactgttgttttcctataaagtgtaatccactaaagggtcacttacattaccacattgacaggttgaatcaga

SEQ ID NO: 23980 - DNA, 702 bp, Glycine max
  Intron number 3 from transcript Glyma09g36430.1 (locus Gly ma09g36430) derived from phytozome v7.0 (chr-ID Gm09; pos 42178077 to 42178778 reverse strand)
atccacaagttctactactttaaaagatcaccaaggtatgttgcctcgtgtttgtacttcttttcagttctaagctttttacttactgctataatgttttagttgaccgcacattaattttcatgagatataaggcccgtttggtgtaggctcttaatcaggtctccaaacatcactatgaattcaagtgaatggactagatttataaaggctaaggagaaaaagaggaatgatgatgctttgcaagttgacaaacttcacaagaaaatgcatttagttttttaattttaagaagtcatgtcaataaatttttcgagtacaaaaaacttgggtgacctagagttttttccttaaaaaaaacttcatcctcaaagagatagaggtcatcaacccccttagcgctgacaatcctcctcctcgaactcaactcctgaaaagcgagtagtgcattaaaaaatagccaaacaaattaggtcatgtgtcaatttactgatggaataacaaatttgggacataaaggacattgtgaagattagagatttagattaggaatggagtcaacactagccatagtagaaaaggtgccatttgcaattttgatcttttaggactgtaattcatcttgtttttgcaaagaatgaatatcattattttacattgttgacaggaaggaaggttgtcagtcggaaagcagatcttcta

SEQ ID NO: 23981 - DNA, 991 bp, Glycine max
  Intron number 1 from transcript Glyma09g06820.1 (locus Gly ma09g06820) derived from phytozome v7.0 (chr-ID Gm09; pos 5631260 to 5632250 reverse strand)
agatccagagatcgtttcaccttggatcatctcaggtttgcgttccaaattgcgtaaaatgccacctaaattggaacacacaaattgaattaaagacaaaatctgcattcctttttcggccgatcgatgattcaattatgcctgagacctgtagtgtgtgaatttttgttttagttgtttctgtttgtggctggatgcttgaattgaagtgaagagtttgggcttttgaacttttctgctcttcctaacttaccgtactatttgacctgttgatttgaattataatagttgcaaggtataatttgatttagtgcataacaccagagagcgagcgagagggactgagaagaacagaaaatgctccattggttatggtaactggatatgtaattgactggttttgtttgcagtggagtgactgtaacacactctattgttggctaaagtttattggaaagtacacaatcaagagtgggtttatcaaattaggaatgaaacctgcacaattttgtgattcacaataaattttagctaacaaggaatgtgttgcttgcatttttcttattttaaatgataaaaatgcacagagctgtgtgttccataggtatcatttagagcattagtttcttttctgcaacaaatcccttgtcgtgtctccaaatttgccaggtgccaatcatgtccccccctggtaaaatatatgtataacaaagagaaagattggggctctctcttggaggcatttcttattttgttgtcagcattttataaggggattgggagaaggggatagaggatatgagtcttgttgctaatgctaactcggttgtgatttctttaatgttgacttgaagttcattttgtatgcttaatgataatataaaaaatgatcgggtaaacttcactgatattttgtttattcattaagtgttgtcttgctgccttatggtgcataggtacttaactgatcaattggcgaaagttcagatag

SEQ ID NO: 23982 - DNA, 837 bp, Glycine max
  Intron number 1 from transcript Glyma12g32400.1 (locus Gly ma12g32400) derived from phytozome v7.0 (chr-ID Gm12; pos 35893505 to 35894341)
gtactaaagctttcaacttttcagcatcctttcaggtttcttacctctttcaccttcttttcgttattcttcacatctctacttgatttcaaagaaagggtttttgttttagttaattttctctcgtttgtaatttacccctttgattttttttatagttatttttatttattgtttttttttattcccaattgtaatggtaccatcaggggaactaatcactggattgcatttgcattagatattgttttgaaaattttcgtattgtttatactgatgagtttagaattgggctagtagaaagtagaaacatttctagaaaggtggcaagattgacatgttatggaaggggctgttgaattattaacatgataaatagggttgtgtttcgctctcacttgagctaggttaacaaattgggttatagcgagtgacctttgaattgattatgtacttgtttgtattcacattgggctatgaagaagcaggttgaattatcagctaaatgtccacatgtttggttccactgagggattgattctgagtttcaaattgattttgagttcgaacaaattttggtagtttttgcgttgggtaacaaaatttatactgagttttactactgacttgcattaagaataaacacttccggacagaaatcacatcacttcaaaatcaatttccatcaaaattaattttgtaaacactcacccgaacacacacaaaagcttgagggcctgttttcttggcagatgcatgattatgtgttgttatgttttaatgttaacattgtagattttgttggttattacatagtgcaacttgaattgcatgcag

SEQ ID NO: 23983 - DNA, 984 bp, Glycine max
  Intron number 1 from transcript Glyma12g07190.1 (locus Gly ma12g07190) derived from phytozome v7.0 (chr-ID Gm12; pos 4909582 to 4910565)
tcaaatcattgatcttggtacgtaagtcatgctttatgtacagattactatttattactactataatggatgataacaacctctatatttgggattcgaattccctcctgttggaggaagcacgtatttatgttgtcaaatgattaaaattgtttaatgaagatctaatgatttataaattattttaataatttaacttaaaaaatactaatcgtcggatcaaatcagatatggtccacgttcatgcattcattcacgactgtgtgaatgcatgcaatctattttcctatgtttgataccaagcctccctagctgcatgaaataatacgtatgaactttatagccatcgttaggaaatgcatgttgaattttcctaaccgtaggtcctcctaatcttggactgggaataagacaaatagcaagaaaaataaaataaattgagaaagtgtagatgtataaattatgcgataaaaaataaaaaatcatatattaacaataacttttatgttttattgacaacttcttatcaattagcatttttttataaccattatttaagattgtgtacactcaaaaggggaagagagaatacacaaataaaaaaaaataaatctactaaataatttgataaaggaagagaggtagtaggtagtgtaaggtaagtattaaattgtgaaatggaaaaagttatatatctgtttattaagttgaacgtgaaaaaacattaaatcccgtgaaaaagacatgtgcataaaaatcaaaatgtaacagaataagctcttttttttctccaaaagttttcatacttttgaatagacgtttaagactacattttagtgtacaacatgaatttatgattaatattccagtaatataatttatcacatatttggtttttaattaggagaacagaaaacttataatgttttttatttatttattattacaggattattttacggcagctactgacacaactgccat

SEQ ID NO: 23984 - DNA, 896 bp, Glycine max
  Intron number 1 from transcript Glyma12g06090.1 (locus Gly ma12g06090) derived from phytozome v7.0 (chr-ID Gm12; pos 4152584 to 4153479)
aaagtctaggtcagtctcagttccttcaatttcaccttccgaatcttaatccttctctctcgctcgctcgctctctgcttcttcatctcatttcatttttttacatcaattgtcattgtcgatcttcgcagttgctgcttttctcgttttgatccgtacatttccctctgccgttgcgatctccgaagctgcgagattcttctgcctcgattgcgcacttcatgtgattccgcttctctctctaaccaagtattctactccttgggtttgtgccttgtttggtttccaaaaaaaaaataatatatatatatatatatatatatatatatatatatatatatatatatatataatataactataagatttatagtttgttcaggcatacgctgtcactgcgttgctagaatttttataggctaaggctgaatcataggttcagatgcgaggacaattttcctctctctcttcatattctcgtccgtgaatctctgtttcttccggagagatctcgcagattttcttactttcgcgtgatcttagaatgcacagctgataagaaacacattttgatataatcatatcaacttattggattgctaaggatggttatggctgattgctgactaaaattttgcaagctttggtattaatgccgtttcaaattttttgtcatttttctttacggcacttgttagttctgaaatttcttgattctggatgtaaattgctagattaggcatgctggattgttctttcttttagaatggatggagttgagcaattaataattgtagatataagagccttggttgaattaatgacattttccctcacaaaatctgtgtgattttttccttctgcaggtttttacatttctggagtagctgaatcag

SEQ ID NO: 23985 - DNA, 388 bp, Glycine max
  Intron number 2 from transcript Glyma11g37490.1 (locus Gly ma11g37490) derived from phytozome v7.0 (chr-ID Gm11; pos 38586319 to 38586706 reverse strand)
ttcccccgttcgaagtctactttgcccgtggaaatgtaaatgaatttagctgtgctttgtttgtcctagtccaggtatacatggaatgccctctatttcctcaaaaaaaaggaaagcaactataaaggaattttatgatatgtcataatgttacgtatttacatgtatcagagatataaggttgatcaggtgattaagaaaaaaaaaaggaggagaagatctcgagtttgattttttttactaacaaattaaaagactaacaattaatatttaccgataaaaaacatatttacatgtatcttatcttgctgcctttttctcttaaactttgatgatggcatatgtttttgcagctgtcatatacccttcattaaggttacttcaaggc

SEQ ID NO: 23986 - DNA, 259 bp, Glycine max
  Intron number 3 from transcript Glyma11g15910.1 (locus Gly ma11g15910) derived from phytozome v7.0 (chr-ID Gm11; pos 11577035 to 11577293 reverse strand)
tttatacacaagttactttgcttcctcaagctgaggttggtttttcatttgaaagttatttatgttttggtgtgtccctaattatgtcccttccaactaaataatcaatttttgagagcttcttttcattgtttaattagaacaaggaatgtttgtttttatgagcttaaaatgttaaatgatgtaccaaatgttccttagctgcattacattaagtaattctgaacacactgaattcttttcttttcagttggaaggg

SEQ ID NO: 23987 - DNA, 1032 bp, Glycine max
  Intron number 1 from transcript Glyma11g14590.2 (locus Gly ma11g14590) derived from phytozome v7.0 (chr-ID Gm11; pos 10416971 to 10418002)
caattacaactccatttgtggacaatttgatttgggtaagtatgttcatactctgatttttgtttttgtagaatacgatgtatttggatgcagggaaaactagaactgccgagaccttatgttctatgcaaatgtagagtctttaattagtttctataatttgatgatctctcatctcaataattgaaatgtgagtttcgtagctgttattttttcccctatttctataaacatttcaggcattcttgatatcaagggttgatttttttcttcttcttattttttccctgcacttttgatgattttgttttgtcacatctcctgtttttacgcgccgatcgaatttgtgtgccttgttcctcaaattagcaagagcatctgaattctgcaccaaaatgttattcactaaaatgtgaaaacacaccctacttcctcagaaatttccaatagtaaattgcaaaatacatgggatgagagagtttctaactctttttatatacctacactttttaatgttggactgggaatgatgtacaatccatgataccatatactgatcctcaaatcagtgctctgaatctctaccactctccccagcgttcactttttgtttacacaagagaaaagaaattgtctaccccgccatcttcaaaagtggatctggttagcttcaaattgtagttttgcaagcaatgcaccttgatggaactaatcatttatttttattttgtagaaattttagtcaatatgaggtaagggaatgtgagatgtgaattatgatccaatcttcaaaaaataaaattgatacctgttgcatttaatcaccaatctataaaaaatgatttttgctgcgaataatcattcagtcttcactcttcagaaattcgtgtgtggaattttgtttatgtgctttatttgattcttgaatggattagtacttgtttattctttcataattagtatccaaattaatgtaaattggtgtaataaatcaaaggcacaaacaatacttccaggtggtgcctttgcgaa

SEQ ID NO: 23988 - DNA, 689 bp, Glycine max
  Intron number 6 from transcript Glyma11g14590.2 (locus Gly ma11g14590) derived from phytozome v7.0 (chr-ID Gm11; pos 10418883 to 10419571)
cctattcacacttataaagttccagtcccaccaaagtgagttgtcagttgtgatggcttcataaaaaaaaatagttataataatgaatcagaagaaaggcttgctgcacatgcttgcattttttgtatctatttttcttttcctgcaggtcagtgtttggagggtcactccaccctattctgcttgttctatagaaggcagaaggcactaactgctgaattgttgttagtgatgggtaattttgaagtccatagtattttgttttagaaaaccattgaatatgcagagaccagcagttgtgactcaaacaagaaaaccaaataaaattgttgctaattcacatcctaaatttgtggtaaattaaagttcatgaccaagaaacataatcaatggggtaatagaacgatgattttgaatggctgattggcactcattgcatactagttgactgtttgtgagaaagaagcttcgctgttatggcattgctcaggaaacactatctaataaaagcttattgagaaaaatgcatctagtagtctgtttcttttttttttatatatttttggggttctcaaggcacgttaagtggttaacagggttaattttctcctttgtgtgcatctacattttatgttaagaagtggtaagccacaataaataagttgatacaatttgttctgttaacagag

SEQ ID NO: 23989 - DNA, 675 bp, Glycine max
  Intron number 1 from transcript Glyma11g15890.1 (locus Gly ma11g15890) derived from phytozome v7.0 (chr-ID Gm11; pos 11558074 to 11558748 reverse strand)
ctttgcttaacaaaatcgagacaagtcacattcaggtttggtttattcttcatttcttcttctatgttcaaagcaaggttaaacaaacaagaaaaaatattgactgtggaagtcaatatatgtgatggcaacaataattttcaatgacagacaaagtagtatttgatgtgaaatttttgtggagaatttcaggacctctcattcttgtgcttcgataactgtgtagagctggttttggagggaattaattttgggtcaggttgctttttagagtgtgtttatctattcacgttataagaagaatgagtcttgtttggttaattcggaaaaactacttaaggtttgctacgtaattaatcaccaagaaaaatgggtataactataaagcatactttgcattatttgactaatatagattatggctggtaatactactgcaaaaggttgaacactaaagagtttttcttttgctgaaatatcaatttttgaaatctaagccgctcaaattaatgtgtggctgagccacccaaactaggcaaaagcagtcaaaaactcattttggcactgtattcgaatgagctcttactcgttaatttaagttagaagcccttaacatccaacatgattggggcatcaactaattccctggctctaagatttccatattgataggtt

SEQ ID NO: 23990 - DNA, 683 bp, Glycine max
  Intron number 2 from transcript Glyma11g08560.1 (locus Gly ma11g08560) derived from phytozome v7.0 (chr-ID Gm11; pos 6060666 to 6061348 reverse strand)
gggagccgagagcctttgtctatcacaattttctggttagtttcgcgttatagcaattgcttcttcgcgcctgcaaatttgattcactatttttcctcggtttttgtggttatgtgattgtgtgatttctgttctcaacttttatcgaagctcgtgggttatgaaaatgttgggaaattaaaagggaatcgcatcctaacgtggagttttgccgacttactaaaaatttgtgaaagtatgaagtgtttggtaatatcgctggatcttatgttaaggatcaaggacaactggggtaagatttaagacgattgtgcatgaagaggaatggaaataggggtttagtgctaagatttcatcttgatacagaagttcatggtgttttaactccttatagttcttgattatgagttgactttctttcagtatctttgtattttgaaggttacgatatcattataattttctgagttttccttagctgaattatgcttagcacaatgttcaaatggtgtatttcaatgtttgaatgtgactttagcgagatgtgatgacattatgtgtaaatcttggttaagcttcgtattcttctggagctttaataatttaatactaggatttattataatgtctctaccttgcaaatactaaagtgtatctaaatgatctgcttagacgaaggagga

SEQ ID NO: 23991 - DNA, 934 bp, Glycine max
  Intron number 1 from transcript Glyma12g32680.1 (locus Gly ma12g32680) derived from phytozome v7.0 (chr-ID Gm12; pos 36166341 to 36167274 reverse strand)
tcttctgctacaggttcgtgtctttgaaattatttctattggagtaaatatttcattacaaattaaacttgttatatggtaagtttgttgactatgtagatttgttacactgagagtggataaaaaaaaaaaatcttgttctgttagttgaaaaaagaatgggaaaatatatacactactgactacatacacatttgtattgtaatcgttaaaataaaatttgattgtccagattgattattctcatatctcacaataatttagtgttgttatctaactgtctacgcatatatgtgttttggttaccttatgtgtgacgtgcatgatatttgttctcgctttactatcttctctcgaaatcaagaagaacatataatcttgttttcgaaaggaagaagtaatgcaaactacactttattggtttctttctattagtaagcaaccctcttcagataaaccaatgcatggtaaggcgttaaactaattaaattgacgtcaatagaatttaattagaatgcattataaagggtttcttttatccattcaatggtgaattgtcagattccctagtgcttaggagctagttgaatagttgtgaatggtaaaaattacttgcgaccccaacatgccattagtgcactgtccggtggtattgagagtgtctcattctgtcaattttaattaaaaaaaatggtgaattgtcatgtaaggtaagatcatcgatttttcagataatttatactttgttgacacttgacaacataaaaaatctttacactcagagtgtatcaaatttaactcaggaaatatgttttggttatcttatgtatggcatggtgtgaacagttaggttctttcattcttctaatatattctgccaaaaagggaagaatgaatagaaatagaaaattttatgggtttgcatgatgtgcag

SEQ ID NO: 23992 - DNA, 326 bp, Glycine max
  Intron number 4 from transcript Glyma10g40230.1 (locus Gly ma10g40230) derived from phytozome v7.0 (chr-ID Gm10; pos 47711413 to 47711738 reverse strand)
acagagtaaacgatgtaagctaaatagatgttttttcccttctggcttctgcggttaaaatatgtaaaaaaatcgatttttttagtgaagttgcagtactttgatttgtttctgattaataatattattataagagttaaatccacacgacggtgtaaaatcgtcgtctaattataaatcatccatcactgttgaaattacttttaaagtaattataattggaaagtttaagaagcgtggaaagcggtgttgagtgatgataagttgttttgttcgtttattattattattttggcaaatgaatctttgttcttcggggacaggaa

SEQ ID NO: 23993 - DNA, 316 bp, Glycine max
  Intron number 1 from transcript Glyma10g22120.1 (locus Gly ma10g22120) derived from phytozome v7.0 (chr-ID Gm10; pos 28106165 to 28106480 reverse strand)
acgactaacaacatcaaagctttgatattggtaagtaaatgcctcaaaacttctattatatttcctgtttctgaagtacgttttttctcactaacatctctttttataacattaatctctttaatcctctcatttgtactaattactttatcttacatttttcttccttttcttctcatctccttttctattaaaaaagttgcccgattttgatatataaatgcaatttctcttttcattttaccaaactttatataaagatattttatttgattcaccaggacatatttgctgctggaactgatacttcagcatc

SEQ ID NO: 23994 - DNA, 861 bp, Glycine max
  Intron number 2 from transcript Glyma11g38140.3 (locus Gly ma11g38140) derived from phytozome v7.0 (chr-ID Gm11; pos 39084540 to 39085400 reverse strand)
ctcaccgacgaagaagctcagacgctagccaagaggtacaatacaactttcatttcttacttactctctgttagatcagatctgctagtgcttttcttttctcgatttcttcgatctgattctacgcgtctttctattcttgcatcgatctgttttttaatttgtaatttcggtagattcgttagtttcttctgcgtcttctgaaggtgatgcttatttgcttgagagctatgtgatgtttattgttcagtatcttccacggttaatttatttagttagtttttattagtgcttgagcttggaaatgtaatgcttcttttgtgacttaagcctgatttattgactgtgttaatcctgttagtggttccacttttctgttgttagcctatgtttatgcgtgattaggtgcgttaattgaccattaattaggctttgttcgtttggataaatgtattaagcacatataaagaaaacaaaaaggtaagcttaacaaaaagaaaaggtaaaatgtactcaacttttcttataaactaaaatcaacttatgcagcttagcttttggagaagttacatgagagagtttctataaaagttaagtgtttaagttgattttagtttatatgaaaagtttaattcaatttaccttcttattttcttctcctgtaaatgtatataattaagtttattcaaacaggaccttaatagaaagtggctatcttatacacgtgctgcagtatgtatttcttcaggacctattgtttatttaatcagagctaggggatgttgcgttcgtactaattaatttttatttaaaaaaaataattgttgaatatatccttccatttgtcactctcagcaaacc

SEQ ID NO: 23995 - DNA, 971 bp, Glycine max
  Intron number 1 from transcript Glyma12g04380.2 (locus Gly ma12g04380) derived from phytozome v7.0 (chr-ID Gm12; pos 2881412 to 2882382)
gctaccaacactgagcttaaccgagcttcgcaaaggtaccatctttattgctctaccattcaatcaccaaatttcatctccttttcgttgtaccttgtttgggtttatgttaattattggttacatcggtttctcgaccatttggtttagaccttcatgtaatgtttttgtgatgtgatgatttcgagttctatttgattttttcgtcttctgaattggggtcctttcattgggattaatatattgtttctctttttctttatagatgggtttttggagacgaccgatttttagttctaattgttttttttcatcaattgattttagggcttctattttgtcgaatcatggatttttttccctgttgcatagtgcagcttggtggaaagtgttggaataaaattatgatggttgcatttgatgaatttttttagatattatgtaaaattatgatggttgcttttgatgaaagtttttagatattatgtaatattatgacatggagttagagttaccaattcaatttagggttactatgtcgcaaaaggtattttcagttaactgttcacattgcctccgaggatgaacaaaaataaaactttcgttcttcttagctgtttccatgcggaaaaatattggagacctgaactgaggaggctttggaaaagatccttctgtgttctatatatatgctactttgctggtctttcttcagattgcatgttgtgattttctattctgaatgcatctaggattgtttgtctgttgtaagatgtcgtagttatcttctgctttgtcagaatcatttgtgccatgtatgcttcaataatactatgtagcctgtttgtctgttgtcttgcttttccgttgtacatttcctctctagttttattaccattaatttttggatctttgtaaggtcctagttggttagggtgaaatttatgtttttcttatttgcctttacccag

SEQ ID NO: 23996 - DNA, 668 bp, Glycine max
  Intron number 1 from transcript Glyma09g36560.1 (locus Gly ma09g36560) derived from phytozome v7.0 (chr-ID Gm09; pos 42264567 to 42265234)
tggttttgagacaggttgggtagcttttaactcccttttttgagttttgccatgtgatcttgtttcattttcgttggctgaagtttctgaatattaaattggtaggccagtgatttggttgttgaggtgaatatcagggtcatatgacagtgatgcatttagattttcactgttaggttgtttaaatgcgacgtcgtttggctattcatctcatgttttctttccttgttgctctgcgcctctttcatactaacctgtccattgcttgcacgttcgattttttatttttattttttttgtttatttccttttggctgtagatttaatttagatgtagacaagtaggtaggaagtagagagcatggcttggttttaacttgaaacatgacttgaggtaaactctgatttgtgcccgtgacagtcactatgcattatcaaataaacatgtccgtgagcattggagtttctgccggtggcatatttgctgcttttcacctttatcatccccggtgtattttttttttttaaattttaatgaattttagattcatacaaataaatgctactatatttaaaatttggaagattttgagtatgctgagtttttctgtttttatctaacttcttattgaggaaggcatttgccaagaggtttggagctgttcaaa

SEQ ID NO: 23997 - DNA, 916 bp, Glycine max
  Intron number 1 from transcript Glyma09g37740.1 (locus Gly ma09g37740) derived from phytozome v7.0 (chr-ID Gm09; pos 43245449 to 43246364 reverse strand)
taaaggttaattatcctctaggatgacatgtagtacttcctttgcatgcatcatatttataataacttaaggcatatagtttaatttccattcactaacataatagtattaaattctctgatagcaagactaaatccaataattaactaccattttgaactttgaagggtttgatattaattcggtccaaaagatgtttaagacttcaccttagtttctaaaatataaaaagtttggtaaaatgaattattcttatttttttatttagtttaattttttatttcttaaaaaatttaatttgatcttttatcttattttttcttgtttaatttagtcctttatcttaaaaaaattattttgattatttatcttttttttaatttaattttttgatccatttaagattaatgcaataatcatttaagattttttttgttaaaaataaagtggagggagataggagaaaagtgaaccaaaaaagttcatttttaaatgattaatgatattaatcttaaatagattgaaggatcaaactgaaaaaaaaataagataaaagattaaacttaacaaaaaataagataaaaaattaaataaaatttttaaaaagttaaataactaaactgaacaaaaaatgaaataaataatcaaattgaacttttaaaaaaataaataatgacactaaataaataaaaactaaatagatcatttagctctaaaaaattagatgacattgatatatccttgtgtcaaagttataacaccacacgtttatggataggtttttcatcttccatctctaacttccttggggaaaacactttataccttatcatgtttttcattcaaacttttgcattaaactataaaagattttcagctctactcaaactttcattttccaggacttgttcgaaca

SEQ ID NO: 23998 - DNA, 758 bp, Glycine max
  Intron number 1 from transcript Glyma10g06610.1 (locus Gly ma10g06610) derived from phytozome v7.0 (chr-ID Gm10; pos 5349391 to 5350148 reverse strand)
aaattggtgttatcacaggaaaagatcttgctcaggtattataccttccagttcatggatttatattcactgttaatgcagtacaattgtacaatttgaaaattttctgggctcccccctcaaaacaataaaaggaggttttgaacaatttgttggtttgtgattttgtaatgtttgtccttcacccctctcaagtaagcaattgcatagtaggaaatgataagatggaaggctatagaaaagaaggttcttgtcaagagaaaatgaagctagaaagattttttgtgttcccccaccttttttatgtttctagttttagttaatcaggaaattaagaatattgatgattatttccattctctgtcagtgttttatttgacttataagttagaagtttataaaaatatgttgattgatggacatttctattctatcctaattctacccttgtagatacaacttggaagtaaggacattatacgtattaatattaattgtttctttgatcctaaaaatgataagtaaaggaatgtgtctggcggtgtgatatactatgtaatgtacgggttatgggttgggttgtttggtgtttctttaatttacgtgttaagttgattactaagttggtagttggtttccggcatttctctatcctacaaatccactcagatacacactctagtaacttcatgcataatcttaaatcagtgtgttttgcttatggggcttcactttctctgtgccaaagatttgcagtg

SEQ ID NO: 23999 - DNA, 976 bp, Glycine max
  Intron number 1 from transcript Glyma11g14760.1 (locus Gly ma11g14760) derived from phytozome v7.0 (chr-ID Gm11; pos 10522000 to 10522975 reverse strand)
ttcgtctggttaaaatcgcgacctctgaacagcaggtgaggattttttttccgacaacgcatgtaaagtttttattttttctatgactgtgattttgattgctaccggataaaaaattaaaaatattggagattgtgtcgtacggttattttgcgacttcagaattttccgtttacttttttttttcttcagttgggtcttcgattgtctttgggatttggatttggattttgtcgggtaattttgcttttggttattttctgagatcggtcttcttccgttgtttcatagaccccttctatgatttacgtttgaattttgtttacttttctcatgaacgttctcaaatctcggttatgagggttttttttttttttttctgaattgttttgtaaagtttcctatctgaatctgaatctgttttcgttgtgtaatcctgtgttctgaacgtgattttctcgtcgcctttgtcatcaacgtgcctggatccggtggaagttactcaattagcttcctctgaattaagaggcttaaggatatggttggagtaattttcaactctcaaagattgcgttgcaagtaatggtgtttctaccgaatctggttctgatactgcaaaaatgcacttgctttctttataaatattgatatctacaaaaatgcttgaaatcatagggatgaaaacatgcacttttttttattgttttttttatggctaaggtcttttaaggtttttttttagatgccctaccaggtgaacccaattgctgtaagggaagggtgggattatgcaaattttagtctttctctaagatgcttactttgtcattttaaacgaaattcagtaatgtaaattgtaaaacattgtaaaatacttaatatttatttgtacgggtacgctgtaatgtatctgagcttttactttggttgtttactctcaggctttcaaattgagtgctcatttatctgatcacgg

SEQ ID NO: 24000 - DNA, 281 bp, Glycine max
  Intron number 2 from transcript Glyma11g10490.1 (locus Gly ma11g10490) derived from phytozome v7.0 (chr-ID Gm11; pos 7498464 to 7498744)
caggtacgtaatgtttcacaatattatctttgaaactttgaatatgctgagagtctgacacttcctattaatctggttgtctagtttgtggaaccacagtcactaacttagaaatccttgtgaactgatttattgctcttattttgtttttcaatcatttatcatttatcttgctgcttatcttcttatttttgtttctgtggacttctatttttatttattaatgaaaacctgatcaatggttcaaactcaccactttatttttatgtctttgtgcagtc

SEQ ID NO: 24001 - DNA, 954 bp, Glycine max; identical to SEQ ID NO: 18587
  Intron number 1 from transcript Glyma11g11020.1 (locus Gly ma11g11020) derived from phytozome v7.0 (chr-ID Gm11; pos 7849816 to 7850769 reverse strand)

SEQ ID NO: 24002 - DNA, 693 bp, Glycine max
  Intron number 1 from transcript Glyma10g00780.1 (locus Gly ma10g00780) derived from phytozome v7.0 (chr-ID Gm10; pos 527681 to 528373 reverse strand)
tgctacgttcaaaccctcgccaaggttcttggcaggtcgagttccccctctcttgttcttccaatttcagtttttgttgtttccatttatatatctctttgattaggttattaacttcttcttttttaagtcttgagattttaaaaacaaaaaaaattcactctgttttacgtgttttttaattttaattaattttggtttaatgtgcttctgggttgcgcttaaggattggaaatttcatatttttattggttttttttttttaaatttattaggttattgggttttttttttggtttaaccgtagaaaactgggttcttggcatgtctcgcttcctcctatttgctatctgaaattgaaacccttgaaatgggttcttggcaagattgaaagtttattctttttttttcagggtgttttattgggtttctgggttgcgctggttttttttttttaatgtttgattttagttttagtttattgggtattcttgtgagctgtggtttatttatttgttaagcatggaaaaatgaattcttctgttttttgttaattaaaatggttgaatgttttaattaggtttagcttatttggtgtttttttttaatcatcgaaataggaaacagcttgtgataatgtggggtttctgatgttggttttcagtgaagaggaagctaagaaaaagatttaca

SEQ ID NO: 24003 - DNA, 450 bp, Glycine max
  Intron number 2 from transcript Glyma09g38220.2 (locus Gly ma09g38220) derived from phytozome v7.0 (chr-ID Gm09; pos 43624022 to 43624471)
gggcaagaagtctaaagggaactaaaaaaataaaggtaagctatattgttgcatggcttattacatttgtgattatactattactatacttagagctgatattcatttttcttcttagattgatctttattttaggaaaattgttctattgtggaaagtttcatgggtaatatgtttattgcaagttatctattttgataatattttcaacttcattttttaacaaatgatgtatcttcttgactttgtttattatattaacactgaaaaaatcttttacttactgctgtaccaaatgcaagaaacaatatattttctgtagcagatattagaaatgctgacaatagtttctgtctgtttagtttcttttaaatttacagagcctcagttcatgtgatttgaactttcatttattatgcctaattattctgaattgtacatcaggtttct

SEQ ID NO: 24004 - DNA, 614 bp, Glycine max
  Intron number 1 from transcript Glyma09g11720.1 (locus Gly ma09g11720) derived from phytozome v7.0 (chr-ID Gm09; pos 11939049 to 11939662)
caagaatcacgacccaaccgtgcaaaccttttcaggtcttcattctaacagctgcttgcaattttagggtttcttttcactactctattagcttttcgaggctttctgtttgtaccttttgtatacgtcttatttcagactaataattgttgttcttagcatctatctcattatcatatttgaagttatgtcttgtttcttttctttttgatgtaatgattgtatagtattggtcaggtccagcccaacagaaagtgagacctaaaacaaaaattggaagagatttctactttaaaaaaagagtgatatgtgaggctttttagtcagcatgttgaccttttttattttttttttttactttaaaaaactaataacaaatgttggtaggcctaaagttcaagaaggtagctctaaagttcaagctttagttgttttagccttgcgctgactcgggtattgttttagttctaatataggtgcatgatcatggtttcacatggttaactacctgtttattctacgttgacctgcgatttttgttaattaattactagtactttattaatagatatgtaatgtgctatttttttacaattttaaatttaggtgtgtaa

SEQ ID NO: 24005 - DNA, 836 bp, Glycine max
  Intron number 3 from transcript Glyma09g11720.1 (locus Gly ma09g11720) derived from phytozome v7.0 (chr-ID Gm09; pos 11939983 to 11940818)
gagaaagaatatagagatcttcatcaccaggagctgtgagattccatttaacatttgatatatatttagtatatattgcatacagaacgttcaactatattgctatattcaacattttggaattatgtcaccaacaagtttcagtgaagtctttgttttgggtttaatgtacttgttttcctagtgctatttgtaatgagcataagtttaattttgtgtcaaagatcaaatatatttagttgtatcaaatgtagtacagagacactaaagtagactgcatactttaatatttttttttgctgctagtattaggtaacctaatgaatcatgctcttggaaaaatggatcatgatacaattattttttgctaagattttcagttgtgattgtatttatctaccaaatcataatgattgtccctataagttgtttcttgttgttgttgttgttcttattattattaactgttttgttcttcaatgtcttgttgtattacttaccaataacagtgttgttttagacttggagttctcacatttgttcataagcattgcaaaatatctgcaagatattgctttcccagttatgttaatttggaatgttacagttcctttggtgctatgcagtatattaatgtgtgaattttggtcagctatcagcctgatggtttgagtcatcttactaactgttaatagttctttctatgaatgacttgacttatacttaatctattttacttatttctcttaatctataagattgtgcggattctaagatatttgaaagttaactttctacttttagagatactttgaagaacttgaagcatcataagg

SEQ ID NO: 24006 - DNA, 885 bp, Glycine max
  Intron number 1 from transcript Glyma09g08550.3 (locus Gly ma09g08550) derived from phytozome v7.0 (chr-ID Gm09; pos 7850775 to 7851659 reverse strand)
ccccttccttttttgcgttcattctgttttcataggtattctttttacttcctctgttctttcctctgttttctgttctgttttttttttccctctgttcctttgttattagttactatcattctgttcatttctcgttcccttattactttgccacattagcttctgctctgcaacactaagatctagcacaatctctgtgttgcaaccattggatcagagtctgagacatgatcctgggtttctagttcttagttttgaattctagttcggttttggggtgctgtctttgttagtttttggctcattttcattggaattaccattctgcacttcatacttggtttctggaactgggaagaccgttctgaggttttgtgggaatgcccttttttaaattaaattgaattaaattataaacaaatgaaaacaaaataaagataagaatacaaaaaaataattttgattttgtctgccgactggccttgaactaagatcttctttgttggtttctcatttttatggttatgttttggatgcatgctgtttctggggtttaagaggtttttgatcctgcaatgatcaatttaaaaattttaaattgaagttcaagcatttgttagtgattgtagttcaaataaggtacatgatttgtgatcaatgtttatttttttggacctgtggttggtgagagggggtacttactggtaggccttggaatccaatactgtcttctagaaagattaaaaaaattccacattgttttggttttggtttttgacttttggtgactaagccttatcctttttatggtgacttgttgcatacagttctaatcagtttttcttaggcttcttttttctcttgttgcagtgacgaacttct

SEQ ID NO: 24007 - DNA, 458 bp, Glycine max
  Intron number 1 from transcript Glyma12g13820.1 (locus Gly ma12g13820) derived from phytozome v7.0 (chr-ID Gm12; pos 12469456 to 12469913)
tctgccaaggcaaacgtacaagagaaaccatttcataagaggtatgtcaacaaaactgatcacaataacaagaaaaagtacaaacataataacccatgtgttgctccttctaatcttaccatgtgttcctgcttctaatccttctttcaagaaaaaaaggagcctattttgtttttgggaagccatgacattttgatcctcagtgtaggtacagagttgtgacaaataacaatcctcttaagcctggggctaacctgattaaaggagatgacattattgctacagtcatttctcaagtgaatgttgtcacccatgtgaacaaattggtggtagactctagggctaccaggcacatttgtgctaataagagtatgttaacctcctatactgttgcagaggatggagaaggaaaaggaaaagttcttctcaagctcacatctaggaaacattggcattga

SEQ ID NO: 24008 - DNA, 746 bp, Glycine max
  Intron number 1 from transcript Glyma09g26810.1 (locus Gly ma09g26810) derived from phytozome v7.0 (chr-ID Gm09; pos 33441635 to 33442380)
caggtactaattttgacttgattacacttgataataacaatcgttctcattcagcagtgattaagattgtatatttttcatcgaataaaccatcaatttggtccatcaagtattattctctctcctaaattgttcatgaagtaataaaactatatgtattccctcaggtattattgcatatctatcaatttagtccctgagttgatatatcttattaaggtttaagaaccaatttgaagggtttttccatacttgagagactagctagtatgatttctaatatttgagggatcacttatataaattttttttactttaaaaactatttaggagaaaggatactatttcagtgtgaatttgaggggtttattacttttgtttttaaaatacagactaaatttagaaaagttgtatacaagcaaaagagagggggggggggggggttgggtttgcaggaagttttactatttttattttctgcttttgctaatgattacaaaaatatcacttgtaaaataggtgcgacttctgtaattatcattgaaaaattaagaatttttgcttttcataagatgaagcaccatcagtagtttagcaacatccatatggaaaagagtttcactcttcatgtttattgtgcaattcacttttagaccccatcaaatttagactttttccattgtctatgatgaaataatcatgcatttgcagagacattgtgattggttattcagagaaagtaaggg

SEQ ID NO: 24009 - DNA, 560 bp, Glycine max
  Intron number 1 from transcript Glyma11g09620.2 (locus Gly ma11g09620) derived from phytozome v7.0 (chr-ID Gm11; pos 6859210 to 6859769)
ttcttcctcgcttttctgcaaaatcatctaaatccgtgagtttcttctttctctttatccttttccaattacccgtaactgtccaatcgttcagtggaatatgttttctaccttcttgatctgcatatgaatttcttccttttttatttttgaagaaaaccattgatttttttcttcttcttaaatgtatgtaccaaaccaatatgttgtatttatgtgttacatttctgttgattcatagaccaaccaatgttgctttattatagtttataattcaatttaataatttcgagatgcttaggttagatgatatggtttctcctgaaatacatcacctatgtgttcgcaattgtttagtcaataatgaaaacaaaagttctgcttttgcttgcaagatcagctcggggattgtttaatatttatggcttggattggagaatgcccattatattgttatttgtaaagctatgcgtgattttttcctcgtggttgtgtaatcaatgtgttaattttttgaattagcaggtttctgatcctgaatcatcagtttttcccttgaa

SEQ ID NO: 24010 - DNA, 547 bp, Glycine max
  Intron number 2 from transcript Glyma11g09620.2 (locus Gly ma11g09620) derived from phytozome v7.0 (chr-ID Gm11; pos 6860031 to 6860577)
gttatcctggatcatctgctccacgtatgatttctcgaattttattcttcattattaaatctttaatcagcaacactaattattacaattccgttgtataactcttgaaactactttgggctaatggtttaactggaactttttgagatttgagatactggtgttggtgtcttctaaaccagtatataatacgtgtgatttacgttgcaaattccacatcacatgcggattgtttagcctttagctgaaaaaaaatcataattagtgagatttctaacttgaacctttggtaaatggtaactggtaattagatttgtgaatgcattatcccccctcatttttctcctcaattgttatcgtagtttaattttgtatttattttggctgtcatctattatgtttgaaacttgctatgtgtttatatgattgtattttattcaaactcagtttacttgtgcattgcctattggaaaggtttttctgctgactatatttatagtaacatggttgaaaggatctaacttaagtgatttgtcattaggatctc

SEQ ID NO: 24011 - DNA, 704 bp, Glycine max
  Intron number 2 from transcript Glyma12g11540.1 (locus Gly ma12g11540) derived from phytozome v7.0 (chr-ID Gm12; pos 9620310 to 9621013)
tttacttgtttccggtaattaatataatattgttaatctggctgctcattcctttgctttagtagagcaattttgtgaattggagatgaggcacaattccaatttggactacttcaactttaatttttctgtcaaatagtgcttcatagtatggataaagccagtctgctaaaagttaaggaattggcttgagaactctgaagtttcttcaacaagttcacaaattgtaaggaaaatagtagagttaatcaaccttacagatcatgtattttgataacaaagaatagatgacagagcttgaaattggtttttattttcagtttatgtttttcagcttcgatattcaaccgtagagtataggatgaatgattgattaatttctagtcattgtcatggtttgtttgcgtcttatacaaaaaattatagtaatgatttgtgttgatcactctactaaactttctgaacaataaatttaactggttataatattttaatttgttttactgatcttcctacactccaatacatattctagcgatcacagagtgttttgttcaatccatttgcaccttgcattttgcagttcttaaatgttgttcttgttataatttatataaccggatcggtttggaatagaaaatctttaatttccttttctgttttgtgcagaaataccacccgtctagggtgcttactcttgtata

SEQ ID NO: 24012 - DNA, 698 bp, Glycine max
  Intron number 1 from transcript Glyma12g34480.1 (locus Gly ma12g34480) derived from phytozome v7.0 (chr-ID Gm12; pos 37630047 to 37630744 reverse strand)
cttaccacaaaacctatcacagagtttctcaccaggtgcatgcccataatttcaaagacaaaaactctttcctttgttctttggttttgctctctcctctactagttacatgatctctgaacttcgcgtcatacataattgagtttttcattttatgagaaaaagttaataaaacttaattatatgttaagtaaaaattgatcaaaatgaagatggtctaaaattatgtaataattttccttctaatccttctctagaaaagatatttttttttcgaattttgcttccttaagatgttaaaataaaaaagtaagtaatctttatctttaataataaaaatcaagacaatctatttcaattggttgagttgattgaatattatatatgacttgtttatatatgacttattgtaaacttcttagatatatattttcattttctatagataaaaaaaccgttaataaaaaattaagagtatagtatacatagttaattttttttattcatcaatatttgatattacttattttatcctctaaaatgagctatgataaaaaggtcatgtacaagttttattttcggtatttttttttcttgagttggttatttcatttggtcatgctaactaaactagtggaatgttttattcatttattgaattttgtagctctggcacatcagggggtgagagaaagttg

SEQ ID NO: 24013 - DNA, 756 bp, Glycine max
  Intron number 1 from transcript Glyma12g36960.1 (locus Gly ma12g36960) derived from phytozome v7.0 (chr-ID Gm12; pos 39955804 to 39956559 reverse strand)
cccaaattcaacgaaacaacatcctcatatcagtaattccttaccccttttcactcaatttcacttttctgttttcattcacaatttttattcaattagagtttttcctcttccgattcagtttagtttaccgttattatcattgttttgggtcatgaatttttgcatttcgttcaaagtcacttatgtcaaagaattagtgcaaaatgaattgttgggtatatgagaagttgagaataatatatttttctagtgtttttgatgttggtgaataactgtatgtgtttatttcaatccacgagcatatctgagtttatttttttattgtttttatttttcaagatttgaattaggctcttgatacatatgaaatgtggttgatggcataaacttggaaaaagaactcagggtatatgtgaaatgtggttgattgcataaacatgaaaaatgaactgtatatgtttaagacttagtggaatataaatttttgggtgattgagaaatggagaataagaggtcctctagtttgagcaagtcaggaactgagtattttatgtcggagaataactgtttatgtttatttgaatccatgagcatctgaatttgattttttattttgtttttcaaaattgtattagggtcttgatgcatatgaattgttgttgattgcataatttgaaaaaagaactcaaggtgtatgtataatggagcttgatttgaatcaggagccatcggatccaactcacgcttctccag

SEQ ID NO: 24014 - DNA, 687 bp, Glycine max
  Intron number 1 from transcript Glyma10g05890.1 (locus Gly ma10g05890) derived from phytozome v7.0 (chr-ID Gm10; pos 4617107 to 4617793)
gcaaaaccgtctctcaggtctctctccttttttttttttccttcactctttcttattctgccttcgcaatactctttttttatttttattttattgctattatgtctccacatcgtgcttcgtggattttgtattcatttctagggtttctcaattgtattgaccactttaagcgatttataggtttatttcttgaaagtgtgttattcagttcctctggttagtttattgttatctaagtagctattttgtagaatcaatttcaatgaaggcatgacaggtacatttatttattaattttagtgtgtgatgcctctggttactgtttgtgaaattaggatgtgatcagttttaggccttgattgtttacagcttttttcaaaaacaggcttctgatatctaaattttgtttgtgtcgtgagtatatttgaaagtgtttgtctcttggccatgttttttgttttataaacgtttctttccttagaacttgaagaaactgatgagaaaacgtctctcagctgtttctgttttggaaacaattttcaaaacataatagattttggataagaaatttattgctgggcaatgtaaaaaatgtgaaaaaggaatcaaacatgcccttaatctcttgttggtcgggttgaatgatcaggtaactctggcacatctcaaggacaagccagtgcc

SEQ ID NO: 24015 - DNA, 424 bp, Glycine max
  Intron number 2 from transcript Glyma12g01880.1 (locus Gly ma12g01880) derived from phytozome v7.0 (chr-ID Gm12; pos 1142440 to 1142863 reverse strand)
ctctctatctggtcagtagtttaatgtttcctgctttgtattgaatgtgcactttcattagtgggattttgcgtgttaatggtagtggaacttggacttttgagtttggatgcattcttgagttgaatgttcttttcccccatcatttgtattaatgtggtattatggagaatttgattgttcattcacttgggtgtatctgtgtcttacgagtcaccattgatgattatcttttaattagggcaattacttgtctatggagagacagagatagagcaatatatgttactgccttacttgtcactttttactttagtgcaacagcaaaaaaaaaacattttaaattgctacatgttaatattttccgatactttttttaatttctataggctggagaaaagcgaaaagacgaagagacgataga

SEQ ID NO: 24016 - DNA, 488 bp, Glycine max
  Intron number 1 from transcript Glyma09g40000.1 (locus Gly ma09g40000) derived from phytozome v7.0 (chr-ID Gm09; pos 44968185 to 44968672)
ccaaaggcagattccccagaaaatcacttggccaggtttccatttttctctgttacgttttgttttctgagaatttttggcacgatccattgtgttgtagagctccaaaagtcatttttttcttcttttttgaggtgtttttatggaaattggaaggggtgcttcatcgaacagagggtgggtggggtcatggggtgctttgtttgacctgaattttgtgctgtagcactttaaaatccaattttgtcatttttgttttgttgtgtggaatgatttttgaggaaatttttgtgtacttcatttgggtctgttatcgaacagatggtatgtgtgtgtgtgatctgaattttgtgttttagctctccaaaatctgattttatgttttttgtttcttgtttggaggtagttgtttcggggggcttgttgtgaaatgaatctgcttctgaagtatttgctgatttggttgttgatgtaatttgtagcattat

SEQ ID NO: 24017 - DNA, 911 bp, Glycine max
  Intron number 1 from transcript Glyma10g31010.2 (locus Gly ma10g31010) derived from phytozome v7.0 (chr-ID Gm10; pos 39581238 to 39582148 reverse strand)
caagcgccccaaccctactcaacccgacacccaaggtcaattcttctttcccccccttaatcggttatttccagttatgttttcaagctattttgcaatttcaataaataccaccctagggttactcgaattcaaaccaattaataattaattctattaaactcctagtcgttgagtgtttcctttttgtttagctttctcgcgtgaaccctaaggtagataacataggttttccaattcgctatctcgttccttcgctttttgtgctgcaactctgaaaccaattgaggggggcgcgtttttattctacactgtttatgacatggactcatggaaagaatgtgcacatgcaagacggtgagaagaatggataacaatcattaacatactcattcaccatttaattgggctgcaaaattcagcttcaagacccttttttcttggaattctctgatttttcttttcacactgcgaacttcagtaattccagtctttaatatttagtgggataaaactttgttgttgtttcttttattaatgagaacttaagttgaattatgaaatgtatcctaatttaagagttccttatattgtttttatcaaaactaagaactctatttgagcttgccttggtttttagtatgaaaggtgtcctaatttaagtgttccaaaacaaacagaaatccaataagttgcaaattcaagcctctacctgtctttttggaatgaggtagacgtaagttcctctggtaagtgttttttggagcccagatgccttgggctggggcatcatcccctttccctaaatttagtttatttttctttacatttgcttttttctgaattctgaataatctattgtaatttcagctgcagcacctaagaaaagcttgaagttcaaaaccacaacg

SEQ ID NO: 24018 - DNA, 923 bp, Glycine max
  Intron number 1 from transcript Glyma10g08550.2 (locus Gly ma10g08550) derived from phytozome v7.0 (chr-ID Gm10; pos 7459036 to 7459958)
cccgggagaaggagaaggaagttgaaatcgtaagctcctcttctgtctgatccacaaatgtcaattttttgcatgctcatcactgtttcacttcttttttttttttttttttacaatttttaattttttttggaaatgtgtggaaaattggccttcaacgctggatcagtgcgtgtttgtacggaattgaagttgttttatttggtttctgtgttgattttgagtctgaattctcaatttcaataaaaaaattggtctgtgtctaaaaatggagttagtttatgattgtgaatgcactagggtttatggatcggatcagagtccgatgttttataactttgttgaaaattgggttactccagtgtgaattgttgtgatttgttgaaaattgggttactccactgtgaattgttgaaaattgggtttctgcagtgtgaattgttgaaaattgggtttctgcagtgtgaattggagaattgtacactggttcttgtcccttttattgtgaattggagcattgtactgtagttgactttgattttaaaagaaagattaactcgggtattttgttttttcaattctttattcttttatttatttaattaattgattttcagcctgacttgttggtatgcttcagtaaccccgtgccatcaaatttttaagtattcttagtgatgtgtatttttttatttatattatgttctgatcatgatataagcatctaattttatgttttacaaacctttaagtggttgaaaaaagtgagattggttataaaggcctgttcaggtcaccaagttctagtttcttttaccttttctgtagtatattaagcacattcaagtgaatttgttccacttatctttgtatctcttaactttttaggttgagtgatacaattaccgacagcagacgggcat

SEQ ID NO: 24019 - DNA, 753 bp, Glycine max
  Intron number 1 from transcript Glyma12g31750.1 (locus Gly ma12g31750) derived from phytozome v7.0 (chr-ID Gm12; pos 35309177 to 35309929)
gctctcgcacagttcctcaagatcttcacctcctggtgcgtccgtctcttaacgcgtttcctttccgtgaatttcagctcagatttcttccgtacaatcgttgttttcctcattcgttagatcaaatcactacgacaagaaaaacgcgcgtgtttgtttgtgtttttttaggatccagcacgatacttcctttttggacgcttctgttgcaaatattttgtgctttcgtccataattcgtgtttcgtgttatatattcggttaagaatttagtgagatttgattttagggcttgaaattaaagtacggtccggccttttgttttctgttctaaaaattagagaattgagaatgaatgatgaatctacggagatgattcattctgttatgcttatagacacgcttcagttttttagcatctacattgtctttctttgagtttgagcaatcaaatgtttggtttggtattataggaatttaacttttagtagaacagtagttatttaagctgtttgtttctctaacgggaaaatggaatgaatatcatatgaatatcatatttagatgtgtgcacgtgtttgctaacatcttgtcacgggtgtaagcaaatttttggaggtttgaatatacgatattgcgtttttttgtctctaaaactgaataatttcttatcgcagacctctatttgatcggaaatatgagcttaattttttccaaaacttttctcctagatattcaggtataaggaaaagag

SEQ ID NO: 24020 - DNA, 724 bp, Glycine max
  Intron number 2 from transcript Glyma10g26870.1 (locus Gly ma10g26870) derived from phytozome v7.0 (chr-ID Gm10; pos 35331587 to 35332310)
tcttcgagaagcgtttgattgagcgacacatctcggttaccctttttttcattttttttattcaatttactgagggaataagaaaaaaaagtgaggaaagagtataagtcaagttcggataagtgttttgattgaggaatgagaaatgggaaagaaatgacacattttaagttcttgaagtcaaattttgagcttgtttttcggattcatgactggaatttcagattccgtgtggttttagttattaacctaagtaatattttaaaccattttctttaaaaaatatttttttgaaaaaaaattattcttcccctttttgctcgtgcagaaaccggattttatgtttgtcatgtggttaggggatgtgaaagttaataagataggactgtgaaaggatggaatataatttgaaatttagatttttggagtagctctattattatatgacttctgctttggaagattttgaagccttgcatcttttattgattttttcctctgttgcttgtgctgtgttgtattgaaaaagaaggaaaatgaggctttttttaccttgttacttgtgaaatgtgtttgaagtagtttttattatgtgtctgtttttgctatacaatgggcattgcggaggtacttaatgtgtttgaagtggtttttattatttgtctgtatatacctatattattgcttatgacagtttctgttctcaaatttgctatgtaggatt

SEQ ID NO: 24021 - DNA, 938 bp, Glycine max
  Intron number 1 from transcript Glyma10g39210.1 (locus Gly ma10g39210) derived from phytozome v7.0 (chr-ID Gm10; pos 46939895 to 46940832)
tacaggtaaatttgcttattctttatctctatcccctttaatttatctatgataacaataacttgttgagttcttggttcttggttcttgagataggaatttgattggcatgttcaatttgagatgcgaattaatagcaaattgtgctcatttcttgtttaagacaacatgtatcttcaaaaaaccattttatccgagttgggtagaattattataagtaataattttttgcaatatttgtctcatcttattctgctctgagtaggattagttgatagaggatacctatggtaaaaaagaaaaggaagcaacttttactcatttgtttactgcaaagctgctttaatatctgatcatccaagggtacagctttcgtatattttttcaggaaattaaatatgacgtcataatgaataaggcttgccatatctggctaatttcatttttgtcttttttgtatctttgagttcttggtcttaattctcaatggttaataactattcccacccctcttcctaaaacagcaaagattgggaaattgtgaattgaaatattgttttgttttttttattgacaaatattaattattaattgttattttttttaaaaggaaattcaactcatgacttttccactttcgttcttccttaactgccaaactcatcttatatctacttgaaatattgtattgtaagctaataaaactctgttcgttttctgattttagtcaaacataaatggttgttttgttctactataaaatatgatatagtataaaaagaaactgtttatgaatcagagtgaaagtatgctatgcagatttgcatgtgttagattatatgactatatatccctgaaagagtggcaataagcccaaaaagatcttaaatctagttgcatggtgttgtgatgcaggggtgagagagcattttgcagca

SEQ ID NO: 24022 - DNA, 819 bp, Glycine max
  Intron number 2 from transcript Glyma10g42030.1 (locus Gly ma10g42030) derived from phytozome v7.0 (chr-ID Gm10; pos 49058063 to 49058881)
ccttttctgggagacctctttttcccccttcaccagtatcattcgagagctcttcaatggggttttctcttgcttatttttactacttacgttccttgagaaaatttccatgagttttgtctttgtgaaattttgatttttaactgtgtcgaatgatgtcatgtgattcgtgtagtccatctcaggtagtgggataaggctttgttgatgtagtaattttttttaaaacaaatgtgcaaagtgtaacacggtcttggagagatgctttgtgtggaatttttcttcttggtctaaataaatttcaaaatgtcaaaagtaattgtataaagtataaactgttttggttggcagtttgcttatgtatagttgctacgttatatttggtaatccatgaaattgttatatatctattgtaggggcaggaacactgaatatttctctaatgtattgatttttgaagatgcatttggaggaatggtgattcttctgtgaagggaaccattgcattttttatggtgtcaaacttcagtacctaagtttctttttcttatgttattatgtcagacatctttactgattatggacccctttcatatcttattattgtatatttcttctttattctcctatttctttccataattttgttttaaaagctagtattttatgaaatgcttgtcttttattcttctctatatgttctctcttaagttggaactatttgtttatgcctctcttttttttcttcacctatgccctttgataaggtatgcacgcgggattgcacaaatatgtccatgtaaatctgagagacagaag

SEQ ID NO: 24023 - DNA, 740 bp, Glycine max
  Intron number 1 from transcript Glyma08g45120.1 (locus Gly ma08g45120) derived from phytozome v7.0 (chr-ID Gm08; pos 44562782 to 44563521 reverse strand)
ttcgaaagccctagtacgttcttccttttcttcagcattcttttcggttcttgagtttatttccgattttaatgttttaggcttttcttttcttttaattcaaattgttatcgctgcgttttcttgcgcgtgaactagatataacttgctttgacgttttgagggatttgacatggaaaactactgagatgtgtgttcttgaatcaaaaccactcgcgcactgtgtcatttaatagttcaattttcaattacttgctggaaataattgtttgtttttctctgaaagaaattggttctctttaaaatgtaagtgttttccataaagaatgtgtttcttgatgaatgcattgatgtttttaggtttatagtgcagttatttggttcaagattccctaaatttcagggtttaggtgtatgcttttaccgagggaggatttgtgttttattatgctttgaattctgaagccttggaacttttaaatgtgaaaagtgatgcattagtaggcagagagagagagagagagagagagagagagagagaaagaagtataagagagaaggatggatggcaatatgcaatgtggtgtgacaaattagagagatgtaaataaataatgagtgttaattaaggcgtttgttctgatgtgtcaagaaaaaaaattactatttgtagaaattttagtttgacttgtgttttgggtttgtgctttacagcacaagacaagatttctgattttgaa

SEQ ID NO: 24024 - DNA, 771 bp, Glycine max
  Intron number 2 from transcript Glyma09g31980.1 (locus Gly ma09g31980) derived from phytozome v7.0 (chr-ID Gm09; pos 38568460 to 38569230 reverse strand)
taaaagggtcacctccagagctgcttctgttgaaggtaaactactaaatttgattccttttctgtacatggaacttggaaggtgcttaattctgctcattggcctcaaatgtgtgcgaaagttttggaatttgtttaaatttttgtgaactaggatgtgggaattataaatatcattgtggttatgggtttagagtatgataatggaactgttttataatgaatatttcactttccctgtttctgggttttggtgggtatgtatgtctctatgaatgtaaatacaatgcttgatcaaccttaagctcggcagaggttggttaacttgttatcagatcctatcaggattgatgtgataaaatgttttaaattgaattccaaaaaaattattttttgcaatgcttcatcagtttatattcacattcagcaattgcttagaatttagttgcttagaagattaagacatcaaatgatgtaaagatgtgcacttgtaagtcatgtcagacatatgatagattgtaagaatatacattcaagaagttgttcacagcctaatgaatcacgttttcggttaaacatgatggcagatgtatattagaaaagtttgaatattcctatgcataaaacctgtcataaaaagtaaacaacatgccataagttgtttagccaccataaactattaatggaatacttgtagttgattcatgccttaattttgttgattttcatgtatgcagttggggattcttcagtatcaactggaacggctgag

SEQ ID NO: 24025 - DNA, 607 bp, Glycine max
  Intron number 1 from transcript Glyma09g40230.1 (locus Gly ma09g40230) derived from phytozome v7.0 (chr-ID Gm09; pos 45183951 to 45184557)
tctgcactcctttgctagctaccctctcttttggggtatttctcttttcattctccaaaaactcttcaaatttccttcccttttctgtgccttattttctcttcactggtcaaaagatttctgggatttttgctaatttggtgcaaatctgattcccctttgacaaaccctcctcatctcttggcttattgacaactactataatttcaagttgctttttttttcccccttttttctagctggtaagaataatcaattttcaatcaatcatatatacttttttcatgtgcaaaaaagaaaacccatctcagggatttatgtttcttggattttagatccttatttttgggaagtcatgtaaagttactgctacttttgtttccttaaaatctgcatatatctgggctctgtgttaaatggttattattcttctgcttgttttcatgctttagtttcacttttccctcttcacatcctccatattgcaaggtttacacaacaattgttttggcttttaatggttgtcttttgatgtttgattctcatgtgatggagtcttctttatgtttcagcttttttgggccttcaaatcttgcttggagaaggc

SEQ ID NO: 24026 - DNA, 858 bp, Glycine max
  Intron number 1 from transcript Glyma09g02680.1 (locus Gly ma09g02680) derived from phytozome v7.0 (chr-ID Gm09; pos 1823124 to 1823981)
actgctttgttcaagtatgtaaaacttacttgcttattcatcctccctttctatctaatttaagtagttaattctttccactttagatgcctaaaaacccatagttcaaatttaaataaaccccttgtgaacaaaaacaaaattgtctccagctaagtggatccatcagtctcacaaataagctcatagccatgattacttagttaggtactctttcaatttaaaacatttattgaattatatttgagtttgattttcatgtattgttggcataaatttgtttatataattgaccaacaaaattttaggtatgacttttaacttagttattattaaattaataaatttattataccttattatttataattgaatatcagtgtaagaaattgtaatgcatgtaagcaaaggggttagagaaattctctaatacactctcagatttaaaggtttggtactcttatatattcagaatctttctttctctctcttggcgtgtcaaaactcattcaactattaggttaaaaaacagttgtagcaaaaaccttaaatttctccttataccatagcaactctctataaattaaattaaattaattatacaactaaataatgcatgagatcataaaggaagggaacaccttgttagtctcatctcaaagtaagcggtttggattttggaatgtcgaaaatttctagtggaaactaaacaaaagttcaagaaaagaaattgattcttaattacttcgtcagatgtagttgttgagaatgaacaagaaatatgaattgatttatgttgttgatgttaatttgtggcatgcagggctgtgacgcatcaattttgttgaacaacacagc

SEQ ID NO: 24027 - DNA, 618 bp, Glycine max
  Intron number 1 from transcript Glyma08g45010.1 (locus Gly ma08g45010) derived from phytozome v7.0 (chr-ID Gm08; pos 44461454 to 44462071 reverse strand)
caataaaaaacaagtctccactccaaaactcagaggtactcttttcatctttacttattttatcatctgaaacatttttttatcgacaaataaatattaattattaatttattaatttttgttaataagagaatttgaacttacaatatcttttctcttttattttctttttccaccatgaagtcaactttatcctcaatgcataacttattgactaattcttgcagtgtttgagttattagtattatttaaatttgtaaaaaaaaaagtaattgttaatatggtatctttatatatttttttatatataaattctcgttaccctcaatcactttatttccaaacaatagtaactgaacatgtttttcactggtaccgaagggctgtgtatgaaataaagaaaacaaattaattcttcttataagattttctaaaacagagttgaatgttttttaagttttcaaaaaattaaaagcatttactattttatttaatgctttttcataatatatcaacagtatctgtagaaagatttataaatatatataactactctggatttgaacatgtcccgaactcatatatagtgaaatacttgaaccttttgcagtttcggac

SEQ ID NO: 24028 - DNA, 561 bp, Glycine max
  Intron number 1 from transcript Glyma09g09940.1 (locus Gly ma09g09940) derived from phytozome v7.0 (chr-ID Gm09; pos 9972614 to 9973174)
gccaaagctgataaacagtctgttctgttcatcttctctctctaatttcccccctatatattattgtgcaatcaaaattttcttttgcctttttttttctcttcaattccatgccgctatctcacactcaaattgcactgtcgattttgctgcaactaggtttaattctttcgtcgtgtgggttttccatgttgatcgtagcgaaatgtataatatatggatggatctttaaataaataaaataaaattgataaagcatacaatttggttttagcttgatttgtcctgatgatgtgacttgggatcatactggtcatggatttggggttgatcaaagtaattgatggattacattactttgatgtcattttttcggtttttgtttttaagttttgtgagtgaataagcagtgtattttgcttcatattctcaatatgatttaactgtggttaagcccattgattcttgggcatattagttgtgttgtttctctttcaatttgccttatacttctttctcactgcagaacaagactcagtctcacgaggtggagtgcggatt

SEQ ID NO: 24029 - DNA, 1040 bp, Glycine max
  Intron number 2 from transcript Glyma09g37130.1 (locus Gly ma09g37130) derived from phytozome v7.0 (chr-ID Gm09; pos 42686946 to 42687985 reverse strand)
ggtttgtctgggtacttttttatacctttagaggttcctcttcttcagaatcatatctgatttactagtatttgtatacaacatcccccccccccccccaaaatttgtttcacatgaatatctattagtctacatggagtctaataatctgatgcacctgtgaaaattgagaagtttattcattgaaaatagtcctagttgagtataattgttgatttctgccctattggctatagtctaattcttttttgtaccatactaatgtctaaatagggtatcaaatcactaatggctagtttgtggagttacttaattcaaattttttagggaatgtcctagtgtttggcttacttaaaacacaacacattcagcaatactcttcgaaatttttaggagcagttaatgttgattagtttggttcaaactaaaaatttccactaatcttgaccattttcccaaaatcatgtttgttcaattttcaagacaccacgggcagtggtgatggtgatgcaggcagcattttaggttgtaagtgtggtggtgatgcagtggaggtatgagaatgatgggagtgcagtgcagtgattgtaggttggtgacaacattggtgttcacagtgtggaggtggaggtagttagtgttgagatgcagcctcaggagggtgatgacaatgagtagagcatgagaaggtttggaaaaaacagagagggggtaatgttgtgtgttacttgttaaaatcattcacgcattatgggaatttaagttctcttctcctccatgagaatggttttcattgatcttgtgggaatgttgcattcccagatatgaaaaatacttcagattgttttaataacactagtatctagcaaatgaatgttaaattctagaggtcaattattgatttgctttatttttgtaatgcctccttcaatcctctctctctctacctcaataacaataaccaaaggaaaaaaaaatgtaatttcaatgtgaatatttacataggaaactttcagaactcgttgaagccaagcctgtgt

SEQ ID NO: 24030 - DNA, 837 bp, Glycine max
  Intron number 3 from transcript Glyma11g17980.1 (locus Gly ma11g17980) derived from phytozome v7.0 (chr-ID Gm11; pos 14461204 to 14462040)
cacaccactttcacagtgttcttcaacatttctttgtaagtactgttaccttataagcactctgtttaccaattttcatgactaaattttcaggtactaaattataacgtgtgatacttctttttaagtgtttttccccttgttcatggaaatggaatattcaaagatagatatactgattgtactaggagttgattcttggggtgttgtttgatactactattaaatttctggatcttattctccactatgaaagggtttagctattttgatttatataagcaattctcagtaatattttaacatactttttttttgtgtgccatagatattggcttttggatttttctgcctacttcgattactgtgattcaatataccatctaggcattttgcttttttaaaaatgggtatccatttggtcaatgtaaatgcaaaatacttgtgtgttggtccaagtagaatacacctactttgtggacatgataaatgtagaatggtaatagacgaacttcttttcataaacagccatgaaaaaactttgcaaaagattatactgtggatcataatggcatcattagttgcacttgatgttggaaactaacctgtactgcctggaaaaaaaagcataggtaatatggttttgacttttgattaatgttacttcaaaatgcgatgactatgagtgttttttttttttgtgcacaatagtcacactgaggtttgaacctaggacctcatgtatgggtactaaaagtttgtcatgtctattataaatgacttttcttctgtgcaatggtgtcttcacttaggttcaccgctggattagctgcagct

SEQ ID NO: 24031 - DNA, 761 bp, Glycine max
  Intron number 2 from transcript Glyma10g41030.1 (locus Gly ma10g41030) derived from phytozome v7.0 (chr-ID Gm10; pos 48231729 to 48232489 reverse strand)
gcagaaagtgaagaaactccttcagagaattgaaggtgctccctttcttttcacctctcttgtttcccatatcctgtcttgtccttactattcactcactatgctaattcttgtctacattatcatctctaccttcccttgtttttcttgactataaaatgtacggaaaaaaggagaagattgtgttagtttttcttagatggaaatcgtaatcctagcatagtatgtagtacattttatcatataagaatcatactcaaattgagtagtgtagtagcattactaactcacaacaaagggtttcctttcatgagctatgggagttaaatgaaaacagaaaaacagaaacagttaagcctattcagtactgatttgctccttttttatgtagacatggcatgggtgttttgtttttaaatcaccaatgtgaagtcaggcttttagttttgatgtttggaacttgtagcagtttgaccttggtgtatgtacggtatagatattgttaagaacttgataaaatgtatagaagagtttgtcggataaagagtataccaacaaaaaatagctccaagtaatttgccatatggaggaaaatgtttgactgctatttaaagtgagaagcttatatttttaatgtttgtcccatgtaagatttttggggtctatcttttaatcttttattcttttaatttattgttgtgattggaattgaaattttggtcccttggtttgattcacaggtgtttaccaagttcaaatag

SEQ ID NO: 24032 - DNA, 880 bp, Glycine max
  Intron number 1 from transcript Glyma10g06770.1 (locus Gly ma10g06770) derived from phytozome v7.0 (chr-ID Gm10; pos 5488336 to 5489215)
gctaggcgacgtccacgccctccgtatcgctcttggttctctctctctctctctctctctccaattcactgtaataattgatcaaagacctgcctctgctataccctacctagtatctgtatctgttacttcttcaaatttcaatccaaaccctagcaaactggaaaattatgtttttctatatcttctgttagaaaattgattgatgatatttactagtaaggctgatataaatagtcctcaccctctggcaaattgctgtatgagtgtcttggataaaaattcttatgttttcacttctcattaagcttttataaaaagttctacattcatgattttggtcgcaacatcaaggattttagggttaatgcgatcgcaattgccagccgcattgaccgcatttgttccgcaatatcaacaattgagataaactgtgaccgtgactgcaatttaaaaccttgtttttcatggattttgaatctgatatggtcctctgtctgatacattagcagtaaattttttatttttttttctgaagattgatatatagtgtgtttggtttcacgtctctcagatgtggttttttactcttacttagaagatagtagttatagcttctaagttctatggtttttttagtgaatttgacataatttcttttattctcaatggatttccaaacacgtaatttgtagagagtgcttaaaatttattcaagtaactactatgatttgatttgttcggtaaataaaatcattcttgctagcgtactgggactgggtgtcctttttgttgatgcttacccttatgctatatacttcagataacttgactggtacccttatgctatatactgcagataacttgactggtagtattg

SEQ ID NO: 24033 - DNA, 690 bp, Glycine max
  Intron number 1 from transcript Glyma11g10840.1 (locus Gly ma11g10840) derived from phytozome v7.0 (chr-ID Gm11; pos 7733574 to 7734263 reverse strand)
gctcaggtgtgttgcatgcatacttataattgaattaactgtctttgccttaaccatggccacttttaattttgcttgaacctcagatatgtttattgatattcaataatatctatgaatgagttttgagttgagattttcttagttatctttgattttgcctatttcattttgtttattctttcttgtgtcctaatcaatttatgggtaacatacatagttacctatccatcataatatctccatccatataatatatcccttttgaagtttgggttttgaatgagatttttaagtaactttttgctgattttcaatgttaaaggagatttttgtttgtctctttctcttttctttttcttaataaaaaaacttggatttgtggtcctcttttatatcatctttttttcctttcttataaaataccttcttctcttaaaaataatgttcagactcttagtcattttacttctttacaactctctccccccacctcttttccgaagcatggtatatcattattttttagtaacgttttctgtatttctcattagcttaatttaatacaatgttgaagtgctaacagatgtgtctaaggcctgcaatggcagtgtctgaatctttcttttgactttacattcatttgtaagtattacctaacattttcatttgattaccaggttctcttta

SEQ ID NO: 24034 - DNA, 530 bp, Glycine max
  Intron number 1 from transcript Glyma10g32520.1 (locus Gly ma10g32520) derived from phytozome v7.0 (chr-ID Gm10; pos 40985040 to 40985569)
tttgcgaggttgaagtcgtcgtctttcgatatccggtggtgcatccctctcttcttcaattcgttttgtgtttgtgtctccatttgtttccttcttgaattactagaattcaccttcatatagttctaattttagtttattggttttttttttttgttaatttattaatttcatgcggaaaagcctacttcatttctcaatcgcggatccgtactcagactggttaatcaatgctagggtttagcttgtgaatctttgacttctctctggatgagtcggatagttattattattatgtgaaaaaagtgaacctgattcctttctgttacttctaaacatcagcaattttactctgaattgttcaaaagtaggctgctaatcaagtacatgtgctaagagtttgtattagctcatctatatcatataaggtgttgctccacccgacgtctgtttagtggtgcaatcattggttattttaatttccaagtgcatttatgaaaataattatggttgcagccctaactctttag

SEQ ID NO: 24035 - DNA, 876 bp, Glycine max
  Intron number 3 from transcript Glyma12g01810.2 (locus Gly ma12g01810) derived from phytozome v7.0 (chr-ID Gm12; pos 1113693 to 1114568)
tgcaaaatttcaagagattattgaagcttacagtaaaaaaattccatacttttgcttttttcttgtaagcacataatttaacaagctgcattcttctgtcttcctccaacttccttatcattagaattcctgaaaatggaatgttcttttctatcttcaacacaatcacaatatacaaatggttatagtaaaaggacaagtgttagtaagcacaaagattgtggtccttcattagtttggatatgaactttcaccttgttgtcaagctttctgcttctcagttctacttgttctgatacttcttaaatacttcatttcattagttatacacttctgtatccagatgccaacgtaactttgtaagcatgtgaacttgattgcactccttgtggtgacgggaaagtttagaagattgaacatgatgataacaaaattcaattccaaaaaaaaattgaggaaaacccaagtaatatataatatgttatatatacttaaatctgtataccattaacatacaataaatgataatgagtttttatatgtatgataaatcaactatcaactagttaaatttaggaaaatatacttacaggattgtcgacttgcctacttgagcattgctggcaaactcaaaattgattctgtaatggaaattactttaaactttataaataggtctgtaagtggtacttcttgtggattattttactccttagcaccacaaggtttgacctagagctgtgtttctcctgcatatggttatgatttagaaaacagttagctgctgcttgtaaatgattataatgattttcttgttgaccattgtctttctttgttatgtaacagtattaagtgatcctgccaagcgtttggact

SEQ ID NO: 24036 - DNA, 902 bp, Glycine max
  Intron number 2 from transcript Glyma12g31610.2 (locus Gly ma12g31610) derived from phytozome v7.0 (chr-ID Gm12; pos 35186026 to 35186927 reverse strand)
gaaatgtgagtctctctctcataacacttcatattcatactcctgagtttcagtatttcttttcatgttctggtggcaaaaataatcatctcctatggtgcttttaactgaggttctgtatcatcgttatttctacccacactacccaaaaagaaaagcaaaagagttttgttgcttgggtttcaacttaagagggaaaaaattaatgttttttttgtgcatttgcgagtgtcttactcaggacatttagtggagttcttttcattcttcaaatgttagagcatggttcaccttagtttagtagttttgttattgatcatttcaattctaatatgtgctcaacgaattttcctcttggaaactatataaactgaatttggtaaaatttaaaaccagacccactatagaatatagatataaggggggatatcgcatcccccaaacctgatggcaaactaatgttaatgttgttgcatgagagagttgttagaaagtctcacattgcctgcctcgtgcaatttaaatacctgttggacaatttcacttaatgccaaatggttttaagggggtatatcacattccctcaaacttgatgacaagtcattgttaatgccgtagcatatcagagagttgttgatgacaagtcattgtttaaatacctattgggcaaggtaacaccaattggtttaaagatgaaatctaacaagagccaccgaaggtggtgatgtttttagcttatgagagaggccactcaaggtttgctcttatcccaaataattttttcacttcttctagttccactcctgtataaaatactacacattacatattcaaaaattaactgtgtatttttaaacttttcaatggtgagaaggttggcaagtttcaccatcagagaaggc

SEQ ID NO: 24037 - DNA, 802 bp, Glycine max
  Intron number 2 from transcript Glyma11g10610.1 (locus Gly ma11g10610) derived from phytozome v7.0 (chr-ID Gm11; pos 7562174 to 7562975)
aagtagagaaagttgctgctactaggcgtgtaaaggtacgtactctttctcctcaactgtctatttctttagtgttacatattggcatgcaactatgaataaataaatataaattaagtatgatagtgtatagggtcacactgttaggttaggtgtctgtgtactgcccacgctgtctaattatccctccttttggaaaattaattaactttaatcaacctggttgttaaattgtacataattatcatgtgaatttcagataattatgcagctattaatttgatatcacacgtgggtatttttgggacaatacttagatgtagttccttgggtgcttttgatgtcgttcttcaattaaaatttgagtttcaccttggtaacctgcaaaacaaaggtataccaaactgaaaccttaattttgttatagtgattgaagagaacagctgccaaagcccattgtgaccaaaacctatccaaaggaacaagtcaacatgtacttgcttcgaagtagtttgttgatgctaaatatgtacatattagctatagtcgtacatagaggatgaaaattcttcaatctacgaacccaacatctatgtttctagaacagtctgtcataaaagattttcagtcaattgtttttgaattcagttgatacttagatgatataagaatatgaagttctccattttttctgctgtttcttttaatatgatgtcttcattcttagtgactatttgctaactgtttttttcctgcactctgaccagacttgccttagagaattgagagaaagagttgcaag

SEQ ID NO: 24038 - DNA, 1028 bp, Glycine max
  Intron number 1 from transcript Glyma10g37730.1 (locus Gly ma10g37730) derived from phytozome v7.0 (chr-ID Gm10; pos 45650905 to 45651932)
tgagttcacttcaaattcagagctgattaattgaagtaagtctccgccttttcgccattttagggtacccttttgctgatttcactcgatgatcaacaagttggttgatttactgtttcctttgctcaatcatttgctagtggatctttgttttcaggtgcttgtttttaacaatggattgatagtgcatcttgggatcctggaaattatggtggaattagagagagggaatgtgaaagtttgagtttttgttctttttttctctctgggtatgtgggggaatctgggtatggagacacacaaaaaaagttatcatcatggataggttagttttgattgagagcttggtgtcagttgttttgactatcttggtacaaattttgatggtcaaaataattccatttaattttatccttgattccccgttcttttggttagacttgtgagttataatatatgaattttgctctgaagttggaaaataaggatatttgagctgatgaaaagcatcgaatgatcctgcctctaaagttattcaagccttgcaagttttataatatacatttacatacaagacatttataagtaatgactaacgatgtcatgttgtattaatttatttatttccagtagtttggggttggtcttttaactacatggcttataatctttattgggatttgagtttggaaactgggtaccaagtattagctgatggaaaggagttgtttaatttttaattcttagtttatactttgtcatgtcagatcaggtgcttgggtttcttgtaagttagtagctgttgtataaactaagaatcatgaattgttagcttcttctatcatttttaactgtcttgtgatagacttactgattgagaattgatatgtatgcatgtattgaagaatttggatacaatatatacatttattatgacttaaaaagtatatgcatattttactgattggaagtacttgtttttctctcctgcaggttttttgcaataatagttcaataactgactcctg

SEQ ID NO: 24039 - DNA, 947 bp, Glycine max
  Intron number 1 from transcript Glyma08g43830.1 (locus Gly ma08g43830) derived from phytozome v7.0 (chr-ID Gm08; pos 43618835 to 43619781)
tctaatgttatttttgagaaagacagtaaactagtgccccaaaaacttgcaggaggcatcgatgatatttcagaagtgggctgtataataagtaattgcagagatattctatctcattatatatccaaacttttctataaattttgtaaagagacaagctaatagcattgttcatagtttagctagagcagcactcaatcaagctagtccttatatctattatcaagtagtactaatacgttaacttttcagctttgagctttcagctattaattaaattttcagttagtgttgtcaaacatagtccaagttgtattattggaataattcataatgacaagatttgagcttgtttctgtcaaaaaaaaaaaagatattggttactagaaaaaaaaaactatagggaattctttttcccatgtgaatcagatccgagacatccgaaacaatacttctttattattatttaaaaaagttaccccacttctattggtaaacaggttatgctttttaatgtcaataaatgtgaagcagaatcattaactattcctgaaaaataggaacaaacctgatcaagacttcagctaactaggactcaattaagaagggtaaaggccaaagcaaattgtatattgtagtgagaaagaagaaataggtagcaagaatcagacaaaaatgttgactaactcaccgtttcagatattttcttaatcacattccgatctcaccctttttccttggaaaatgtagcttccattttctctcattttcttgatgtctccttcatactcaccctccactttttatccagtcttgctctacgtaaccatgtttccctctcttccatgtttttttttcattctttgacagtaacttcatttttattcttatataagtagaattcttttttaggttccacaacaaactcaaatacgttgttgttattc

SEQ ID NO: 24040 - DNA, 993 bp, Glycine max
  Intron number 1 from transcript Glyma12g31030.1 (locus Gly ma12g31030) derived from phytozome v7.0 (chr-ID Gm12; pos 34654315 to 34655307)
ctcttattgctaatacacgtaaagcaaagtcaccaagactatattaaggatctagagtagttgctaatatatatttcttttgactctatatatatatatagctggtagcagtgttgctgtatgttcttaatattcccaggttgtggcaggaataatgttcttattaatattcccatgcttggatctgattcggatcttctttcttgatctggttagtcaaacaatttatatgtacacttgctaatcataattgtataatgagttttttatgcaccgattgtaatctttaccgacaaattattgtaaaccttttttcgaagtgaaaagatatatctcatcaaactaattaggtacaacttttcctaacatatttatataatatgaatcaatcaagagttaactattgtttcttattattcttagcttctttgacatacacatctttatttagtccgtgcctgggagctgtccatgagctatctatgcaaaaactataagcaggtcccgcttctcttttccaattccaaaggtccctactatctatggaggaaaaaaacctagttcatgattttagagattgttgtgagttgtgacttattcctcctggaataaattcaaattcattcccctcttaagaatctaatttctagagtggtatacgacgtcttcatttagcgacaatgaaattcaaatcccctctttttgcaaacctgtatattctgccaaacattcagtgtttgggaataatgataaatcctccattctttatatatttttcgtacagttatttctatcacgttttagttgattaaaaaacttttgccctaaaaataactatggttgcaatttatccttaaaaaacaagtaaattatcaatttcactttagtcccgaaaggtaaaaagcaaaaaaaaaaatttctaaattaacaattcatcttttacgttaatctcttaatgaatgtctattagttgatattaacacgatattttaa

SEQ ID NO: 24041 - DNA, 735 bp, Glycine max
  Intron number 3 from transcript Glyma12g07860.2 (locus Gly ma12g07860) derived from phytozome v7.0 (chr-ID Gm12; pos 5508859 to 5509593)
aatgttattgatgttactgatagcaacagtccacaggctgaaagcagagacttgaacactccaaatgggttttctggtttttcacaatcaaaagcaaactgttgccccaaagagcatccatcccttgaactaactctgaaaaggctgggagaagtaggagatgctaaaaatgtcactggtgaagaatgcaatgtcttgagacattcagatcagtcagcattctcaaagtaagaggaaatttgccagcacaaataccttattttggaagcaaatattgttgcactacattgataacgtttaatttttttctttattctgcagatataatactgtttctgctaaccaggtgatgctcttcagtcctttgacggcaagaactttatttattgtgtaaaaattaagatttttgtgttgcataatttgcaattttgcatttacatttttcatcccaaattccacttatctcattgtctattccccaccgttaatcatctctcaatgaatataagatttcttccaagccaacaaggggtaatgggattaattgaatcatcaaaaaatttctaatacacaatatgaagaaatgatatcaatatgctgtgtgttatagttatttctccgcaatttgcaaggaaattctgggtaccattagctggagaatagtgtttatcaccaaatcttaatctttgggcaatccttatgttttctttactttttatcaggctcaaactggaa

SEQ ID NO: 24042 - DNA, 881 bp, Glycine max
  Intron number 1 from transcript Glyma11g26980.1 (locus Gly ma11g26980) derived from phytozome v7.0 (chr-ID Gm11; pos 26555593 to 26556473)
tgatattaacttggctgttgttagagacgttctttgtgagtatcatttggcggatttttgtttttcgtttattgtagttttaatttggataaaaataaaattccattcgaacaggattgactccagtggaggatgttctagaccaaaaacagataaaatttcattcgtacttcttttggtgttgttctttaatcagaattggagtttgcctcggtgttgacattctacctctctaggtggacaaaacttagataaaattccattggtgcatttggtgttgtttttaatcagaattggagtttcacctcggtgttgatttgcatttcatggaatcctttgttatgcggattattgaggtaaaactccaattccgattggagaataacatcctatagaacttgatcaggaagatgcagaatttgtggctgtagaaacatgaatgactagatgttgtacttttgaaagaaaaaaaacaaaaaaagagttatgatttcaattttgtaatcattgccagttttttaaaacttgtttaggattcaaccgcttgatgtgcttctaaaaggagaattagatagtcttttgagattacataggattagagatttattctcttccttaaagtgatttgatgttactttttagacttttggtctttgcttgtgccttaaagcaggcaagaatttgtccttgcattctttgcttaaagcaaagccagaatttgtccttgcatactttgcttaaaccaagcaaacaagcttattaaggacattgtgtatatgaggttgttagttatgaaattttgttttggagattagcttcttttggtttattatttattgattgaccttgggatttgtctttgcatgcaggtcagtgtggaa

SEQ ID NO: 24043 - DNA, 781 bp, Glycine max
  Intron number 1 from transcript Glyma10g40340.1 (locus Gly ma10g40340) derived from phytozome v7.0 (chr-ID Gm10; pos 47780181 to 47780961)
tgctcttcccactatcgttttgctcgatcgaggaagtaagattcccttaccttgattttttacatgtctgatttgaaggtttcaggttctgctgctggtctgattttagggtgtattttttgtttctgtggttttgctttgcttgagaagtgtttttggttcatcggttgaatgttttgctagttggtttgagctgaagttgttctctttttgtcggcttaggtgcactgccttgatttttggttcatggggttttgctattgcttgttcttgtcttcttggaaagaataattgttgccccattagtttttttgaatgaattgatagataaagacgggtcttaggttttatttcggatgtgtttggattcatgtttgatcgtgcacaattacttaaaaaagagcaactaacgtgattttaggtaaatgttcatgcatttggttctgtgtcatggaattgattctcggtctagaattggttgagttgaaacaactctaggtagcattatactgagttttatggctaacctgcttgcaaaataaaaacattcaaacattaatcacttcaccttaaaatcaattttaaccaaaattaatcatttcaaaattaattttatgaacattcatccaaacatacacaattaccaatgagttcaaatttgtgatttgcttttacacaagtgtcatgctgtaagtatgaccaagtcttgatatgttgcttgggtgcattctaagtggtttttatgtgttccttttgcagattgcttctttgctttgaaggt

SEQ ID NO: 24044 - DNA, 732 bp, Glycine max
  Intron number 2 from transcript Glyma08g47810.1 (locus Gly ma08g47810) derived from phytozome v7.0 (chr-ID Gm08; pos 46607511 to 46608242 reverse strand)
aaggaatatttgcattggtgagtaccttcgtctcttgcctctattatcatattgaattttgagaataagccggtatatatatatatatatatacttaattaaagcgtaacaacgtagtatataagcttacttatcttatacctaaaatttaatagttttgaatctctttttcttttcttgttactgtcattttttaacaattcgttaccatatgtagtatatatgtttaaataaataccttaattaagtatatattcataaaatcctcattatgcaattgaaaaaataccttaattaattcactagaaaactattaaaataaataaaaatagtttataaaatgcataacttaaatcatctttgtgtataaacgcaaattagttttataaaaactcttccatacagtcccttaatttacttacgaagtacaattgagtagctgatagaagaacgttagcacacataacttgtaaatatttctccccacacacagctctactcctttaattaattaatttactaaatttaaaataaataattagtaagagacactaaaaaaacacgatcaagttaatgtggttgtctcaatgtgacacccgaagaaaattgtagagattttgtttttagaagaaaattgtagagattatagattatagagttgtgtatttataacatttgttcttcacttgatgcctaggttggtaaccaatattccagcatctacaggggcaa

SEQ ID NO: 24045 - DNA, 554 bp, Glycine max
  Intron number 3 from transcript Glyma09g40440.1 (locus Gly ma09g40440) derived from phytozome v7.0 (chr-ID Gm09; pos 45357924 to 45358477)
cgatattatatcatttgctgctcctccgcagcgtatggtaatttgaattccttacaagggcttaatatttcaatttttcttttattcctattccaccttttttcaccgtagttgcagttttgttttactggtcaatactttggttctgattactattcccctttatctgtttttttttttaatttcctttaactgtgaaaagtgtaacattaaattattttgttgtaaattggctttgggaaagttaatattattcaaattactatctatcctttcttatttatgatttcactgttatttgtaaaaataaataaaataaaacattgtcctatataaaagattttttttattgtactaagacttctgctacttttcctttcgcttcttaacatttattttgaagttggacaattactgtaattatttttaatgaaattgaagaattgctgcttttgagtatctgttgccttctgtgttttgttccatttctaactattataattccgtcttatcttgcagatctggcatttgcttttgtatttcgagaggcgctt

SEQ ID NO: 24046 - DNA, 233 bp, Glycine max
  Intron number 1 from transcript Glyma10g34280.1 (locus Gly ma10g34280) derived from phytozome v7.0 (chr-ID Gm10; pos 42439619 to 42439851 reverse strand)
aacattcctcaatacagcgttgtgttctacaattcgtaagttttctctataagcatgtgtctttcattctatgtttttcttctggaaattttttgtgtttgaaaaaagatatatatatatatatatatatatatatatatatatatatatatatattttgttaatgtgagtggttttggtttgattaaaaataaataggatactggagaaagcacctgcagcaaaggacttgt

SEQ ID NO: 24047 - DNA, 646 bp, Glycine max
  Intron number 3 from transcript Glyma11g18390.1 (locus Gly ma11g18390) derived from phytozome v7.0 (chr-ID Gm11; pos 15064304 to 15064949)
gctattggtgagacacgagactttcatagtttcattaattaattcatcatgaaccccacttgatacttgtttttattttcttgccttagcaactgcaactgcattttgcctcaaatattggtttgggctatcaagcactaatacctctctctgttttaagcatcaagttgacacatttatacaattcagacacttgagtcgatgcttttcttatgaatggaataatgcagtagtattattaagaaaatatttattttttaatttttagaaaagtcagctaaaaatatgatataaaatgtaaaaaaataatgtttctcgcctgttttaatgtgaggtttgttatcttgagaaaaaagaaagttttcttaagaaggtgaatatacatttttggtgaagtgatcaagtttttgttgttattataatgtgtcttggtattcttatctaaggttcattaccataagaaagaaaaaggtgaatacaagaagaacatgcaaatattgattatcaatttagattaattgttatgtttatcttatttgatttcattagtctctttacatgtctatgtgcaatgttcagatgtcctatattttagacattgatcatgttagagtgtcgagtcgagtctgatatctgtgtcaaagta

SEQ ID NO: 24048 - DNA, 531 bp, Glycine max
  Intron number 3 from transcript Glyma11g14180.1 (locus Gly ma11g14180) derived from phytozome v7.0 (chr-ID Gm11; pos 10177278 to 10177808 reverse strand)
tggtacgcaagaccgattcagctacttttgtccaatattttattcactttccctttattaggcaataacattttctgttatttgcacaccaagaatttttagctgacaaggccttgtttggataaacttttgaattagcacttctaagcaaagaaaataaaaagataaaatgaatcaagtttcgcctgtaagttaaaattagtttacgcataagttaaaataagtttttaaataaactaaatttgagagcttctatagattagctatttagtttatgtataaggctataagctaattttaacttatgagagaacttagttcattttatctacttattttcttcattagtaaatgcttaatgagaagcttatccaaacatgaccaaatgtattaggtcactgctgccacttttttattttattggccaacgttagttgctagtttgttagtttttgtcattgatgccacttatataacttactcatctgcatatcaggtttcttacctcattgaagagtatagtagtggccg

SEQ ID NO: 24049 - DNA, 926 bp, Glycine max
  Intron number 3 from transcript Glyma09g12430.1 (locus Gly ma09g12430) derived from phytozome v7.0 (chr-ID Gm09; pos 13191418 to 13192343 reverse strand)
ccattgaaggtaaatataatattcacttttattttatgtttcagattagaactttttactttgctcctataggattcatgttattgttatggcttatgaatataggtatcatcagattttatagtaaatattaaaatttgagaatatagggtgctgataaatttcattctagggacatcggacttgttccgatgtggggcaccggcgtctgcttttgcttccctgttgttttttttttaatggcagtggttttgtgaagttttgaagtgtcattttggtatatttgttgtttattaggtgaagtgtgttgatagtaatagaattacttcatagctaagttaggtggctgaatcctgagcatagaaagctgaattgttaacctagccctgatttgtttttggaatgtgtaaaacttgatgatgcatttattttgatgtccagtgtcctaagttgctgggaaagtaattcattggacggggcttggtgtttaaatgatatgtctattaattcttaaattatggtgtgagactgtgaggagaaatattcattaatatatttttttttttgataagttggagtttataatgttttatattgcatggatgctggaacaaacatgttgaggagaggtgagattgatgtgaagaccaaagtttataatgtgattgatgttgtgttatgagaactaaaaattgtctatgcatatgaacatacacagttgtgaacttgtgatgtgtcttttaagtatctatatggtgattgatgtcttgttgctcatatcataaacttgtaaccttcaccttcactattccatttgggctacattttcttctgtctatttggtgacttctgtttctaaatcatggtcctgttttttttccccccatacaggaacctatattgacaagaagtgccccttcactggc

SEQ ID NO: 24050 - DNA, 895 bp, Glycine max
  Intron number 2 from transcript Glyma09g42190.1 (locus Gly ma09g42190) derived from phytozome v7.0 (chr-ID Gm09; pos 46823008 to 46823902 reverse strand)
ttcttaggaagtgtcgtttgaattctgtggatcaggtgggctgattgatgtgcctttgacatttagtctggattctatgcaaattatgaaatgttactttaaggttttatttgcttgtttttagtagttgattaaattagaactggaactgttaagtgtgccggatgtgttatgaattgagaactatgatgcactcatcagtagggaaggatggtcaaaagaaacaaatgaagaacaaaaggaatctagggatatatggatttggggatagtggcctgaatgtaaaaaaccagaaaatttgtggaacttttttacttgaacagttgaacctgaagctgcattgcattctgctccagctataaggatcaaaatagaagatagaggactgccatcttcctagtgtaaaacatggagcaaatgtagatatgttgtgcaatatcatttgatgcaattatactttagttagctcatgttcattttgcctccctttggtttcagctcatggtctgtcattgttcacctcatccattataaatgctctttaatgtaatgagattatatgctgattgtagacaatgatctaagcttacttacccttgatagtttggtgtcacagtgaaatagttttgacaggaaagtgccatagccatttgtctctgaataattggtggcatgaaacagtgttttgttgaggtttattttttttatttatattttgcttttattgcaaatgctggttttaggccatcttgacttatatatatactgtggctgtattaactcatgactattgtagactatatactcctcatttgccatgaaaatctttctaaactgaatgttgtttggtatgagattagaacaaataatactgaactgtgataatctttaacag

SEQ ID NO: 24051 - DNA, 778 bp, Glycine max
  Intron number 1 from transcript Glyma11g01400.1 (locus Gly ma11g01400) derived from phytozome v7.0 (chr-ID Gm11; pos 828489 to 829266)
tgatttcctttggcccaaactgcaggaacaaccaggtttcttctgcctcttctctctctctctttttttttattttttagaggttgctaatatatatactgacacatgatttctgatgccacatgaaagctcgctcaagcgcttatgatttattttcattgcgaattgaagacttcttctgtagatagtgtcctatgaagcacccgatacttgtttttgtttagtgtatccaaattaaaacacaaatggagactattttctttatggatcacgttgaagaaggaattgatactattcctatttctagaaatagggagtgatttatgatggtaatgatttgaaatttttattttgtttttagtaatgtccaaagttcatgttatcaatttgaatttgcagaattttaattatatactatgtatattctatgaatttttatacatatctagatatgtatcctactttcatatttttagaagagtcatatcgtcatattgaatacgtattgtatgatgatgtgtttctttttccgttttgggtttttcatttgtaacaattaacaaaacatgcttgaggtggagcatcaagttgtatcatcaaataatgctgacattaaatgtgatatgcaattggtagttctttgtatgcgtttgaaattttctgttgctgcttctgtcattacgtgacagggctggtctactcgtgagttttcttattaacaaaatttatcatcttccatatgtcctatgttaacaaaatttaacatgcaggtactgtg

SEQ ID NO: 24052 - DNA, 381 bp, Glycine max
  Intron number 1 from transcript Glyma10g02820.1 (locus Gly ma10g02820) derived from phytozome v7.0 (chr-ID Gm10; pos 2013535 to 2013915 reverse strand)
tttcaacaggttctcttcttttctctcttacacttcgatattttgtatgtttctacgcgctttgattgctactgttactgttctaccctctttttttgttatttacgttcaaatattttatcacaatacgacgtcgccgttggtccccatgtttgtttcattcattggagacctcttggactgcaaggtcattttccggaaactaaacttaacccccctctttttttttctcctttttgataaaacgattaaagttgtaatttttattttctttaagaaataaggtcaaaaccctcatgattacttctattttcaagttgtaatatttggtggcgattttggatgggttgttttttgttggcggggagaagggttttttgg

SEQ ID NO: 24053 - DNA, 727 bp, Glycine max; identical to SEQ ID NO: 17283
  Intron number 1 from transcript Glyma12g31850.1 (locus Gly ma12g31850) derived from phytozome v7.0 (chr-ID Gm12; pos 35407532 to 35408258)

SEQ ID NO: 24054 - DNA, 523 bp, Glycine max
  Intron number 1 from transcript Glyma09g37470.1 (locus Gly ma09g37470) derived from phytozome v7.0 (chr-ID Gm09; pos 43036839 to 43037361 reverse strand)
agatagaagagaagagagtaacaaaggtatactccttgcccttcccatttaattctttccatgtgcatcccatactgtttctgaataattttctctaccttatattcatgaatatatctttaattaacaagatatagacagctttctaactttaattgaatacttttttcagcgtgatatatcttaggatttctttacatcacatcaatcaatcaataaaatttttatttacagaatttgatgaaaatatagaaatatttctgttcatgtaatgcaaatattaaatagaccaagcaataattgaattgtatgaacaaaccacactgtagtttggcatgaagaatatggaagagtgaaaaataaaacaaaaacttttcctataatttaaacttattcgttgtctttgaaagataattttcttgtgctagagtcagtgagtaaaaatttcaggaatcaaatagctgattattgttattactgttttgaaatctaggaagaaaaaatcaaatctgctaaaactgag

SEQ ID NO: 24055 - DNA, 726 bp, Glycine max
  Intron number 2 from transcript Glyma10g34820.1 (locus Gly ma10g34820) derived from phytozome v7.0 (chr-ID Gm10; pos 42996851 to 42997576)
cctgattaccatatccacggctatatttccctttggtatgctcgttgacatcaaatgcatataagaacttgtaaaaatttaccacctcagtatctctgactaaaatcacagcaaaacctttaaatttcgttgttaatactccttttattttattcttctgtgctttcaatttccttttgtagtttgttcataaaattgataccaaattgaactgaagatgcatttattacagatcatctgatatgctttgctgaagtttcttctgccaaaatactgaattatttcttattgtattcttctagacttcatgtagtctactaagcactaacagcttaatgttgatttggtcacaaatgatgagtacagtgtcaccttcacaaattgaaaaaatgcataaaaatttgtgaagtcaacattttgctcaatctaatgtgttgataatgttaagttgtccataacaacattatttacttaaaattagcattttagtaataccagaaaaattcaaaaaataaattgaaaggaaaagtgaatgccattttcatccttttaattaatctcaacgatgaaaaaataaatgatccatgtcagttttcaaacagatagaaacttgtgatgatgactttctctaattccatgtcagtttgtttactcatggatttttttttttctcttttcactgtattcttgttgcagttttacttgtctggcatcagtctgaggaat

SEQ ID NO: 24056 - DNA, 411 bp, Glycine max
  Intron number 1 from transcript Glyma12g08990.1 (locus Gly ma12g08990) derived from phytozome v7.0 (chr-ID Gm12; pos 6789695 to 6790105)
aaaaagaggtcagaaatcagaaagattccctacttttgtcttttgtttgttttttctttcagacatttttaacccaaatctaaattttaagatggcatcataatccagtcaatacttttggtcctgtcagactatccattgtcggtaggatatagtaaatgtctggttctgtaaatttcacgcttcagtttatgttaaagatccaacattgattagtgatataacctgaataatgtgtataggtacggacaattcttgaatttgagtaaggcttaaactgttacaatgttgtgtctttctggatttatgcaagctttagaattggtgcttatgttataatgtatttatttgaagatggttaattttctgggttcaggtgtacaaggtgtcgattggagcagcttgcaatct

SEQ ID NO: 24057 - DNA, 816 bp, Glycine max
  Intron number 1 from transcript Glyma11g06330.1 (locus Gly ma11g06330) derived from phytozome v7.0 (chr-ID Gm11; pos 4499247 to 4500062)
ccccttcttcttcctcccttccccttctctggtatgtttttttctaatctttgtttggtagatcttttgttggtttgtttttaattagatcttcagttattggtttatcttatttttgttcttcgtcatctcatttctcgtgcattctaactgttcttcttccttcccgtgttttattgttactagatgaacaataattttttgttaataaaaaccatgcaaatctataaaattatttcccaagaattgaatctttattgttacatctggaaagattaaattttcagtttaagatttgttccaaaatccaacattaaagatgttatattaaaaaaatcaaaattacataatttaaacatacgagaacttaaatcgagctattaaaaattgaaaatcaaaaccgtccaaacattttgctattaaaataaaaagtattattaagtcttttaaatattttcatatactttaataattttacgtatattaaaaatatacattggtgcgtttttattgttcatcccttatagtattttgttactggaagttggttgttttcccctgcttttgatgagtaaccttcttgctggatcaatttagcattgatacggctccggttagccggccacagacgcaacagatcattcactcattaattcttctgccactaattaacaaggcttttttaataaaagttagttaatagtagagtatatataataagaatgtaattaaaaatgtggtacttctaaacttggtcgtgtttgtttttgtctatatataggataaggaaagacggagcaaagcgtaagaaaggca

SEQ ID NO: 24058 - DNA, 444 bp, Glycine max
  Intron number 1 from transcript Glyma09g34000.2 (locus Gly ma09g34000) derived from phytozome v7.0 (chr-ID Gm09; pos 40444798 to 40445241)
ccaggttagttttgataaaagtttaatatattgtgtttctgtggtaggattttcttctgtaaaaatttgaccatttttccatccaatattactgtagttctgtcttttaacggttttttttgcccttgttctgtacttgtgttatttttaactgctgtaataatctttaataaatttttgctgcataccttttacgtcgagggtggagtgatgagcatattttcttgttattcttaattgttttctacttattattactgccattgtttgttgtctttttactagaaagtacagtttttttttttttgttttttacttgtcctgatattatttttttttgcccaatttattatgttactatttgttatatatattctagatttttctgttgacatgcttagagaaggattcaattttgccatatgtacagtgtgcgttattgtg

SEQ ID NO: 24059 - DNA, 522 bp, Glycine max
  Intron number 2 from transcript Glyma11g19570.1 (locus Gly ma11g19570) derived from phytozome v7.0 (chr-ID Gm11; pos 16336209 to 16336730)
gtagagtaagttagctagggtgttaaatatagagttcaacggtgatgcactcacagctacaaatacaaatcagataagacttataagataatttaaacaaacttatcgggaacggtaattttttattggatgattgtataaaaggcataatcatttttctcttaattatattggtgttgaaactttacatgacctaggattttagtttaggaaaaaacttacatgcagttctacaagtacttttagtactattttccaattagaattggagtttcatcttgtaatctatgttaatttttaatagaaattttaattacgcatattactaaggtaaaactttaattttgatttgaagataacaccaaaagcacttattgaactgcgtattagtttagtcctttagtttaagttgtgagtgtgaatggtgaatccaatcactcattaattcattaatcaatacatattaatacaagcactttcttttctgtagacctttgtgctggttagagcatctctccttgc

SEQ ID NO: 24060 - DNA, 425 bp, Glycine max
  Intron number 3 from transcript Glyma12g30590.2 (locus Gly ma12g30590) derived from phytozome v7.0 (chr-ID Gm12; pos 34227681 to 34228105)
cacttgaagagaattagcaggtattgttttttcttcggtgtttaatacttgcaatattgattgcgtgtgatcgggtgagtgtttgctaaattaattttgaactaaatggttttgaagcttacaattttttttttttttaagtgagtgatttatgcttgaatgtttttattctaaaagctacttaccagtaaagctcaatatagaaatccaatgcgaaaagcaatgaagttacttgaactcaaaatcaattctggaagactggaatcaaagatgtgaacatttatttataatcatgttagctagtatgtcaatgtgattctggatcatatattgtgcatccaaatatgcttcaaaacttaaagcttaaatttatttgatctatgatatgtacagggaattgaggcgtcagttgtttgggaagtccc

SEQ ID NO: 24061 - DNA, 573 bp, Glycine max
  Intron number 2 from transcript Glyma10g44210.1 (locus Gly ma10g44210) derived from phytozome v7.0 (chr-ID Gm10; pos 50684171 to 50684743)
accgcagagtctatcaccatcgtcctgctcctccggtaataattcatttatttcactgcaatttcttcttatgtggttttcctgcttcaatcacttttattttaaacctgttgtcttttataagccgttattaacaaattaaacatgtctagttctgcaatttcatttctttgatttatgatgtttttcaacgatatgtgatcaaggtgatggaaaaaaatatagggcgggaatgtcgcaagtcttttctatcagcttatctcgggcatggagttttcatgcattgcgcgtaatcaatgaccgttatgatctgattctctgaaattcacgccattagcatccggatttatttgtcactaatcgttaatttttatgaagtaataattgtgttctaaatcaaatagctggcaatgagctcgtatttattactttttaatttaatgctgaaagtggacctatattccggatatatgttaaaaacataccagtttgaagagtttctaaattatattgtttttcacgaataacatcacattttggatatttatgcttcttgtgatgatttgtaggcac

SEQ ID NO: 24062 - DNA, 580 bp, Glycine max
  Intron number 3 from transcript Glyma10g01760.1 (locus Gly ma10g01760) derived from phytozome v7.0 (chr-ID Gm10; pos 1286428 to 1287007 reverse strand)
ttgcagttgaaaagcgcatcacatcgccgctcctggtccgttttttaactttttaattatgttactgatttactgtaaaaaaaagttatgttaccgatctttttataatctcactctgacatttctacacgtgaatgtgctactaattattaactattaactataatcatcagtatgatggaatcaagtaagacacttgagcaaaatattgattgcaaacacttgacacggatgagcttcccataaattgatttttggggtcaagctgttggattttggacacacttttgaattttgatcgtcgttgttcattttagatacaatgtgttctatgcatatattcatgaaaaataatgctgtttaccgtgatgttattttatacatgtattcttcatttttgtttttgggtgaaaagagatcctttttttgtttttcttttttttggggggtggggtgggggttgtaaaggcttagataatttattgttaggttctcttctctgcatacaataatcattacttatattatatccgcttgcatgaaacttccatttcaggagcctagtagtgttgagaaaatt

SEQ ID NO: 24063 - DNA, 438 bp, Glycine max
  Intron number 2 from transcript Glyma12g10130.1 (locus Gly ma12g10130) derived from phytozome v7.0 (chr-ID Gm12; pos 7971561 to 7971998 reverse strand)
caagctttcttgacctggcgccgcagcttggcgaggtgagttctccagttagaatctgcgtttgtttgaattgtagacttagaatctaattcagagaaaaaattagggtttgtttggattgtaggcttggaacctaatttagagaactatatgatggaaattagtgttaaggtccgcgaatgaatgtgcattgtcttctgtcgaaataaacttctaattttatggttaaattgcatatgtagggattagttagatgaaagagttcgtgtttggggactaagaatgtaattttagtcaattataatgtggctggcattgattgaaggattaatttgactgtttataggatttaaggttttgtagtttgttttttgttgatgatggcaatgtggttgtgtttcaggcttgaggagaataagaagcttgttcttactccgt

SEQ ID NO: 24064 - DNA, 364 bp, Glycine max
  Intron number 2 from transcript Glyma09g06710.1 (locus Gly ma09g06710) derived from phytozome v7.0 (chr-ID Gm09; pos 5459626 to 5459989 reverse strand)
ttcgaagtatgctaacatatgatatgatatatatatatatatatatatatatatatatcattaatcattcctaattcccaatttttgttgaatgtaaataatactcatacatttttaattaatatcatgtgtcatcatgaaacttgtttcatgtaatctttggtattttcaaagctttgattcatcaatctatgcttgtttattttccttgctaatattgcaccaaatatatagaaaaattaccataatgtcatctttaaggcataaatcggattttttttttctgttgaaaagcttgttttaatttctctcacatctttcttttctaaatataattttcctgaatggtttgcagaaatattct

SEQ ID NO: 24065 - DNA, 649 bp, Glycine max
  Intron number 2 from transcript Glyma12g33430.1 (locus Gly ma12g33430) derived from phytozome v7.0 (chr-ID Gm12; pos 36702370 to 36703018 reverse strand)
gtctcacccgccataacattgcaagccaccttcaagtacatatattcttcaactttgacccttacctagcttgcattgattttcaatctcttcaataaatttcattccccaagagtccaagactcattaagatcgagtcaacccaaaaaacaaaaaaaaataatagattatgctttttattattatattgttgctatttgtttcagctaattatgaagtgctagctagctatttttcttttctttgatagacaaactgaattcattgaaaaaaatgagtacaagtcatactcaaatgaaaattaacagcaaattaagtaacgagtaatataccagagcttaacctttcctaaaaccaagaataaagatctaccttatagctagcttgttaccatgcatcttttaaaatggaaactttttaatttccaatttatgttatattatgcatgtagcagtaaaaaaattctgggtaaaatttgggttatgcttgggcatgctaattagtctcggatcttgtattatatacatgattcaaaccccgtataagttaataattgatttctttagttttagggaattaagagggttctaaaatatttagttttggtgtggcagaaatatagatcgcataggaagcatttgctagcgcg

SEQ ID NO: 24066 - DNA, 933 bp, Glycine max
  Intron number 1 from transcript Glyma11g37100.3 (locus Gly ma11g37100) derived from phytozome v7.0 (chr-ID Gm11; pos 38330898 to 38331830 reverse strand)
ctagggttttagtctcttccttcagcttatttactgtgagttgattcattctcttcctttatttttttctttgatttgtttttttctcgttaaaggaaaaagccactgcgaatgcattgcttgccgtgagagctcatcgcttttgattttcatatcagatatccatgatttgagctgagcttcttcggttagctcacgctcgtgtcttgtagttgttatgttttagggtctgttgtgtttttagggttttatgcgatttcaatgtgaaggttcggttttatccgttccttgttctgtttgattctcagattttggatactgatatcgcaattgatgctgggtagttgatttggtgtgcttttagatgtatcggttttgtcttggtattttcgagatactttaagtgagggtgtgactgtggagttctgttgatttgatagcctcgtgcgaggaaggaatgactaattcgttagacgattagttaacgtaatgatgtatgaataattcttgaaaatagatttggttgctttggaacaaattttgagtgtgaacttgtagtttctttttctgcttttagtctttctgatgttagttgtttgaattataatcctatgcgactaatctagttagagatgtgaacttagaagttagagctctgaatttttaagctgttatgaagattcattttgttttttagtgttgagttctggatattcctcgaaaagatttgcttcttagtcattactaaggtatctccatttggggaggatctagccttttagttattactagggtatctgtttccgattggctgggatctttgaaaagcggttcctggatgcactgtgttaggttagtctttctgaacctgtttttgctgctttgattactcctacagaaattaatcagcttgtcaaacattcttcttgaagt

SEQ ID NO: 24067 - DNA, 324 bp, Glycine max
  Intron number 1 from transcript Glyma12g00950.1 (locus Gly ma12g00950) derived from phytozome v7.0 (chr-ID Gm12; pos 515436 to 515759 reverse strand)
ttgcttcgaggtgaagaaattgggtctcaggtaaatcacttttactaactgaaaggctgaagaaaaaatatgtaaatgtaatataatttcagttatagtcattagatgttaagagcactttaattttatgtttgtatttttacatgcatatgtgagcgaagtagtacttaagaaggatacttgtggtagattttgaatatttgagctctgttttgaattcttcatgtatggatagatgttcaaacaaattgttatttatatgagaggagaaatcattaaccaagtttgtatgttataatatgcaggttgataatattggaacaa

SEQ ID NO: 24068 - DNA, 865 bp, Glycine max
  Intron number 1 from transcript Glyma11g37190.1 (locus Gly ma11g37190) derived from phytozome v7.0 (chr-ID Gm11; pos 38378218 to 38379082)
ctcttcttctgaatctgcatctgcatcttctttctgtaagttcctctttcttctgttctcttttattgttgttgtttctatttctctattagggatctaccaacatttgaatctgttccttaatacttgtactcattcagactcagtctctttgctgaaacttttcagctcttaagcggtgctgtttgttgtacttgtatgctatttatatctgttgttgtgtttctctgaaatgaaaaaaaaggccgtgagtttgtcatgatccaccatatttctatgcacttgtttaatttattaggcgctggagtgtggtgaagtttcattttataaatcaatttgattttccatataataaaggcttacggttccaaacagattctaaagtttcccctaacaaattctctcttgctgtatttcttttcaaacaatctgaattttatttgattaattctagatctggtggttatttttgcttctggattttttttttttgcagaggatatttgactcctcttattcttcttagaacaattaataggtgtaatagactgataaattttatcattttcttgtttttcatcgttttgaatggatattaattgtaacttcatatttggttcaatagaggcaattttttttctcaatcctttctttttttatgttgagatgatcagatttctagaagaaaataaacattggaagattatctttgttatttctttatcctcaggttggatttttagatcaagggctataatatccactatgcattctggtgcaagttaggtttgcattagaaagaactgagatttacatttttaaccctgcagattgaactttttctctccctttaaattggtataac

SEQ ID NO: 24069 - DNA, 699 bp, Glycine max
  Intron number 1 from transcript Glyma12g03090.1 (locus Gly ma12g03090) derived from phytozome v7.0 (chr-ID Gm12; pos 2023323 to 2024021 reverse strand)
ctttcactaaatcgaagaccctcgacaataaatatgtacgccatttccccctttgatctcaatgttttctcgtaatgctgctgtgaatgtagctatcgttgttctgtcaactccttgttatcgctctgtagactctcgaatagagcactgaagatcaattagtggaagctttttagctttaggttcgtgttgttgttgttgtgaatcaatgaagttaaaggaacttgggtgattgttttgctttattgttagtgtcataagatgagtaatgatactatgaagtgaccttagtgtagttgttgaaacctgagattgagattactgtgtgaatattagtaacattagtaattttgcaaggtgatggtttggtagttggtagttgcactgggttgggctggagtggtgttagggtgcaggggtaatgttgaatcgtgtgtgatgcattgaaatgaaaatagtggtgggttgcgaaaatgaggttaaaggaatgcttagtatgttggttttagttgctgaatgttttttcatctagagattggactgaatgattttaatttttttttattgttgaatttcgtttgcaaatatttggcatttctgtcttgtttctattcttcaaattgtatatgggactggatcactaaatagctggatttttgaatggctgattgctttgtttgcatttgagatttggagcag

SEQ ID NO: 24070 - DNA, 558 bp, Glycine max
  Intron number 1 from transcript Glyma10g01810.1 (locus Gly ma10g01810) derived from phytozome v7.0 (chr-ID Gm10; pos 1312009 to 1312566)
tgtttggtttgtatttttattttcagaaaattattttcatttttaaaatattagaattttgaaaatatatttgatttcacttgttttttgtttttaagaaataaaaatactgaaaatacatttttaaatttgtttaaaattacatttcttgtcactaaattttcattttacccaaaatgagatttgtggtttcaactaaaaatattgaaaatgagattttattgtttctagttttagttcgtttgaaaaaatatttttactgaaaatgaaaacataaattcaaccaaacacatttttatcaccattttctattttcaataaaaataaaaacagaaaataagtaaaccaaatacccttgtatgactgaaaaatactcctagcaataaaatcatatgcataaaataatatttatcttatttaatattaaattattaattatgtggcttttgttgattttaggtggtctttaatattaaattattaattatgtgaacggacaacgagataaaaaactatttgatagcaagtcatttaccaggaagaacggacaacgagata

SEQ ID NO: 24071 - DNA, 639 bp, Glycine max
  Intron number 1 from transcript Glyma10g29100.2 (locus Gly ma10g29100) derived from phytozome v7.0 (chr-ID Gm10; pos 38018463 to 38019101 reverse strand)
aaacatccaatccaatctgaggaaaaagcaaggtaaaaaaatgattttttttgggtcccaattcagttagcaataagaaaatgaccttgagttgctgaatccttttatccagacttttctatgctcaaattttttctcctacttttggtatgcttactggaagaagaaactatggcccacccttttgattttctgagccaagggaggaaaatgacaggatagtaacaaaggcgtatctaatttcgtttcttttagcttcaataagttttcattgtccttgctttctccacatatcctcttcatagagaattccagaagcaatgttggatttcagaattcagaataggaaactattttttgtcattaagctctttcaggatttagccttttttctgaatgaatcctgaatccttttccttctgagtcagaaagtgtcttttgttccatcacattatctcccaggattcctcaccacacacagtacattcaattgtttccctcttgtttttatcactaagaaaagactaaaacacaaataaaaaaagaaaatgaaattgttcttcctatgactaacgtttaactgttatgaattttcactgtccagattctgtactatataaaatcaaaggaagaaaagag

SEQ ID NO: 24072 - DNA, 550 bp, Glycine max
  Intron number 1 from transcript Glyma11g14410.1 (locus Gly ma11g14410) derived from phytozome v7.0 (chr-ID Gm11; pos 10303751 to 10304300 reverse strand)
cccaagaacttgctcgtctcgctactcaatacaaggtatttttgttaatgtatcaaccctcagttaccatactacttttaaaatcaaactttttcctactaaattatacttttaaaagaagaatatgatcaaatcggtaatgtaacattcctattttaaacatttcaattatagtatgatgccgtattgtatttcgaagaatatcgcataacaaactctattaaataccatgtaaaataaagaattaaataaaaactatgcctattagaccttgagactgaaacgcaattttaaaataatattcagactacttaatgaattggatctgatatggcaacagagcatatggattcagtaagagcatctccaatagtattcatttaagcaatcctctttagattcttaactgggtttgaaagtgagttccagtgtgtcacatttcattttactccaatagtggaacccattaattgaactttttatgaagcttctgttttggagtgtattccggatactaatgcatggtgaacaacaacacagattatatcaa

SEQ ID NO: 24073 - DNA, 294 bp, Glycine max
  Intron number 1 from transcript Glyma09g39980.1 (locus Gly ma09g39980) derived from phytozome v7.0 (chr-ID Gm09; pos 44949737 to 44950030 reverse strand)
aacacaagtacttaaacacacattactctctcagtttctctctcttcttacttctctctccaaaccttacatgcacaaagttgtgtttgtgttctaatggaacttgcttgcttagactaatcaaccaagttttgcatttccagtaaccaaaactctcttcttttttttttccccctttcttctgggttggcaaagtcaacatgcaagaacaagattttttttaggctggttggtggtttgagttccaaaaaaactgactttttgttgaataatttgggtcggtgaaggggtgtt

SEQ ID NO: 24074 - DNA, 592 bp, Glycine max
  Intron number 4 from transcript Glyma11g36190.1 (locus Gly ma11g36190) derived from phytozome v7.0 (chr-ID Gm11; pos 37716299 to 37716890)
gagccaagcaaagtattgttcaagcagtgcttgcagtttgttccccaggggatgaggcatgaaacagtttttatactctaccataatcatttaaatttgcttatgctactaagtcattttaaagtcaaagaaaattgtccaatgcatttaattttttttgctgccaataggaagagaataaaattgagttaaataacatatgtagcttcagaagtgctctccttttgatgccttcttcttgtatgagatcacatacttgcaaattgtaataatatcattctgtaatcagtctgaattagacatggcttcttttgttcaaaaaattctgcgactgggcattcatttccaaacttctatgatacttttatcctacatgttttgtttctctgttttacttggtcaatatgattatcatatattccaggtccagcaagcttttctcttaccattattcaaacaaaaatttactccagctatttttgtggttttggaaaacttattacatagatgctatttatccttttgcaagctgtggtcgttttcatttaccttgtgctgtgaatgcttcaggttattattccagctccattct

SEQ ID NO: 24075 - DNA, 469 bp, Glycine max
  Intron number 1 from transcript Glyma10g01310.1 (locus Gly ma10g01310) derived from phytozome v7.0 (chr-ID Gm10; pos 969836 to 970304)
tttccttcccaaatcaaatctatctcttcttcaaggtatggatctcttcaccatttccatgtttcttttttgttagctttccacattcttctgtttcttcagattttctttctcttgcgctgctggatttaatcctagattaatttcgcaatttctcgtgtatcttaattttgatttacgatctggttacatccttgctcgatctgcatcgcgtatcgtgagatcgcgcgatttgaatcacctcctcgttttctttatcagatcggaacttaattttgtttgttcatgcatgcaataccgtttggttcccattcattttacatgattactgaattatgtgtctctttgtgtgtttgcatcatgttatggtgcataataacatcaccatgccttaatttttgttttattttcgtttcaatttgatttgttgtgattgaaatttgaatttgtggaatgataatagttgaaa

SEQ ID NO: 24076 - DNA, 796 bp, Glycine max
  Intron number 3 from transcript Glyma10g01310.1 (locus Gly ma10g01310) derived from phytozome v7.0 (chr-ID Gm10; pos 970663 to 971458)
ttggaggtcaggacaaggtattgtttttcccctctccatcttcttgtctagctactgactgacattatagaacttatggttatgtatggtttagcaaactgttcgcaatgcttttgttgatttgataacatggtaattggctgaaactttgcttgaactactattatgtatatgatatgatatggttttgtttccaaatttgagttgtgaccagtaaattttgatggtgaatcaatgaatgtatttgatgccatgactgatgttatcctgtcccattaagatacagatgggattcaaaatacgtgtgttgtttggagatgcatgtgcttaattgtgcaatctgcatgcaaatttcagtgtttatggctatgcaatgcttgttatcgatctcataaaccaaatggcaatggaaacgtagtcttttcgtatgtctattacttgatttcaagtctgcggttgtactcggtgtgaatagtgtgaataattactcaatcatgcaaactaactttacagggtttgggtatgttataaccctggttcaaattgtcttacctttgacctcttgttattcatgtatctctttgaattgttttaattatgcctcatttaaaagcaatattgctaagaaaatgaaagataacccacaagggaccagctataacatctcgtgccacacatacatcaccacacactctaccccctgaacaaccgcacaatcatcttctcaatatagtagtaaccattgatgttttttcctgtagatccgtcctttgtggagacattacttccaaaatac

SEQ ID NO: 24077 - DNA, 425 bp, Glycine max
  Intron number 1 from transcript Glyma11g10860.1 (locus Gly ma11g10860) derived from phytozome v7.0 (chr-ID Gm11; pos 7756821 to 7757245 reverse strand)
accccactctcctcttcgccaacgctggtacgtttcacgatcagtgattcaatatgcgattttttgttccatattcttctccacaagtctctgtataccatgctgttttttgaatttgaaatctgccagcgaagtggcaagggttttaagttgaaattctaattgattctgaatgcctcgaacttcacgttttgtgttaatttgttagaaaaaattattcatgtacacctcctatccatttgatatgatgtgataagaagggagaaatgacaagtgttaacgagagtgattcatatattattactctaattttttaatggtatggatgttttgttggtaataatgataaaaacggctggttatttgttttttagggagaaagtatatggccctcactgttaaggttaatttgtgatgtgacaggt

SEQ ID NO: 24078 - DNA, 866 bp, Glycine max
  Intron number 1 from transcript Glyma12g01730.2 (locus Gly ma12g01730) derived from phytozome v7.0 (chr-ID Gm12; pos 1061599 to 1062464)
tactctctctcacgctttctttcaccatcccacacgtgagttctctctaatcccgcttcctttgtttatgataaattaaaacttgttttggtaatgtttacctattttccattttatgtgaaagtaacttcaatgcttttccttcaaccctaatgactgcatatggctataatagccctttgtccctgaatgatccagtgagcttatttatagtaaggatacgttgatcttgttcgctggattgccatttaagaaggtgacctgatccagaacaaattatctttccatttttggagggtttttttttttgtaattattaggcatctttcgtgtggagtttcttttgcctttctggatgaaattattgagacacagatttgtaattgctgattgggttgttttctgttgtcaaattgagtaaggaaaagaaaaaccagaacttttactttctgcagtggcaaagagattgaaaactgctcgcacttgtctattatcctcgggaaacttacaaccttaatataaaaggaactgaaattttgaaaagccttatgactacccactaaaatcatggtttaacatttaaaaaataaccaactccacataacagtaaatattttaaaacatttgacttagtgacaactactccacatcagtagtcctaaacgcgtcatctaacactttccttctctccagctttctatttctatgcttatggaattgcatattctgttctggaggtttttccattttgtctttattgctgccaaatgaatggctcttgttcgttaaggtgggggatgtgtttggaatgttggtaataaaatagctgtgcatgactaactttgcagtgagttattgttccttct

SEQ ID NO: 24079 - DNA, 950 bp, Glycine max
  Intron number 2 from transcript Glyma12g01160.1 (locus Gly ma12g01160) derived from phytozome v7.0 (chr-ID Gm12; pos 664568 to 665517)
ttgatgtgagagatatttatactctcacttcatttagcaaccaaataatcgcttggacgaaattgggtgacgaaatgaattcttttattaacaaagatggtaacgtaaaaactgaaagaatagtaacttaagaaaaatgaagattattaatttaagtaaataaacaaaagagtaaattatatctctttctctgctagatgcaaatacctgcattgctcacatctcttatgttataatatatacatatcctcccttgatatatttgagtatacgatactttacttcatttttaattttctattaaaagaattattacctaaatattctttacactaccatacgtgagaaatacaagtgttaagggtaaggccaataaaagtcctagctttaggcctttgagaaataattttacttattaataatatttaaagaaaataataattatttgttgttctctacacattttaatctaaatataatagacttttttatacatatattaaataagttaagtgatttagtggttcttgtgcatagtgttaaggtataggatgtgagtttaaatcccacctttaagtaccctttttttaaaaaaaaattaaacctatatatataacttcatttgtacgtattctcttccaatcaattatgttgttgtcgtttataacatgaaatttttttttctatttttttctcttcatttcttctattattaagtttttgagaaaataaatgttactatccataaagtgtgtatcatctctatttgatttatttctccaaaagctcataaaataaaagaaatggacaaaaatgaaaatgaagaagatctattctcatttatgacatgtgattcatgtagtcggggattatcatttctccatcttaactgttgctaacttgattatttatgaaaatatttcaatatgttttttaggttaataaattct

SEQ ID NO: 24080 - DNA, 759 bp, Glycine max
  Intron number 4 from transcript Glyma12g05040.2 (locus Gly ma12g05040) derived from phytozome v7.0 (chr-ID Gm12; pos 3356233 to 3356991)
ttctgaaaaaggttggtccttataatctcacttctcgtttttcttatgatgacaaaaacaaatgtttgttcattgctatttttaacttttaaggtatagataccaagacttgaacacgagttgcaccaaatccccattccattggctgccttttaaagtgaacaatcattatggtccttcaaatttaaccttgacttcacattaccaaattggttcttcaatgatgaggaatatcatcagttttgtacttcaatgaccaatttgatggctaaaatgccacatcaaaggaccaatttgatgtcatgcatatctttcaaggacaaaattgttgaatttttaaatacaggaccaatgtaatgttgcatatacctttggaaaatctaatatgctctactttttacaattaaaaagtgctactttttgcaatgatatagatattgattctattctcatgacaaagtacagatttcatcacgagtagtggcggtactaatttttttgaggcgtagggagagggtctctagggagctttaatatgctatacatgtgagggcgattcaatcttggatcttcacatttgatgggccgctaggcgacatctaagttgttgcacaaatgtagttctggttatatgatttagagtgggattatgcataagaggtttataaggattatgattcatgtgcttgtggttttaactgttctgcatttctgttttaactgattgatggaacttttttcagggacagagatcgtcac

SEQ ID NO: 24081 - DNA, 863 bp, Glycine max
  Intron number 1 from transcript Glyma09g31610.1 (locus Gly ma09g31610) derived from phytozome v7.0 (chr-ID Gm09; pos 38289942 to 38290804)
ttcctcttgcacttgctgtctggactactatacaggttctcactcctcaatatgttttttgtccccaatatgtttccacaaaaagttagtactttgtcaaggatcatcttgcctgatcaatttgatttcatgttaaaatgcatttagtattttttgttcttgattcttgttgaattggggtaatttcataattcatctttacttgggagatgtgagttttttttttaaaataaaagttgtagaagggagagataccctaatactacaggacagtgcgctgggagatgtaaagttggtttggtggtaaaggatgaagggagggagggataggtggcctgttcgaattccctcgctaacaaaaactaacagtagccgataaaaaaaaaacaggacagtgcgccaatggcataagctcatttatattaattataaaattataattgtagatgttatcacaacaatctataaatatcttatactcttcatttatattcattatgaaattataataatttttccatatcttcaatttttaaaaattgctgtattttgtacctgtatctgtcacagttatcagtaactttctcaaaaaatatgtttagttaacttcaaattttatgtaaggagtcaaggggtctaacttaattggttgagcagagtgcgtgagctattgtaaaccccttacattatttttgattcctatgaataaaataaaattctatgcaaggaaatctccctgatttgtcatctgagttatgagttattggctattttttggtagtgtactatactactagttaatgttagatgttgccctttcattttcagtacgggagataccaacgcaaactgctcgtggagga

SEQ ID NO: 24082 - DNA, 1009 bp, Glycine max
  Intron number 1 from transcript Glyma10g37660.1 (locus Gly ma10g37660) derived from phytozome v7.0 (chr-ID Gm10; pos 45599507 to 45600515)
actccgtcattggcacttttgcctttggtttcgtaaaatctccttctctatccccaacgaccaaaacttttcaatcattcttatatatatatatatatatatatatatatatatatatattaatttgttgctacagtgatgttcgtgagtaactaacactcgttgccaaagattcttgttaattttctctgtttttgtctgtggagttaggcaaatgtttcctattattttacggacaaaacttcgatgcagtttttttttagatgcggttagaattagaattgaagtatacaggacaaaaaaagtaaggacaaaacttagttttagtttagtttagtttttttagatgttgttctgattagaattgaagttttattttgctaatttacataaaaaaagtgtttactttaaaggtaagtgtaggatctcaagatgaaacttcaattctgatcagagaacaacatgaaaaatttcttaagtttcgtccttatgttaatcgaatggattttaattggttctagctaaatacagaaggcggctcctttgttctcaccgttcctaattgaattttccttcgtcttacaaggttttcgtaattttaatcattttcattttcttaaaatcagaattcataagcaagaacaaagccttgtgctgtgtatttctcagaggatattgcaggaaaacttgcttagagaatagaaaccaactggtttcaccagtataaagtgaagggagtagtacactttgaagatatacaataataactattaattaaaaaatggccaattaagaattaaattaattatagaatttgttatacatgtatttgattttattaccattttaaaatgttatatatgtatttagtttgagagtgtatttgcatgtcttcagtttaaagaatacaaattcaaaagggaagttgtagaaattgtacttgttagtcgtctgttgtttttttaaagaaagaaaatctaacgatactctataaaacctgtagcttggg

SEQ ID NO: 24083 - DNA, 980 bp, Glycine max
  Intron number 1 from transcript Glyma12g01330.1 (locus Gly ma12g01330) derived from phytozome v7.0 (chr-ID Gm12; pos 770219 to 771198)
caagctgtcgtcgccggcactgctggctctggtatctatcttgttaattactagttactactattactgcttctatttttttctatttaacgcttttggtgggtttagttggtttagtttaatagatgctttgtttgcattatggtatgagagattgagagtggggatgtcatatttattacttattaggctttcgtatcgcattcactcttcacttcagccattctcttatttagtgatgtataaacatgatagatttactgatactttccctaaactcggggatctcagatgtttaaccatttgatccctaagtttgtgcctatggcagaacgtcttttgggaaaggtcaaccctttaaatgatttcagtttacttggctttcggccagaggttgtcttgggttcaccagaataattttaaaatcaccttatagtataatcatgggaatcttggtttcttgagcttttttttttttaatcttatgagggtgaatattcttaagcattttgatgctaaggttgcctaggtttgttatgtatagcactctctttgggggtaatattcttaagcttttttatgctaagcttgcctaggtttgtgatgtttagtaattattacttgcgtgtcatgcgtctcctttgcctaagcatttttttttatcatgggtaataaattaaataataatctaacagacaaaatgttgtcaatcagatgaccttttggttaggcaatgtaaaccaattaaagaataagcagagttgtgtttgatatggtttatctatttcatggtcatagtattttgtaccttaaatctgaagcacattattgtactggttttaggttcataagcattttgtgagagtctttgatatattcatttgtttattgaacttcggatggataaatgtttcactcttttcattatggatgtttaaacttcaggagtgcttgtttctgccctgaggatatttacaaaa

SEQ ID NO: 24084 - DNA, 630 bp, Glycine max
  Intron number 1 from transcript Glyma11g25910.1 (locus Gly ma11g25910) derived from phytozome v7.0 (chr-ID Gm11; pos 24648183 to 24648812 reverse strand)
aagcttactcttctcacctcaagcgatctggcaaggtcacactccaattacccttctcttttctcttcaacaaaaagtagtgttaagtatgatccttagtttaatgtgaaacccatttgttacttttgttttttttttttaatgtgtgaagtgcttttgattcgttatcgtttctattagctaatcgggttcttgggatattgtttatttcaccttttttttgtttcatgagtttttgccatgcccatgtgtgtgtattgacggttttgtgattaaaacggtgtgttttgaattgggtcatgttgaagtttgaaacttgatctactttgatagtgtggtgattcttttacctaaactttaggtgtcatgagtgagttttctgtgttgggcgtttgagtaaatgaacaaatgaattgattgtgtggtgattcagaatttgtttgtcattgtggcgttgattccatctttgactactgtattggctagttctagaaagatctttcagctgggttgtctcttttgattggtttgcttaatgctatgggtaaaatgactgaaagtaatgtcctttataagagcccttattattgatgtgttgagttcatttcttttttatttggttctaaacag

SEQ ID NO: 24085 - DNA, 400 bp, Glycine max
  Intron number 1 from transcript Glyma09g40230.2 (locus Gly ma09g40230) derived from phytozome v7.0 (chr-ID Gm09; pos 45184158 to 45184557)
caagttgctttttttttcccccttttttctagctggtaagaataatcaattttcaatcaatcatatatacttttttcatgtgcaaaaaagaaaacccatctcagggatttatgtttcttggattttagatccttatttttgggaagtcatgtaaagttactgctacttttgtttccttaaaatctgcatatatctgggctctgtgttaaatggttattattcttctgcttgttttcatgctttagtttcacttttccctcttcacatcctccatattgcaaggtttacacaacaattgttttggcttttaatggttgtcttttgatgtttgattctcatgtgatggagtcttctttatgtttcagcttttttgggccttcaaatcttgcttggagaaggc

SEQ ID NO: 24086 - DNA, 588 bp, Glycine max
  Intron number 1 from transcript Glyma09g16650.1 (locus Gly ma09g16650) derived from phytozome v7.0 (chr-ID Gm09; pos 19993078 to 19993665 reverse strand)
tctatccagatccttgtggttggactccaattcaggtaccttttactgtaacttgtctaagcaactattttgtactgtgctagagataatgtttagaaaattcaaatttgtttgtgtaaggctatggtttcttgatgaatgtcacaaggaataatatagctacaaggttatagttcctgtttggttaatgacttgcacaaactttttcacaatcaatagttcctgttttactcttgaagattttggctaattgttaataggaccatataaataagagtttgcactcaatttcataaatgaactctgaggtgaacctaagctttttaaattttgttggatgccagaaaggtaaaactataatcccttggcttagttctaaaattgatcattcatcccttgtatcaattgtttctcagtagttgtcctcccccctcttttttattttactaccccttcaaccatgtaattagaactctttgcaattcaatactaaattgtaacttaactagaacaaggtgattaattatttacttaattgtgttttctgtgtttgttttcttctatagggggtctcttgtgatctatttg

SEQ ID NO: 24087 - DNA, 294 bp, Glycine max
  Intron number 2 from transcript Glyma11g06770.1 (locus Gly ma11g06770) derived from phytozome v7.0 (chr-ID Gm11; pos 4784114 to 4784407)
tcaacctcgttggttgccatctggagccagccacggtatgtgagttttaagttaaccgtattaaaaaattaatttgttttgttccttgcctgttcttattccagttctttcatgctttaatctcacttgcctttatgtttttgtatctaaaaactttacatgaatatgtgctatctgtacttattttgattgttgacttactattttcttgtttttgttttgtgtttttcttcttgcttttcgatgactgcgaaaccagttgccaacccagtactacacagctctggtaattat

SEQ ID NO: 24088 - DNA, 1035 bp, Glycine max
  Intron number 2 from transcript Glyma12g11690.1 (locus Gly ma12g11690) derived from phytozome v7.0 (chr-ID Gm12; pos 9775088 to 9776122 reverse strand)
ttttggaggttgaacttcctgtgtttgagtattggaatgctgggatttcactttgcaattttaaaataagctacttaattaggaagaacaaaaatattaattaaagagtttaaaaaaagctatcttgaagagttttttatttttatttacctatgcattagtaattttatttacttgtgcgtaagtaaataagtagcttacatcaagatagcttttattaaactccttaattaatatttttgtaagttaatcaacactctctcaagttagtcaattttaaaataagtcctagtatcaaagtctcttgcgttcaaatttaattctgctcatctttacctaatgtttgtacaaaaattaattgttaaacctcatcggacttctagtattattaacgatttttccgtacgtgctccaagtaaatttaaataccggaaaagcaaaagttgagaggttttatccataggcaactcctacttgtgctttccccttaactgtataaaaataagaaaacaaatggaaagaaaatcagtttggacagggaaattaatttaagaaaaaaactaaagcttcagaaaaaattactacgcggtaaacgcaggaattatggttctctttctctataattgaaacaaaattataaatgatattccttttacttttacataaagtaattgatttttttcttgtttttttcctacataaagtgatgtactgtttgtttttttttaaatgatttatcttttctaatctgcgattgaggttcaaaaagcaaggcaggtaacaatgttccagatgcgtagtccaatactaaataatatcctatccacgcgtcaacgccaggtgtcaggatctaaccactttgtctgtctgaagttgaaacaagaacaacacttctgatatattaaaaacaaaaacttcagagttcaaagctgtgaagtaaaagctgctaacccaaattcttgtcagtggtaaccatgacagttggttccttcttcatcaggacctccagggttctcaactcctccaactttctgc

SEQ ID NO: 24089 - DNA, 1065 bp, Glycine max
  Intron number 1 from transcript Glyma10g03680.1 (locus Gly ma10g03680) derived from phytozome v7.0 (chr-ID Gm10; pos 2740693 to 2741757)
ctctctctctctctctctctctctctgtctcgttggtaggttgtttctttctattagtcgttgctcacttttttttttttatttcattgatttattgtttcaattttgattttattgatttgtgtttcgttttctatttcattgatttgtgtttcatcgattttgattttgagtctgcctgtatgttttgcctatgagaacacatatctatatgctttgcctgaacaagcacttctatatggattggatttatacgtttctgagtttggttgcaatgtttagttagagtttacttggattttggtttgacggggttggaggagactactaaatttggtgaagttgctcgtggatttgtcttggtgggtttgaggttgagctaggtggtgagcagcatgtgtttgtgaatatgcacgaaagagaaagggagaaataattgatagattggtggtgtgatattgcctattctggtttaggagaatgtgtgtgaggttatgatataattagaaagagaggtttgacccataacccacattcaaacacttgtacctagttccaatatctgtatgtgttcaacaatagcatctgataggtttgatggtttctgctctctaagttccagcaatttctttgtagcatatctaacagttgtatgaggtttgcttaattctggataactataaaatttgtctaccaaaacaggctggtttagaataagaaagccaaactgagaacaccattgagcatcttcagggtcagtcctccaagaagagacacacagaacaatggcttgattaaagaattcaacttagacaaacaacccctctatatcccaaccaccaccccacccagccttcacaatcaaattccaaaccggagtatgcagtatcaattgcaagttatttggaaaatttaaattacattatccaaacaaggcatttggaaaaataaaggaaattcaattgcaaattattcaaatgtcatgtatttccattttcctaagttgctaaaattctctatctaaacacagggttaaggactagagaatttccataggacttcaag

SEQ ID NO: 24090 - DNA, 485 bp, Glycine max
  Intron number 3 from transcript Glyma10g03680.1 (locus Gly ma10g03680) derived from phytozome v7.0 (chr-ID Gm10; pos 2742033 to 2742517)
cagcaatctcaagctcgccaggtattccctttcttcaaccaacgttatatatttataactcagcctcacaggaattagtttcattaggattttttagactctgtttttgttttcttgagttggcatgaattcccattgcttcaaatgaaaaaggcaattttttttctggtaaatatacattaagcactttctctacagaaaaccaaacacacaccgagtcataatatagcatttcttatgttaattggaaaaaatgacaatttggctttctagaatcttaacatgtggttcactttgaatttcttggacaataatgtcaaataggaacataaaagttaggaaaatatttgtgttctatcgaggaatgcttatccatggctccatgcaaggacttggtaatgacattccatttcaaaaactacgtagtacattctattgtattaacctattttgacttttaggttcataaggaactgcaagacaca

SEQ ID NO: 24091 - DNA, 714 bp, Glycine max
  Intron number 1 from transcript Glyma11g09760.1 (locus Gly ma11g09760) derived from phytozome v7.0 (chr-ID Gm11; pos 6962566 to 6963279)
cgggatcacgtgagtttccataaataataatagtatttctgtaaacaattaaggaaatattaatatgacagtaataatgatttgtttaatttaccaaattactagaaagattcgaataaatttttaaaaaattgataatttggcaaggttcaaaaacagaaagacggataaaacgtacgtgaaataaagtaataatgtaaatgaagttactctaaacagcttaaggaaataagttgtatgaagtcacaaatttgatttataagagtagcatcactgtttagttgaagaagaatataacctcgaagaaaaagggggcattaggaagcattatgttggatttaagaagcaataacagtgacaataagagagagtagagtttgtttatagttaaggaggagtatctgggaaaatatagtttaagatggaaatatatagagagagagagttaggggaaaaatgaaaggtgggaccatggggatggcgtctttttgaaatggctttaatcaggttgtcgttctaggttccctagcttggatcttggctctctactcctcgcttcaacggttcaatcaatcaactcttcatccttccctttatacccccccttctttgtgttgtacatatttatatcgtaacatagctaggctgctttactctagtgctctcctacactcaatgaaatgctgtgacgtgatttgcagaggagaagaggga

SEQ ID NO: 24092 - DNA, 335 bp, Glycine max
  Intron number 2 from transcript Glyma10g30860.1 (locus Gly ma10g30860) derived from phytozome v7.0 (chr-ID Gm10; pos 39444716 to 39445050)
gaattcttggaaataggtgggggtaaataaactataagataaactttattcctaatcaaattttctacaaaacttttttatatcattattcattttatcttatatattcatctctcttttgtttttatctttttttttcttcttatttttgcaaattttttgagtaatagtattactcttaaagatgccatacatataacaagtcatacaattttcaagatatcatatcaggtgtaccatacgtaattacgtacctagtttaatatgtgatgtggttgcatttgctgaaattaaacaatgaaactaattttagtgaacccgggcttgatgctcag

SEQ ID NO: 24093 - DNA, 803 bp, Glycine max
  Intron number 1 from transcript Glyma12g10540.1 (locus Gly ma12g10540) derived from phytozome v7.0 (chr-ID Gm12; pos 8500294 to 8501096 reverse strand)
gcagaacccaaggttaaatacgatcgtcaactcaggtactctctatccacttccacatttacctaattttttgtccacttcgcgctaacctaactgttttttccttctaaaaaaccctagcgaactctatggcgcggaaaactgttgtttcgttattgattgtggtatatgaattgagttcattcgagtgttgtgttgttcgttcacacggaatctttgactgttaattagctgaattgctatggctgaaggtccgtttggtgttttttttaacgatgttagggatttggtgatttgattaagtgtagtgagccttgaatgaactggagtggagcttttctgggtatgatgagatgcaaattggagttgagttgctttttatttgcaaaatagaagaaacttgttgatattacaatgttgcttgttgagtgaaatgtgctgattcttaacttgtgctgcttttttggttttgaatttttgtctttgcatacatgtgtgttttgaatttgatgtattcaagtatgaaatcaaaatcttaaggccatttggtttaagttttgcataggaaataatagaaacagaaaataataaaaagttgtcttcactgtttcttgtataaacttttataaacatgacataaactgaaaacatggtggcatttttgtaattgaaaatgaaagtagaaaaggttttttcaaaccaaacagtctcttctgctcttcctactgttttttgtttttgggcagtcttggaggcatctctgatctcatccatattgcaatgtttatttggaaatgcagaat

SEQ ID NO: 24094 - DNA, 502 bp, Glycine max
  Intron number 1 from transcript Glyma10g25340.1 (locus Gly ma10g25340) derived from phytozome v7.0 (chr-ID Gm10; pos 33037675 to 33038176)
tagccaaggaagcaagatccacctcgtaaaatttctttcatgttttattattagatgagaaataaagatttaacaaatagtttattatacatatttcaattgtaatgttttttgaagtctctctgaccataatgcaattagaattgtgggcacgttagttgtgtatttgtttctatgtgattttcgaaatatcaaagattgcgacgaaaaagtgagaaaatgatttaaaaccttgatatgaaatgagattatttttgagttatgttatttgacataatttaagtatgtttgacataagagttattaatattttacctttggcataatttaagaatttttttatacatggcataatttaagaatgtttttatgcatgtgctgtttttcatcatggctaaaatgggttgatgggtgttgaagatgtaaaactagtgttgagctaatggggtatttattcatttatttattttttctggttcaggctttggagaccgaggtagtt

SEQ ID NO: 24095 - DNA, 935 bp, Glycine max
  Intron number 2 from transcript Glyma10g38690.1 (locus Gly ma10g38690) derived from phytozome v7.0 (chr-ID Gm10; pos 46476119 to 46477053 reverse strand)
gcaatcaggttttgctttctcttcatcgaatttttccacttatttattgtttttttttcagtgagtgaaagagcttgtcagaaatgttatggattgaaatatgtttatttggttcaaggttgaattttgagtgaaattttctaaagtatgttggttattgaggaattaggaacaaacccacaattgaaattgcactcagaatcatggaaattcggtagttttttggagtttatcgttgtcacttgctaacttccattatttttttttttttgttgttggtggtggagttgatgtttttggcatctagcagtcaggcagatgaatcttggatttcctctctagatattttgttaggtccttctgtggttagttctttcatgtcactttcttataggttcttaagtgcacgaattgcttctatatttgtgtatagaaaggctaacggttgaacacagacttcgtttttgttggatagctattgaacttggattaagttagaatctttaactgacaaagtttttaggcgttaatgatagaaagttgcttagttttggtcaagcatgccatgagtctgtccaaatcactaaacagattgatgttttttgaatccatgtttgtacattgcgcttaacagattcaaagaatctgaaaaagagaagggcttcaataagcttatgcatctagcttactatggaagcttaaatttgaacaagaatttaattaaaatgtattgatagtataaaggttttttactttgtcatctaatcatagattgttatgttaagattattgacttttgtaatgattgttttaaaagttatatgtagagtgatttctgattagttcatgcttcacagcgtgttactatataaaaaaataaactctttgaataattggaaattcatattttacttctttcaattattaccagatat

SEQ ID NO: 24096 - DNA, 917 bp, Glycine max
  Intron number 3 from transcript Glyma09g08370.1 (locus Gly ma09g08370) derived from phytozome v7.0 (chr-ID Gm09; pos 7558502 to 7559418 reverse strand)
gaacatttggtgcgttttgtttttattttgaacaaatatttagttcctttatgtaataactttttcacaaaatgggctgtttgattatgttctcgtaacttttgttatttgagaatgataatttttatatgctacttatagtccatattgtagtgatgttactttcgatattgggatgattgatgagataatggaagttgttaattaatagtaatattttacatttacttcggtatgtgtcgagttactttggatttgttttcgaccattggcttcatgttgctttcatagaggaaagggaacgtgaaagtttgagtttcaatgtcccgaaacgaacaagcttgtgctgttaggtatactaagttgagccctttgaccttgaaagcatagacaatgtacatacccacctgacatttacttacaaacaacaacaaaagccttattcatctaggtgaggtcggctttatggattgtatgacgtcaccaggcacagttaaaaaccaaattcttagcaatattattcatcattatattccttttaacgattttctccattgtccttcttggtctctctataccccttttttacctggctaaaaaccatgatcccaacctttgcttaaattcaaccttttctttctcaagaatgagaatcttgattatatgtcaattagcaactatcctacaagcttaaacgtttgtgtgaagacatgccaattattttctataataatattgagaataatgctttgccaaaacgattgtcaaagttttttcattaagttaacatatcaatgtcactgttttatactgtcaaaacataatattttcttcttatggcaagttcatctcatattaatcataaatttaattgatttattggcaatagcgttggttcttgtaccgacgcgggagct

SEQ ID NO: 24097 - DNA, 633 bp, Glycine max
  Intron number 1 from transcript Glyma09g27230.1 (locus Gly ma09g27230) derived from phytozome v7.0 (chr-ID Gm09; pos 33997735 to 33998367 reverse strand)
catttcaaggaaacattaaccaagaatctggcaaggtaaaacatataagttctggagattatgcttcaacttcaaaggattgtgcattatgtgtacaacttttagtgagcttaatacataggtggctataattttgtttcagcttttcctctgagaagttaagccgaatgctattttagaaaaaactcttgataaaagtaacttatttttaagaatttaattggaacaattgaaacttgaaagtgtaaatatttttttatgatgctatctaatcttaagttttgatgtatgataaaattgttaatttttgtataaattacattaaaagtcatttaattggttgtcactgtaatttttttacccttatagttcatagaaattaaactctatttttttaatgaacaaaagcacacaaaatagagttactaaagaagttaattagagaaacttctgtttttaatgagaagaaaagttgggtcaagcatgaccttattttaacttgtcataggtgtctctctgattagtttagttccataaccactcaattgatgatatggctaccttcttgttgttgttgttgttttttttttttaaccaggttgatcttgagttcaaggccaagttcttgttttc

SEQ ID NO: 24098 - DNA, 721 bp, Glycine max
  Intron number 1 from transcript Glyma09g41900.1 (locus Gly ma09g41900) derived from phytozome v7.0 (chr-ID Gm09; pos 46587899 to 46588619 reverse strand)
ctgaagagaacagccaggagatgtacagagataagattgaacgtttgtcattggtatttttatttcctttcttgtcacttttcttttcctcttgattaagctttttgctatttgttgaatacttctaaattttcttatcctgttttcttattactctttttacttgctaaatgaagaaaatattgaaggaatacgtttttgatatattaaatatttttagaggaaaccgtgtatgacttcacactttaaagtgtaaaagatacactaacatctaatttataagttgacaatgacacctataataattttactagtttctatgataattactttaaaaaaatattaattgtgatttttgagtagttgaagattaatgtaaaaaatttacaccaacaacggtcatacctagaaattaaactcatatttaccttttcatttgatatttgctttagaatttaattaaaaaaccttgtttgtataaaaaaaattacattattatttaatcaatatatatgatcagattattggtttttgtaacaattttaaattgatagtagagaagtttttataatgatggtatgcatcaaaattatattcatttctttataatatatataaagaggattaatctaaagaaatagggttagatttcagcatcatttcaacttttgtgatggggattggccagctgcagcaaaatatcccacttgctaattaaatt

SEQ ID NO: 24099 - DNA, 976 bp, Glycine max
  Intron number 1 from transcript Glyma09g37080.1 (locus Gly ma09g37080) derived from phytozome v7.0 (chr-ID Gm09; pos 42651834 to 42652809)
tcggcgccaatcgcaaccaggcttttgtcgaattcgtaagtactaactccctctctcctttcctattcttttcaattcttccctttttagggtttttagctgtgtatttgttgattcacgagaaattcagctctatgtaaccatttttagcttttactcttgagcttagggcatcacaattaggcatttcattttttttcttcatttttacacttgaaaaaagtgcgccgattattttctattttttaaaaaaatgcaactttgaataacccaggggtggtgctggcgattgcatccatttatacgctctgtcggtgcataaatccaaccaatctgcccaatcatcatggattgggtgaaaaatttggatgattaataaaaataaaccattgatcatatattttaaattaatgagtcaagatattaacggttcttgtaaggagtgaatttttaaaaggagggtttttgctgacgtgtaaaaaatttttggagatcgaggtcccttgcagttgcagatatcagtggtgggcatagcaattgttattaaggtttccggtttaggtacggtgttctcgtagcctaagagaacccataacatattcaggtggagcctaaagtctcattactggaattttcaccatgtactgatacactaccctggctgttcaattttgtttttgagttgagacaacttctcaaagaaaccttcttcttatgttttagattgaagatttaatatgttggggatattaagcttgccatgcaataaaaatgtttactttgtaaactttttgtttttgacactgttcatcttctaagattatttcccttgagttttgattggtgtgttaagtgactgccgagcgtccgaggatgtgttttcttatatttgatgatacctggttctttttttttttttttttttttaactcaattatacatgctttgccaggcggatctaaatcaagccatttcg

SEQ ID NO: 24100 - DNA, 342 bp, Glycine max
  Intron number 1 from transcript Glyma12g17230.1 (locus Gly ma12g17230) derived from phytozome v7.0 (chr-ID Gm12; pos 17089534 to 17089875 reverse strand)
tggccgacgacggcgatttggtcgtgccgagggtgttcggctctgtccccactttcgctgaagctaaggaagccacccgcagaattgaaggatgctattgatcagtatattgttctttttttttttgaattgatgatgatagttgtgtttaagaatttatttatttatttattatgtgtatttgtggtttcaatttcagttttgaagttttttttactgatttgctgtgccggtttttctaaaggtttcatttttatgctcttcgtgtgaggtttatttttggttggtaatcatcaatgtgtttaaaactgggttttgatcaatagggttagtccagtgagt

SEQ ID NO: 24101 - DNA, 481 bp, Glycine max
  Intron number 1 from transcript Glyma10g01580.2 (locus Gly ma10g01580) derived from phytozome v7.0 (chr-ID Gm10; pos 1150259 to 1150739)
tgtccaaacctaccgactctgcttccaaacctcgagtcagtttctctctctctttcttcaattcaacaataactaaaaacagctccttgtttagatgcttcaattcctcttttccttttctgattcatcggaatcggtgtcgtaactacgttccagaatttcattatgcacacctagaattttgaatttgatctgataatcacaaacgagcatcatttaagagctctttgttcctctttctccctgtaattgaatgctacagcacttgagttcgcgagtagggctttcagattgcgcttaattttggattttggtttctgttttgttgttgatatttctgttgagaaacgataattattaaatggtccttgtgctgcatcgcgtgagaattgaaattttaccagtgctgcatacagaggattttctatttgtgtattttgaacgtggtaataatttgttctgtaatgttgacagaaacaac

SEQ ID NO: 24102 - DNA, 370 bp, Glycine max
  Intron number 2 from transcript Glyma12g34490.1 (locus Gly ma12g34490) derived from phytozome v7.0 (chr-ID Gm12; pos 37674268 to 37674637)
gattggaatcgagcatctttgttgtaagtgcatgcaatttgtgtcaagtcaaaacacaatcaaattaacaatccaccataaaagaaaaagaagatatttttatctgtgttattttttgataacttgtaaataatatctctaaaattctagtctttaactgaatcgaatgatatcatgtgatagcagacatcaagaaagacttttatttctgatatttctttgttttttttttataactttgtaatttagcatcatataatagagtaataaatagttgatcaatcctcatgggatatagattgacttttttcttgtgtttgttttgacggtgatagaagaggagagaagggtacggagaacagtttccggt

SEQ ID NO: 24103 - DNA, 676 bp, Glycine max
  Intron number 1 from transcript Glyma09g40070.1 (locus Gly ma09g40070) derived from phytozome v7.0 (chr-ID Gm09; pos 45034828 to 45035503 reverse strand)
ttctgcaacggacgaccttcttcaactcatcaaaggtgaagttttttttcttcttctttatctcactttgccttcgacacacacaccttttgccctctaccctcaattttcccattttcttcagaattttccccctcttaatttcctttctctttgtctattcaattttatttttcgaaattccccccccccccccccttttgtgttgattgcgagcgattttacccccaaaatgcttgaatttcataacccattattactcaattattttcatgtttttttcttaaaagtattttttgattttatgatgggttgataacggttttcacccctcaccgttgcaatccattcaaccatttttttattgtgtcattttattttattagcctgtggggtggaaaatttttcaatttctgtatccccattattatgctacaagtctaagaaaataaagggggtagaaatttccctattttttagatatggatacatttatttcaatttcgttagcgagaattcatgaaaaggaaagaatttgacccggaaaaagttggtataagactaaactttttgttttgagtatatggatttttcactttaaagtggctattgcagttgactttgtgagccaattcaatcaggcttgagaaggtatcctagtgttgtttgttcacct

SEQ ID NO: 24104 - DNA, 628 bp, Glycine max
  Intron number 2 from transcript Glyma09g08760.1 (locus Gly ma09g08760) derived from phytozome v7.0 (chr-ID Gm09; pos 8183162 to 8183789 reverse strand)
cacagttattcaaagtgctgctggcaaaggagcaggtacagtataactccaccctctttgttttttcatctcatgaatgagagtttgtgaagcagatttgattagttgttctgatttttgttttagtaagatccattgctatttagaaagtagttcatctaattagaaattgcttgaaagtcttgttgcatgtcaattaatttttaaaaaatgactaaaaatatgaaggcatgtactcagaaactaaagcatttacagagcctatgcgggctgatattagttgttaaggatctggtacaaattcccaccttttccatcagtgtgggtttgaatccgtgatgtcactttctctgcttggtggacaaccttctctgggagatcccttaacacctaggggctagttgagtagctgcaacatggcagaattgcttatggagttacggtttgaacctgtgcagtaatcttctaagtgaatctgccattggcgtcctgtctagtagttttccaccacttttatcaactaaagaaagcatatatagagccttatttttgggtgatagataacaatttgttgccctttaatttagctaaatatatttcttttctttcgttgtcgcagtttgcttgg

SEQ ID NO: 24105 - DNA, 687 bp, Glycine max
  Intron number 2 from transcript Glyma12g15410.1 (locus Gly ma12g15410) derived from phytozome v7.0 (chr-ID Gm12; pos 14239814 to 14240500)
tgtaacatggtagactgatgaaatagattcagacatgagaaaaaatttcatgatagtaatccctccccccaccaaaataaaattttttctacaagctgatttactgctttattgccctatatgcagtttctaagttgagtgaaactatttttttttaactgccattaaaaatttgtgtcctgcatacaatcggtttcacatactttcaaggagtgtatgatgtaagattgaatggttaaaattttactcctgtcatacattctttttcccctctgtgttttggccacataaatctgtttattatgtttttgtgcacgatgagaggtgggctctgggtcactggatcattaatctaggttttgataaaaatttatgggcttcatgagcataaaggatggtcttgaacctgttctctttgttttatttgttcactgattatgcacattttggattcatataatatgctctgcttaatagatgggaaattgcttaatagacgagagaattatggtgagcagtaacactgttgttcaagttttagatttcttaaaccaaaattaaagcctctgatgtattttatctgtgttgccttgaagatcttgtttttatcctttaatatcaaatattctttaatggcatctctccgtaccttggtgcacgtgtattgtgactgcacttttgtgtgag

SEQ ID NO: 24106 - DNA, 806 bp, Glycine max
  Intron number 2 from transcript Glyma11g35720.1 (locus Gly ma11g35720) derived from phytozome v7.0 (chr-ID Gm11; pos 37342970 to 37343775)
gtggacattgacaacataaggtaaccactaattaaccaccaatatattatcccattaagagataatacatgtggagccaataaataagcatcttaacaagacaaataaattagtcattaatcatgcccatatgttgttattagaagtttaggaaaaaattctcatcatttgtacaatctttttttttttttaatattttatacaatctttctcattagcttgaattctttaaaaagaggtactttttttttttacttttcttttctctaaattgttcaacttaactaaatttctaatagttcaagattttggtttagatttgaaataagtgaaattcgcttaaattttatattagaataaaaaaacaacattgttccatttctttttataaaaattgacgatcaaaattacaaggttcttttatgaatcacattcatccctatatatttatttcgatatattgaagtgattaaccgaattaaataaggttatttgatccatatagccaacgttatattataggttttgttattgctgtatatatattgagtatttttttcttatacatgtttaaattaatttcctttatgaatggcaatcatctttatgtggttacatacttcgctatattaatcaagtcaaaatgatgttatgtgatccatctaaattactgttattattatataatgagataagattttgttattattatatattaagtgattgtttttcttaatcctttctaatttaatttcatatatatttaatttacattaatattaattaactccttgtggacaggtgtg

SEQ ID NO: 24107 - DNA, 663 bp, Glycine max
  Intron number 3 from transcript Glyma10g04710.1 (locus Gly ma10g04710) derived from phytozome v7.0 (chr-ID Gm10; pos 3637340 to 3638002)
aacctgattccaagattcgaaccactgaattcacggtttttccttctctcatttctttcttcttctttattctattattattattgttattactattattattgatattattgctatttttttaacacctcatgtcctcgtgtatttgataagtttttagcacattagaaacacacgaaacacacatgacacatgaatcatcattaattaaaatctatgaggtggttttgggttctgggtccatgaactttttgacgtccactttcgctccagtgccaccatttttttttcttttatcactaaaatagagtaagtaatttgtctttctttatttaaaattaaataatataatcttgtgtacaactttaatcatagtgggtctaattttaatttgatcttagtgctgctgttaactttatattattataatattatggataagcattatcattcttacgtgagtaacgctatttctatataatttttttcctaattttctcttctatcccgggcaaattcccagtggacaatttttcttctcaaaaataaaaaattatttttctagaataatcatttcctaacaacggtgaagttatgtgctaattagggtgtttaatgtttgtttgcgatttttggtttgacagttccaaggtggtggaaata

SEQ ID NO: 24108 - DNA, 768 bp, Glycine max
  Intron number 1 from transcript Glyma12g30440.1 (locus Gly ma12g30440) derived from phytozome v7.0 (chr-ID Gm12; pos 34082036 to 34082803)
ccactgtttggctcgcttgggacactcacaaatcggtgcgtgcccttttgtttgtttcctcacagcacaacttggggatgataaaaatgaatgcttttgacgatttacaattagtttagagagtttgagttttgttctttatctgggttgtggagtagtgtttgtggttgagagatttggacgaagtgtgtgcttttatttatatttatcatccttttttttcttgtgtctatggaataattaacaatggtctggctttgaccttgcacccatctgttgctgattgaaagaaattgtttattttattcttaaaaaaaactatcattctcaaaactcatctgataaaaggatctcaggaggttcaactgcttgatcttttgttttattttattctgactattgatctctctcttattcagatcagctaagaaattttgcaagtagttactcggttttttgtgcccttgttctttctaagtgatcatgtctgttgtgtgacactagagttcctgtgattaggtgggaattcactttaggactatgactctggataaacttctccataagcacttataggagaagaaaaataagaaggtaaaataatgcattttccttcttattttcttctcctataagggcttatggagaagtttatccaaatagggcccatgttatttttcattctttcaataccatgctaacgtacatgcggcaatctatagtttggaactttgttagtgatgctttaaattgtctgtttgcagcgat

SEQ ID NO: 24109 - DNA, 857 bp, Glycine max
  Intron number 1 from transcript Glyma10g02980.1 (locus Gly ma10g02980) derived from phytozome v7.0 (chr-ID Gm10; pos 2143229 to 2144085)
gcctgccacggtatgtgcttttttctattttacaaattcttgtggaagtttgtgtttttctcttgattgtgctgtttaaattgtgcttttgatgcgtatctgggttgcatgttgggtggggtttagtgtggcaattttctgggattgttgtggatccgtacttgaatttcatgcctgttacgtttttcctgggtgatggttctagaagatggatgtgcctggctttctgaccttaaagtcttaaacttgcttttttatacatgaattttacacgcttcttgacttatcttgctccgatgagcttgttgtagatgtgtttagtgcataactggaatgggttttacagcttttcagaatttaattgtgaattcttaattctgtattacttctgatggagaaggtgagtttttatttctctggtcggtggggggcagaagatagaaactagtgaccacaggcatatctgaaaccatctggagctttgactttcctctccctcctcctcgtaggaaaaaaaactgttgaatagtttgtcgctctgtttggtgcataataatttaagggaaaaaatatttttttcattgggtttgaatgacgtgatttttatgccattttcaccttgtttttcctttttttcctctccatttgtcacgtatgtatagaatctgaatgaagtcgttgttcctgagacagaagatctcctttctgcaacccagtctcctgagagacagaaacattaagtttctttatgtttgttccccttcttgtttgtagtaatgaactagttatttaatgatttttcaagttctttgctggtggcaggtaagtgagccggagaagtggggctactctactga

SEQ ID NO: 24110 - DNA, 982 bp, Glycine max
  Intron number 1 from transcript Glyma12g07920.1 (locus Gly ma12g07920) derived from phytozome v7.0 (chr-ID Gm12; pos 5592523 to 5593504)
agagaaaccagaggaactactgcaagaaaattaaggtttagtctttttctttttttaattaagatatagttttataataaactacacagctttctatatattattttttttaataaaatatgcgttgggccaattaaacttttatagatttaaaatttgggatatatagtttttagtctaaattgcagttgcagttttatctgcaatatttattgcagaaaagtgcgcgtgaatgcgaccaatgtggcaacaagtagggttatgatgaattaaaaaatcttgatttgatgttgcattcaaaatcagggctacgaactgtttttttaaaccttgtatattccatcaaaatatgctaatatttttggttcgaattaaaaaaagagtgaaagtgagacttggacgaattcgaaagaaacaggaacataatggacaaatgaagctgtaaatcactgctgaaaaaccatgctgctctttagaaggatgcatcatatcatgctaaaatcatatcgagggttgaaagttaagggaaatagtaaaaaaatttgacaaaaatcctgatacatagaagtagtgattctttcaacacaaggattcgttcatgatctttgcacgatagagacctgttggccgcacaagagatattaattaatagactatatataattgtgatatcatgtgtatgctagggttagactgttgatgtattgcaagttgcaaccggtcctgaaatgtgtgatttgtgaagcaagaaaagtccttctcaaatatttgtctcattctatagggttaactagctagacagtagcctcgttactgtaaggtctaggagaggaaagaaacaaataaaacatctaatacttctctccaacacagtgtactgtatatagctctattggtccatcacagcactgtttaccgtttagtttttagtcatgatgcaatcacaacacaaatattaacttgttttcttctgggaatcagt

SEQ ID NO: 24111 - DNA, 719 bp, Glycine max
  Intron number 1 from transcript Glyma10g39190.1 (locus Gly ma10g39190) derived from phytozome v7.0 (chr-ID Gm10; pos 46916554 to 46917272 reverse strand)
caaaggtaaatttcttcattttaggacaaacgatctttcacacttttcaaatttatttgtttatgctttttaatgactaaggtcctcttaataagaacttgttaaaaaagaaaagaaaattcaaataaattaaacttctcccataaatatttaaagttagataagttaaagtcagattttgaaaaggcacacaatagattgccttatgcataatttaattttaacttgtaaaaaaacacacacacacacacttaattttaggatttttttggataaaagttggaaaattgtttttataaatttcaatgtatatttctggatttcaacatacaaaacaaagaaggaagggattactgctttgagagtaaaactattttttaactctctccactaataatatccaactatctaaattttctgaaatttaagttataacaaatgttaaatttcattatttgtattaggcttatttctatgtttattaacgataactaaaattgtaattacagaattatttattttaatctaaacttcaaaatatttaacaataaaaagacatataggaaagtaagttaaaaagttatagaaaaataaagtgtaactcatcctagattttattcttaatcttgtttatcaattaagctaattaattaaggtgtgtgacttttttgcctttacttattttgcagcctcgggttcaccactccctgctcctggta

SEQ ID NO: 24112 - DNA, 576 bp, Glycine max
  Intron number 3 from transcript Glyma10g36410.1 (locus Gly ma10g36410) derived from phytozome v7.0 (chr-ID Gm10; pos 44577327 to 44577902 reverse strand)
tactttggaaaaaggtatatactatctctgtaatatctggctttgttttctgtcttaacaatttacctcagcttctgtctgagttatcgtgaggttgagagtcaagcctttcacctcagcctatgtattttctcaaccagtgggaactgggaaaaggattttgttgctgttttccatcttatcaatttctgctgaggtgctgatctatattgaaaagacagatttgcatatttaatataaattatttctttaatgcacgcacacacacaaaatattatagaattttgatttatcaagatcatgctacaatctatcaattatagatttctattttagtaagtatttttttatatatcttcagagcttgctttgtaggtgacgtatgatagatccttcattatgtgaaattcccatgattatttagttccatatgatagatctttaaagcttttttctgttttttattccctatcattttgctgatttggttctttacagttagatgcttattgaattaaattccatatgataaataatattagggttttttgacttcctgttaaaaatacaggtttt

SEQ ID NO: 24113 - DNA, 339 bp, Glycine max
  Intron number 1 from transcript Glyma10g07440.1 (locus Gly ma10g07440) derived from phytozome v7.0 (chr-ID Gm10; pos 6134680 to 6135018 reverse strand)
cttcctttacaactacaactacaccccttatccaggtatttttattatttattttatttttatcaaaacactatctactcttgttcttaagcattgatccttttcctagaatgtcatctagttacattttttcttattctttttcgttttctttattcctcttagtttattgtttatccgaaaatataaggttgacttgacgatggttgtgaagggaacttaaaagtgaaggagaaaaggaagaaagagaggttgctgaattcaaatttcttttattaatatatttaacaaaactaaaaactaaaaactaacccgtttgaaatgcacttaacttctaga

SEQ ID NO: 24114 - DNA, 859 bp, Glycine max
  Intron number 1 from transcript Glyma10g23670.1 (locus Gly ma10g23670) derived from phytozome v7.0 (chr-ID Gm10; pos 30125216 to 30126074)
gaaggtaattgttgaatttcggtaatgcttgttgttggagactctgaatgatcgtgtaaacttctattgaatttagatttttttttaattatacgtgaatttagtttttttgtttaaagtttatcggaggtggctggtgcaagtttttatgaatgtttggaaataggaattgaagtgaaaaactgaaaatcaagtgaaatttttgtaattatcagtgaaaacagaaactatattttgtctttgaaccgaataggtcctcagatagtggggccatgagggcaagggattgaaagctagggagcctgtgggaaaggaattctcagaatatcatatttgatgattaaacatgaaaaatgagtacaacattgctcttatttattgtgaatgatgaacacaagagtgaacaactgattgccaacattattaatatctctgttaacttgtttatagggttggttgtgttaaatgaatgaattcaatagaaatgcaagcaatgggggatggtgatgttcttgtcttttgttcattttgttgggattaatgttatgtgttgtcaagaagcatgagtttctatggttattggggtcgagttgaagctttatttgaagtggtgcttcattttgattgggatagatgggtaatttgaatattgggattctttctttggttcttccaagtggtgtgtgaaagtgacaatgattttttttctttttttggtgaagatgatttaacactgctctgatttttttatatttggcataactgagtaatggttaggtttctttttattgttttgcttcttggttttttatcctttcgatttcaacagcagcccaagcagaaatcccaagtacagtgg

SEQ ID NO: 24115 - DNA, 602 bp, Glycine max
  Intron number 2 from transcript Glyma11g10790.1 (locus Gly ma11g10790) derived from phytozome v7.0 (chr-ID Gm11; pos 7662044 to 7662645)
agctgtggttccgccatccaagtctgccaagaagggtattgaaatttttctctatttcgcagctataccgtcgtgctttgtttggtctttttcgattattgaatgtttatactttatattatgaatgaatgttttggtttatgggttgtagttattggcatgtttggttttcagttgggaggccctgatagtacgctcggaaagtaaaaactgaactagccttttgtttggttttcagtctgtttctgttgtaaactgagttttgattcaattttgccttgaaactcagtttgcaatggaagaaaagagctggttgttttttgtaaactctgtttgcctaatggagtttaatcatgcaaactcaaatccaaacatgcaccaattcttttatcctctgtaactggctgattttttttatttctattgtgtgttgtagtaatctttattaatttgtgtggtcacggcaaagccttgttagtattgttaacatgcctcacaaacacaataaattgatatcttggactttctttttgttcttttgttaatgattgtttccttggtttattttgatctttatgcaggaggcaagcgacaagctcaag

SEQ ID NO: 24116 - DNA, 558 bp, Glycine max
  Intron number 5 from transcript Glyma10g11840.1 (locus Gly ma10g11840) derived from phytozome v7.0 (chr-ID Gm10; pos 12302310 to 12302867)
tgtttactggcttagataatctcaaagaaatgtatgttttcttcccgagtcttttgctattgcattttaattgagatgaaaggacaagtgattcaatcagtaggaaattttaggttcctaaaacctaaaccatttccatagataggtttttctgtttgttactaatctggaatattctggatctgtatgatcaagtgatgaagccaatcaaaacctcaaattttcataattcacaagggaaagagtagaatgtgcaatcaatataaactacataaataagccaaaagacagatagcataggccattaggccacataatcattcattcctcttttagttggaaatgcacatgaatatgatagctaggacttgagaagcacaagagcaagtaaagctctaatattcgactatataattgaaaattagattgagtcgtgagaaagtgaggcaacaaaatttagatgttttgactgttgtttagatctcaatctgtcaactaattaaggatgaattcataccatcagggacctttcgtacaataatttcacaggtgatctgc

SEQ ID NO: 24117 - DNA, 505 bp, Glycine max
  Intron number 2 from transcript Glyma10g12530.1 (locus Gly ma10g12530) derived from phytozome v7.0 (chr-ID Gm10; pos 13677756 to 13678260 reverse strand)
acaagtctctgtatgttgttatatacttacttatcttcataatgaattttcactaaccctttcgattatgtccgtgtttgacaagctttagacaaataatcaattcattgagaagaagcttatgtttagggaggggatctttgagaagtcctagggcaattttggatgaagtttttttttataagcattcttaggagaagaaaataaggacagagtgaaaaatgcttttccctaagctaaaattagtttgtgcataaatcttatacagaagctaataatatgagagtgcttctacaaattagctaggataagtttgtttttgacttggttgggtggagataagttatgtggacagtagtaattgattattttctaataacggaagatgtttaatttaagttgtacttatgttacatgtcttgaattgaggtggctgggtgactgagacatatgccttttgcttgatgcagttgtaagtcgtgtggtcaaacttctaaacattgcc

SEQ ID NO: 24118 - DNA, 573 bp, Glycine max
  Intron number 1 from transcript Glyma10g32390.1 (locus Gly ma10g32390) derived from phytozome v7.0 (chr-ID Gm10; pos 40874378 to 40874950 reverse strand)
aggtgtgtttgaggctggatttgaagaactttccagttagttatctcttatcttgaagaatcattttattatataattatattgaatattccagctcaagtggtttgtggatattgttctttgattttatatatgcttttttgcaaccttattattattcttcagtcgcttttctttgctcgattggaaaattttcctcttttcttttatgtgattttaactggcggtctttaaattggtgactgagacatgtggggatgggttctctctgagtaggattttagattgatacctcacacaaagcaaagtggcatcaagttggactttcattataagctacttgtttgttggtcgactttggtaatgatttgaggctcttatcccatgttgctatagatatctttatatttttttcccccaaaaatccaagatccaacctttgcttctaatatctgagatatcaatcttcatatatttgcttttggtaaggatattgattaggagaactcggtgttttttgttttattgggtgtgtcagaaacttgttttaaggagaagctactgagagagctg

SEQ ID NO: 24119 - DNA, 738 bp, Glycine max
  Intron number 2 from transcript Glyma10g03780.1 (locus Gly ma10g03780) derived from phytozome v7.0 (chr-ID Gm10; pos 2817028 to 2817765)
agaagccactgctatttctctttgccttcatacgtgtaattaaccgcttttcctccttcttaattcatcttttctatacgaatatgactcttctaatatatatattcgttcccttttgttattccccccccccacattctcatgtgaattttctctaattttgattgttttctgcgttttaatttccctttcatgggggtggttattgcgttttttccatttggttttgctgcttcttttactcgcgatgggggcgtatttggtatttgtttaattattacagataagggtgtttcgtgtttggtaattaaatgcttttgaaaattctattttcactcctatgtgtagccatgtcacacaccatcgagaacgtgattgtgagcagtactgtgactattttcttgtgtcttcacttttctagtgttgttttagcttataaacatcacctatccgtttcttgcattttagtgcctaaaaagatataataggaaatcaatcgtattcaagtctacaaaccattcaatagaggcctttcttaatttacttattttcttatgccaataagacttaggagtatatattgtatggaactatgcctgatggtttttcccctggacaattttcaagctaattgtttagagttcgatgatgtaaaatttgtgttccttgtgaatgctttataggtgactagacatattgatcctatggaattttatacagtttgcaggaagtgcattt

SEQ ID NO: 24120 - DNA, 437 bp, Glycine max
  Intron number 2 from transcript Glyma08g47310.1 (locus Gly ma08g47310) derived from phytozome v7.0 (chr-ID Gm08; pos 46197497 to 46197933)
ttgacgtattgaatcgccataaacaggtgcctctcttgtctatgtttatctgtaactgctattgatctctttatgttttatgataaatttttctataagcatttattagagaagaaaataagaatataaaatgaattgagcttgttcagttaaaatcaacttatgtacttcagcttttatagaagttttctctttaaacttctccaaaagttgagttactaagttgattttagatttaacttattggagaagctcaattaatattatcttcttattttcttctcctataagtgcttgtggagaagtttatccaaacgtgccatagtctctactcttttgagttttgcactataggctataaccctctttagttctgtttcttatatggtttattttgatttcttatgagctttgttttttttatgtagaccccgttg

SEQ ID NO: 24121 - DNA, 290 bp, Glycine max
  Intron number 2 from transcript Glyma08g47470.1 (locus Gly ma08g47470) derived from phytozome v7.0 (chr-ID Gm08; pos 46322553 to 46322842 reverse strand)
aaagtctaagcaattgggcaactccaagaattaaggtttgcatctcatatccattttgtctttttttccctttatgctatgtatatgttgtaaatcttgtatgtgattgtgttcaagttcaactatcttagaaactgtttgatttcatcttgcaatcttacataaagtgtcatgaacttgttgcagctaatcatatttaataatttgtttgtttctttaagctctggttggttattctttgcatttttttttcaggagttgcttttctcattaggctccattcagttctc

SEQ ID NO: 24122 - DNA, 652 bp, Glycine max
  Intron number 1 from transcript Glyma09g02590.1 (locus Gly ma09g02590) derived from phytozome v7.0 (chr-ID Gm09; pos 1771052 to 1771703)
attgctttgttcaagtacgtacttttttttttccttccaaaatgccctgcatatttaacaagattgctttgttcacctagaaaaatgtgtttttttcaacgatcttacgtacgtttgtttggtttgaaaaataaatcagaaagagatcaagaaaatagctagaaagaaagcaacgtttttttaaaaggtatttagtgtgagaaaaatattaaaactgaagagaaagaaattaaataagcttttcttgaatgatatttacatgtcttattaacttaaagtcaccttttttctttaagttgtgcttgaagaaaaaagatgtctttcagtttagttttgattaatgctaattatatttttaattaattaattaatactatatatctatttaccatattaattattactatatttcatgatgacaacagacaagtattctaaagaggtatcggtagatgattaatttttttataaaaaaatcttttgcgtgtatagatattcttttataattggtgcagaaacttgtaatgctaattgcaattaatcttacattgattaactaatagctataatcaatatttaggttaggtataggagacaaatcaagtgatctgaacaaattaagttgttatatttgcattgtgacagggttgtg

SEQ ID NO: 24123 - DNA, 807 bp, Glycine max
  Intron number 3 from transcript Glyma11g05300.1 (locus Gly ma11g05300) derived from phytozome v7.0 (chr-ID Gm11; pos 3709956 to 3710762 reverse strand)
atagctctatcaggtaatgcgcgtgctctgcactttccagccaaataattggattctaaacatgtgtcttcactcttcacacatgatctgtgttccccagtgaatcccattattgggtttcaaagtaacgggtacattttatgaatttaaatttgatccactatctttcaactcccaatcatgtcttagtatgttatttaaaaaatataatcaaatctaagtatgtgaattaatcaacatgttgttaactagtttaaactctttaaataaatttttaggttcgaatattagttactaacaaaaacaaaatcagtaaatatttgtattgcttttattcttattaaatgcataattataaataaattttatacttagtactaacattggacagaaattaatcttttgaaaaaggtttcgtagaaaaattttgaatcctcttattaatctctcaacttttttttatatgagaggtattgaatattctttacatttttaagttattgatatttttatttaatatttatttataagatggtagaaagttttgtagaagaatagaacatcacttagtttagtattcttgaattgctttattaaacaagaatgcaaaatactgaataaatataacttagtgtaggattattttcctaatggatatatgaaatttcgttcttgaaaaaattcaaaaagagatatcatgggggatgaatgaaaaagaaaagtcaaggtaatcatagtttgatttctttttgataaatgattcacactacaggtgctcacactgttggattctcccattgcaacaaa

SEQ ID NO: 24124 - DNA, 741 bp, Glycine max
  Intron number 3 from transcript Glyma10g37060.1 (locus Gly ma10g37060) derived from phytozome v7.0 (chr-ID Gm10; pos 45088817 to 45089557 reverse strand)
ttgccttttgttgaacaagtaagtttttaacatatatgttacataaaaagcttctctttgatatatagtatgattaggaaatgggagttgttggggaggtaaattggatatgtggagaatatacagatctatgttgagacagattactttgaaatatggcttggattttgaaataaaatctttcccttattttatattttgttttgttctccaactaatttagaaatttatcttttgtatattattcttttttataggcttaaatatattcaaggtcccttataaataaataatttttattttaaatccttaataaattttttattgaatttgatctttaatatatcaaaacttttattttaatatatcaaaacttttattttgaattcatgtcatcagattagtgatgatatgacattatctcaataattaatatattttgaaaaaatttatttgtaagatattacattatcaataactgaagacaaagacttaaaataaaaaatattataatattatatcaaaaatttaatataatgaaattttttatcaaaaattcaaaacaaaaattcatcatttattatagatctcaaacatatttaaatcttttttcctcttattcattattcactatttatacacaaacacaaacatttacaaattattaattatgatgttatctaaaatattgcttgttattgtacaggcacctaggattaccttcgagaaacccattggaag

SEQ ID NO: 24125 - DNA, 667 bp, Glycine max
  Intron number 1 from transcript Glyma11g33550.1 (locus Gly ma11g33550) derived from phytozome v7.0 (chr-ID Gm11; pos 35358519 to 35359185 reverse strand)
cattttccggtatgcaaaaccattgaaatttgatgactccctttacattcattctcttattacatgtctcttctgggttttgtttgttttaaactcttatggtgattagggtcatacctttttatttttgaattttagatgatgggttgtgtataaatgagtggcataatccatacaagattatggttgtgaaagtttcactcttattaatatatcatgatggtgttaattggcaggaaaaatcaaaatgggaactttggtgcataacattgcatcttcctagtttatactacttccaaaaaggagttcccttatttagtgtccattctgagtttggtgtttattggaattgaaaatgaaacagaaaaactgttactccagatttcccacaaagccccttacccttacacccatttcctaattttaaggaaatgaacttttttttttctttccctttgacattgaaattgaaattttacatatttacaggttttgcacacatcattgttgacttttgctgcataggtagattcatggttgattaatttgtgaatggacaatgattttgttatcctgcaaggaagatgatatttgcctatccttactttcttgttgtttttatgttattccaggtaaactcaaacttttccgttggtatcaaactggt

SEQ ID NO: 24126 - DNA, 771 bp, Glycine max
  Intron number 1 from transcript Glyma13g00570.1 (locus Gly ma13g00570) derived from phytozome v7.0 (chr-ID Gm13; pos 301900 to 302670 reverse strand)
gatcttcgccgtgccaccgctaattctagaaggaggtaaggcaagttcaataatcataccttatttgtttttaattttttcatgaggatttaattaaatttcattgtttttttgggtttgatttcaatttgtgttgtttctataatcgtattcctcaagttcagtgccaatttgaaaattcttgccaaagttatgccgagtttaagattacttcctaggcagtaggtattaatgataagcttaacgatataatgtaactgtttttgtttgtatgtaatttcccccccttcaactctcaataataacaacgaaagggtgcattcattcagtaaaacgcttacatatgtgtttgggtgaattcattcagttaattcttgcaattcttattttttgggataatggggatacaatcatacaggaaattttgacaattttcagtcgggaatgcttacatatgtgtttgggtgaattcattcagttaaaatcgatactaaatctcttttttgttcctcctgttcaggccaatattatcttatgtcaaagtattgtttcgttggctggaatgaagagaagaataagctgtttcttcgtttgggattatgggttatttgcatcaattgtggattctggatatggatttcgcttttgcctgctgctacaatttacacgccacgtggcgtgtagtgttgccaggactgagttgtttgattcacctgtttcttggtgtttgtcataattatgcatctaaaacaattgcatatttattcaggt

SEQ ID NO: 24127 - DNA, 931 bp, Glycine max
  Intron number 1 from transcript Glyma11g28990.1 (locus Gly ma11g28990) derived from phytozome v7.0 (chr-ID Gm11; pos 29492085 to 29493015)
gagggccaactgggtatcttgcttggaaggtaagcaagcaatttgatgtttgatgtctagcttttttacttggttggatagttagctcttgtttgaaacttttaatcattgatggatgacttagttaaatgaggcattgtagggggtttttgtcatttagttaggttcccttaagtgttttgttaattggagcttggaatttacatttttctggtttgcataacttggtttgtattggtggtcttgtctgacattgctctggttttagtcaattgatgacattgtttctggtgggtttgatttatataattaggttgttctttcaagcaggaggaatgtgtctgcttccacttgtgttttttatttagaatatctagtgatgagtggaatggaattgaattagatggaaaaaaaaccaaacaattttcggttacttttcccttgctttcccttctctactattcccctttcaaatgtagaattggagctcctagtttattatcaaaagactttttggtaactagaatagcttgtttttggttgttgggtcaatttcattcagtcaaatatactgccttgtttttaaaattcaaatttctaagtcatatttgtggcaagagaaccgtgtgacttgtagctgaatttgtttttagtgtcttaagcctatgatgtcccatatgcacttaatagcagtttattttcccaaggggcaaaaaagttcaggggatttcttttctaattatcagttctattatttagcctggtttgtgaaacaatatgaagatgactaaaatgttttttcccaatgtttattgctcttcttggatacttgttgcagtttcatttcaagactatctttgcaagtgttaatgtgacagtttttttttcttttgcaggctgagggtgactatacaagcgcagttagattagt

SEQ ID NO: 24128 - DNA, 587 bp, Glycine max
  Intron number 1 from transcript Glyma12g03130.1 (locus Gly ma12g03130) derived from phytozome v7.0 (chr-ID Gm12; pos 2048106 to 2048692 reverse strand)
ccataggttgattagtttcttcagccctagttaattccaatgcattatttatttctatctaattgctccatttgttgtattaactgcatttatagttggacttttgaatttcgtatgtgctctgctgtttgtcactgtttacttagttataattgtgctcttgaagtgggtgcaactatgtgttgttaatttattgattcagtactgtgcatgagcaactaagagtgctgcaattacgcacatcttgaataaaaattgtgataaataaggttgttggacttggtggtaaatttcattttgataaaaaaggaaaatgttgtagagacaagaaaatagagcagaagtataggaggttaaaatatatccaaaacagaaaaaccctgatcccacaggaaatgtgacataaaaatttcaatgagctactcaggattaatgatgattacgagttcagatgctacaagtgttgaacagttttaaatgtatcacttgaggacgaaataactcactgcgatcacgtacttttatatgtttttttgattcttgcgttattgtgtgtttctaaatgcagtgaagaaccaccttctaag

SEQ ID NO: 24129 - DNA, 751 bp, Glycine max
  Intron number 1 from transcript Glyma09g05450.1 (locus Gly ma09g05450) derived from phytozome v7.0 (chr-ID Gm09; pos 4242072 to 4242822)
actacactgaccaaatcatcaaaggccttgctttggtaattattttatttcattatcatgaaaattattttgttaatttgctagtaatttcttgtgttatatatctgatcacctagtgaaaaattaagagagaaagcatggcaaggtgttttataacatgtctatataagagcttgattgttttttaaaataaaattgtactgaatcaaatacaggtatagctagaatagaagcaatatattcttgcggttttaattattgttcagcagatagggaccacattcttggtgacaacattcagttgtattcttggagttcgttgaagtcaaaactattttctaattgttgcttttcatgactggtgttgcaatctgttatattatattaatatgcatgtggttgttttatttgacttcatgcatgactgtatttgggttagatttttccttatagtccctttaatattttcttttgcggctaatattaataaaaatgaagtatgataaaaatccatgagaaattaatgatttgaaagtataataatttcaataattttgatttttccaaccttaatattttaaattcataataattgatttagtacttttatcactttcctcctcttcccaacttatttatttttcttccaaaagagagtggttttatttcattgtaatttaatttaaaatgacatgatatgctctaccaatgtattttttaacacttcatatgggattttggattgcaggcc

SEQ ID NO: 24130 - DNA, 864 bp, Glycine max
  Intron number 1 from transcript Glyma12g35890.1 (locus Gly ma12g35890) derived from phytozome v7.0 (chr-ID Gm12; pos 39013887 to 39014750)
gcggtcacgaccatgttttagaactttgttttttatgaatccattccagcttattcaagggagagaaaaagaagctagaaagaaactgtggggtacatagtgatgtgaataggttaaattatcttggcttggtttctgatgctaaccttctttctgcagagttttgtgaaggaaggtgagaatccagctgaaaaggtctccgaactgagtttcgaaaagggggaagaaatagctaaggtgagatagtcgctgtccatatcaaattatgaatgctgaatagaagaatgcacctttacactttttgtttatcttttccattttgaattcctcctatgtgtatcgttctaggttatatgttcagggttataatgttatttagggaaaatttgctgctttaatgctgtcagctaactgatgtattttgagaataaattttttatatataatctatggaaaagctatggtctttcttcttctggttgaaattataaaagcatttatgtgatagtagagaaatagttacaagattcacagtagaggattggtaccctgtagcaaagctatgagcaatgtaacttgctgtttcttcaaaatctgtaacacgatgttccttcaaaatctatgaggtttatttcatcattcactacgataaacatagtatgaaattttcttgaccatgcacattaaacactttagtggatcaaatacaaagagctttttaaaattgaaaacaatgaaagttatttatatttcatggctatcattactacctgtggtaggctgcactttcttcaactttgtgaaaattggaattgcaaaggaatactaattttgggtgcgctagcaaaatcccaactcccacaa

SEQ ID NO: 24131 - DNA, 461 bp, Glycine max
  Intron number 3 from transcript Glyma09g17310.1 (locus Gly ma09g17310) derived from phytozome v7.0 (chr-ID Gm09; pos 21315545 to 21316005)
tgttgagtgtgtgaatcgccttggaggtgccgagagtaagggcttgtttgattcccttttcaacttttttgttttaaaaactgttttctaaaataatttcataatactttgcaatcaatttctcatccaaaatctaacaagttttgaaaattgttttaaaacaattgttttaaagaccacaaaaacagaattgctgggagttcccatcttttgttttcatcttgttcaatctctccctccatttcacactctcatttgttccttacaccaccctccacaagctgtttgagcaaccttgtttagtttcattttgaaaactaaaaacagtttttagaaatagaaatcaaacgtaccctaagtaactagctaatttttttcattacataaaacactattcaacatctgataatcttcttggctgcttgattgtagaagcaacaccaaaagctatattaaggctg

SEQ ID NO: 24132 - DNA, 1025 bp, Glycine max
  Intron number 2 from transcript Glyma12g36990.1 (locus Gly ma12g36990) derived from phytozome v7.0 (chr-ID Gm12; pos 39983400 to 39984424 reverse strand)
agtttacaaagccccttcttttcccttcactccaggttccccacttacatttctcactttaactgtaactaaattcatgttgtattattggctagacgacccttgccattgcacaatgccaattcccactcattccgtgtatccatttgctttcaaaccctttattatgtcactttatggatgcaaggtaatgtttttttgtaattgagatggattgatcttcgctatcgtgcgtgtctaccgctgctgttccttctggaccgactaatatactgtacatttaagaacaactaaggcatgaggcatcaataccgtgttaagacttaagaaccaattgtctcaaaggcttacactgttaagtgttaagctatgaagcatggattcatgaattatttgtgtaattgtctcaaaatctttttaaaccaaccttctatattttttcaagtgtattagttgtgtaaatgtgacagcttaagtgttcaagccaacaaaaagtaatttttgaaccagacacttaataagaagtgtcaaaaaggtgtccaggtgtgccggtgtcagaaacgtctctgacacggcgacactttgaacaagagagattttcatgcttcataggtgttaagtgaagccatgtgatatgaatcaatgactctattacacctcttatcaatatatatcaaatgactcttcgaaaatttcaccaagctgtttgaattctcttactataatttaacactggtttttcattgcttcatacattttaagctctagaattacttcatctactattgaatacatgcactgatgatgactttcataacttttcatttaatgttaataagtcttcatttttttaaaccattgaatgtaattgtgataaatgttcgaattaatctcagctataaattttacattggagtgtgtgtcacagtggaaaatttgattttgtgttttccaaatggacagtaagtcgaatcccaatgtagaatgtgctgaattctttgccccttttaatatggctggcaggt

SEQ ID NO: 24133 - DNA, 590 bp, Glycine max
  Intron number 1 from transcript Glyma11g34430.1 (locus Gly ma11g34430) derived from phytozome v7.0 (chr-ID Gm11; pos 36265278 to 36265867 reverse strand)
aggtccaaatgttgcctttattattctctcttccaatttacccaaatgggtgttttcggtttcaatttggaggattttgaattagcttcttttttttattagacaaaacttagatgcagttcataggtgctctggtgctgttctgccaagagaaagagttctacctcagtaatacacgtaggaggagtgctagcaacacactcttaacacacacactttattattggttgaaatttattgaaagttacaaaataagttgagacccacattttattttatgatttccaagaaatttcaaccaataacacagaatgtgttgaaaagaatttgttgctaacatttctctatatgtaaataaggtttccattaaatgtcaacatggtttactgaggtgaaactctaatttggattagagaacagtactaaaacacctacacaacttcatttttcctttttattttaaggttttcacaagtacaactaaccttacccaatgacctggtgtgatctatatagctgactttggtgggacaagactttgttgttgttatttcataagcacaaggtttatttttgtttcttgtgtaggt

SEQ ID NO: 24134 - DNA, 927 bp, Glycine max
  Intron number 2 from transcript Glyma12g01020.1 (locus Gly ma12g01020) derived from phytozome v7.0 (chr-ID Gm12; pos 560668 to 561594 reverse strand)
attgggttgaagtcaaagttcctgattctccttcgcaaaccaagccctaccccaattccgccaaaacctctgtgtcccaggtattcattccattgcacctcttctccttcagtgcttattattccgaataaatgattgctcaatttggttcgctctcgtttaaattagcaaataaatagtacgcaatgaatgtatattccctataagggagaacacaatgatgcatcaatttagtatcgggtcatgcttaaattacactgcttctcttgatagatattaatacatgctatgttttttgcaacttcaaatagtcttgggaacaattttcttcactctctacatcaatagcagcagctagatttgaacccctactattgacttttaaacttcatgagatgatcatggacaaagatgatcgtaaggtgtttgaaacattattttatcttttaaaatcctaaaattgatagtaggttattcaatattggctatgctatggacaagattttgacaaagtcaggaaagaattctttggcgggctctatcatgaaaaatgaaggttcattttatcaacatggaaaacaaagtattttttttattggcaaatgttaattgttagtttttgtttgtaggagggatcaaacctacgactttttccttctttccctccttcttaaccacccacccaaccttgatcaaacctacgactttttccttctttccctccttcttaaccacccacccaaccttgtatcttctggaaaagaaagtattacatttcattatttttaaaattaaaaagaatgcaagcatacctcaaatgatgcattattctcctagcttttagattctcatgtgccacattagatgatggtatgttagtttgattttctgatttctgtgttctttcttcctgtctccaggatcttt

SEQ ID NO: 24135 - DNA, 461 bp, Glycine max
  Intron number 1 from transcript Glyma09g30050.1 (locus Gly ma09g30050) derived from phytozome v7.0 (chr-ID Gm09; pos 36957838 to 36958298)
cattttccattcgtagacgccaagaaccctaacaggtactgcccttctcgctctgctcaaacattctcttaccctcttagttttttcttcgatagttgaaatgggttttcatcaaaatcctttttttcctctctctttttctcatttccccactttcattttgaccttagattttaatgatctgtttggtttttttacataaagatatgattttttcccacttttttcatggtaaaatggatcttagatcaaaactcagaagctgaagcctttggggcatgaggttttgcatgtctacatttatgggatttgtgtaatttacccccttttctggtttgactttatctgagctgaaacaaaggtataggtcagaaaattgcattctgtttgttttagttttttttgttctatttttggtattaaactttgtatgatttgaattgtgttggtttgttaggaga

SEQ ID NO: 24136 - DNA, 905 bp, Glycine max
  Intron number 3 from transcript Glyma10g09370.1 (locus Gly ma10g09370) derived from phytozome v7.0 (chr-ID Gm10; pos 8504628 to 8505532)
gatattgaggaacttcgcttctggtgtaaatactggtacatgaaatacgtttctcgccatctttgcgattaaaattctctaaactcttaagtttaagatgtcggataatgaaaattgcaattatgatcgagacttataattattaatgtagtactggttcaagtggcattgttgttttcaaaattacggaaattaaaagcaaatgaatgtgacactagtgcaaaccgcattttaaaaccttaattatgatggtgaagaaattttaaaagggtacatatttgctagaactataactatgaggcatacatcaatgagtaaagacttaaaagaaaatgaaaagaaacttattttgaaatatccaaaatgagaccaagtgtctgactcatctatcaaagatgtgaattcgaattctgttattcatgtgagaaagttgtcagttggtgagtaatttgaagttacaactttaatccatcttcaaacctttgaagtctggttttaatgtcggtgagtctccggaacccaaactcaactaaacttttatacaccaaaaattattcaaaccgaggccagtaccttgtaaaagcagaagaaacagaggacagaaccagccaaccagcaccatgataatgaacttgtatgatattgattattgagtgttcagcataccaatcccacccagatgctaaacatgtccttttttttcgtgcaaatggggttaagaataccagaaaatattgattgaaaaggaaatgaggaaatcatcttgtttgttttggtcatgcatcctattaaaatccatgtttaattgtcatttagcattgctcaatttatataactttcgtttaatatatgcacatcgtttaattgcaggatcattgtggcacttttcactgtacttgaaaagt

SEQ ID NO: 24137 - DNA, 717 bp, Glycine max
  Intron number 1 from transcript Glyma12g11150.1 (locus Gly ma12g11150) derived from phytozome v7.0 (chr-ID Gm12; pos 9151061 to 9151777)
tctttctatccagattacgaagatttcggtcgccagtgaggttacttattcacttgataattccaccttcttttttgtttttatttatcaaactagaacttatatttctatgcacactttcaaaaaggattttctgtttggttacttttttttgggtaaaataatgtcacttgtttcaacctttgacttccttgagactacattaacttacagttgtttgcattgcatgtgatgtttctttaaatttgcattttaggattgatgaacctctagaattgcataggtgaaacatcatgagtggattgaatattgataatattaacacatggaaatggctttgaagtggtgtttaattatgcatgccttactaatcaacatcatgtttagattagcaattttggttatctgtttagaatgcaatcaggatgctgagaaagtgtatgttttttgatactgtcccgcaatcacaagttattctgtcacataatggtaaatttgttaacttttatagtaactattttaaaaatcatcacttagataatgaattatgattgattgagcatataaaattttttacattggtagtgtatgaaaattaaacttatttattggaggtgctcttctgaaatgaatattggtatattgcatgtacaaacctttggttttgtttctaattttgcaggttgtgattcaagtgctattttagcattttttttt

SEQ ID NO: 24138 - DNA, 969 bp, Glycine max
  Intron number 2 from transcript Glyma10g24540.1 (locus Gly ma10g24540) derived from phytozome v7.0 (chr-ID Gm10; pos 31968629 to 31969597)
tgattaacaagaaggttaaagaggtaattctccaatgtcttaagggactaaaatggcttacctgcattcttaagatggtggttgatgttgcctttttttttttcctttgcctgaattatgattgttgtgttttgtcagttcctctgttttggagagacttcttatatgttaaaaaaatcataatataggtttttagagattttttctcctgtggaatttactattttcatcttctaagaaagcattaaaatatatttttttgaagaattttcataatgactataaattctttaaacatatttttttatttaaagtaatttgttttttatttttaaaaatactaacaaactagccctaaatcaagcacacttctgaattagttattattttttgacagaaagagaagttttattataagaaatcctccaaagtaaaggatctaaaaacaagaaacggacaagaaaaaaaaagtgttaatatactaagaaattatctagtttttgaatagtgacggatgggctctgacaaaagtattttttattctgtatacaataaccataaatatgcagtaacaacattgaaagcctttttctactaggtggattggtggaatggatcaaacaatgctataatgtattatcataaatcatgtgattcatgactaatgactttgcatacagtaaatatataaatcaactatattacaatactattaatgaattatgtaagtattattgtaaatttttgttatatatctaaataatgaataaatagggctgtatacagaagtgttctagttctgtactgaagagcttatggcttgagcttttgttatgtatggactatagataaatatttaagcttctctgaaaatagtaacagtttctttatatttcatagtctttgttcaaaaatgcaaattttgagattacattttggttattcttttgtcctctttccataaccaga

SEQ ID NO: 24139 - DNA, 817 bp, Glycine max
  Intron number 1 from transcript Glyma11g36610.1 (locus Gly ma11g36610) derived from phytozome v7.0 (chr-ID Gm11; pos 38025438 to 38026254 reverse strand)
atttgacattgagtggaaacccaccttcagaaaaggtcggttcagcttcttctccttctttttcaatagctgattattacaattgctgcatttaggtaataataatgatgtgtatttgatcaattggggtggaaaggagagagataagaagaagaaaaggtaagaagataaagtgatagatgtgattagtgatgtaatggaaaaagaagagagatgtaggaagaaaataggggtggaaatgggatggaagtgaaagtgagtatatgttgagtattctctttctgatattggttatgtaagcaagaagttatgccagttgttatccaattagtttaggtctttgaatttataatttttatattatatagaatagaatgtttcaagtccagaatctgatccttgctcaaacttatagaacgttggtggactgtcttgatgaggaatttcaaaactcatgggaggcagagcctctctattttgtgttgcaaattgcaatgtggatgaaggtaaagacatgctgtttttttatctgatctgaggtaatgacatgatttgagtatttgggggcggggggattaaagttctaattccaactaattgtttgggtttttactcctcatagtttatgtgttttatgtaaatgctttgttcacctattgtgagagatgaattgcctacttttctgcagcaaaagagccttcccttttgcccctataaagcattaattcttaaaaaaaaaagattgtcttaacttatattactgaaatcattattgtataaaacttttataggtgttccacccggaaaggtagcagtg

SEQ ID NO: 24140 - DNA, 838 bp, Glycine max
  Intron number 1 from transcript Glyma10g44210.2 (locus Gly ma10g44210) derived from phytozome v7.0 (chr-ID Gm10; pos 50683906 to 50684743)
cgcattgacaaaccctaacatagcatcatcctaaggtaatttctctctccccttcttttcccctttaattccgcttctcttcattgcctaattttggttcccctttcccctattcccctctttcccgtttcctcactttctcttttctcttcatttccttttgggcctcttcgggtgttctgcgtttttgcgaatccgatttggcctcaattccgccattcctttttggattcgtctttttttttcttcttcttctttttcatggaccgcagagtctatcaccatcgtcctgctcctccggtaataattcatttatttcactgcaatttcttcttatgtggttttcctgcttcaatcacttttattttaaacctgttgtcttttataagccgttattaacaaattaaacatgtctagttctgcaatttcatttctttgatttatgatgtttttcaacgatatgtgatcaaggtgatggaaaaaaatatagggcgggaatgtcgcaagtcttttctatcagcttatctcgggcatggagttttcatgcattgcgcgtaatcaatgaccgttatgatctgattctctgaaattcacgccattagcatccggatttatttgtcactaatcgttaatttttatgaagtaataattgtgttctaaatcaaatagctggcaatgagctcgtatttattactttttaatttaatgctgaaagtggacctatattccggatatatgttaaaaacataccagtttgaagagtttctaaattatattgtttttcacgaataacatcacattttggatatttatgcttcttgtgatgatttgtaggcac

SEQ ID NO: 24141 - DNA, 447 bp, Glycine max
  Intron number 1 from transcript Glyma12g02210.1 (locus Gly ma12g02210) derived from phytozome v7.0 (chr-ID Gm12; pos 1369298 to 1369744)
ctactctaagatctgcacttcacacacttgtttctgttagtgccccttctctctttcctactccatattctcttattgtcttcatttcaacattgactaaaagatcatacaatatgatcaaagcagtttgtgatgaggtgtttccaaatttagctccggggaatgtcttctttcaactttgctatgactttgtttgtctcatatatgctgcaatttttaatgtttattgtccaaagttttgaaagtggggtgggtgtttattttataggaacatttgaattgaatagtttttgtcacatttgatgcattatgaattggtggggtaattgtacttactatagttttcagtggtttggcttttacttgtcttttcttatgatttggaccttctgatctttaacttgcgatgcggaatgcagggaagaatcaagatttgtgaagggaaga

SEQ ID NO: 24142 - DNA, 921 bp, Glycine max
  Intron number 1 from transcript Glyma11g21530.1 (locus Gly ma11g21530) derived from phytozome v7.0 (chr-ID Gm11; pos 18552167 to 18553087)
actttagcaagctccatctatctccctgattaaaggttctctgtttctctctcactctctctctgtgattgttctattatttatagtggttcaagtgaagattatgaaatggaactttgcatgccttgtattgattcagcacagtttggttttatatattgttttttttttttgtttaattattttgtgtgtttaaaatgttaattgaaattgttatatcttcgtctgggttgttgcatttggctgagttttagtttattggttgtggttatacagactttggtgatcaaaaactcgagaactgtgctatgtatgattattttttcttcttttgattgaccattaatgatagaagtattattttgctgtttttaaaaaatatatatatactcctctagttttggtatttttccagtcatcggatcctctggtttcataattgttaatgtgtttgaaaggtggattgcattttttttggtttctatgatctaacttttggtcctagaacttgtttaaagggtatccataatgatgcttagaagtcttaattattattattagtattttggttgaattatggtttggcttatttgtttaggaatttgccttgtgattgtgggatttgtctgtgtctgtgtgacctgctgaacaaaaaaattcattttcttgaagtcatggtctattattctgcattatgtatgttgtaagaattacccaatttacgatttcatccacgacgtgagaattctgtaattaaatctatgctatgaattccattctgatgcttaaaagtgcagaacaagtatctaaatattatcttatgtagttttacctctctacttcaattttttcgattgaagagttttatgcatactggatgaaacaggttatctctaaggtcctaaacaatcctctttcaaa

SEQ ID NO: 24143 - DNA, 891 bp, Glycine max
  Intron number 3 from transcript Glyma10g42010.1 (locus Gly ma10g42010) derived from phytozome v7.0 (chr-ID Gm10; pos 49026197 to 49027087)
gttctagcacgtgtacctataattgagaaccagaggtaagtccacgggtttgatgttattttccacaaatgtgaagcagattgatggctttctggatctcctgcttcactatcttttactagtgactatgcttttctcattacattagaggttgaaactaaagtatttgtaattacattgtttctgaatcttcaaagggggtaaaatatatatttttgaacatagtttttagaatcttatgattcgtgatttgactttgatatgatttggatagccaatgatttgcatcaagagatgcagatgattatgaattatgatacatggctgaatcaatgcaattccatatttacaattcatcaaattttgtttttaattttaattttttatcacatattgttttaaaattaaatgaaaaagttataagcttaaattgttaaaagaaaaaagaactaaaggagcactactaaacacatcctatttgattattcagatgttttagtctcattcttctaaaaccggagtttcacactgtcactctctcattctatctattgtatttggttataccattgctgttttaagtctgattaaggcttcaaacactcagttattactcatggttttgttttgtgaggcttttggtcattttcttgtttaaaattattacattgatcatgattcatcatttatatgatatatttaagctattctttgttatgtcttaaattttataatttgagagaatattcattttcaccactgaattgagttttcaaacagttgctcattttcttatacaatttatagcaaaacattttttaagtcaaacttgaagcctttcttctccacataatagggagtgccccacagaattgcgagaagccattgcaa

SEQ ID NO: 24144 - DNA, 912 bp, Glycine max
  Intron number 3 from transcript Glyma09g12420.1 (locus Gly ma09g12420) derived from phytozome v7.0 (chr-ID Gm09; pos 13186199 to 13187110)
ccattgaaggtaaatataatattcacttttattttatgtttcagattagaactttttactttgctcctataggattcatgttattgttatggcttatgaatgtaggtatcatcagattttatagtaaatattaaaatttgagaatatagggtgctgataaattccattctagggacatcagacttgttccgatgtggggcaccgtctgcttttgcttccctgttgtattttttttaatggcagtggttttgtgaagttttgaagtgtcatttgggtacatttgttgtttattaggtgaagtgtgttgatagtaatagaattacttcatagctaagttaggtggctgaatcctgagcatagaaagctgaattgttaacctagccctgatttgtttttggaatgtgtaaaacttgatgatgcatttatattgatgtccagtgtcctaagttgctgggaaagtaattcattggacggggcttggtgtttaaatgatatgtctattatttcttaaattatggtgtgagactgtgaggagaaatattcattaatatattttgtttttgataagttggagtttataatgttttatattgcatggatgctggaacaaacatgttgaggagaggtgagattgatgtgaagaccaaagtttataatgtgattgatgttgtgttatgagaactaaaaattgtttatggatatgaacatacacagttgtgatgtgtcttttaagtgtctatatggtgattggtgtcttgttgctcataacataaacttgtaaccttcaccttcactattccatttgggcattttcttctgtctatttggtgacttctgtttccaaatcatggtcctgctttttttcccccccatacaggaacatatattgacaagaagtgccccttcactggc

SEQ ID NO: 24145 - DNA, 1025 bp, Glycine max
  Intron number 1 from transcript Glyma11g27480.1 (locus Gly ma11g27480) derived from phytozome v7.0 (chr-ID Gm11; pos 27285524 to 27286548)
gccaaaagggttcgcgtccttgagctttctcgcaggcaatgattctctcttacttgccttcttatatacacacgcaccaatatcaaagaaagaaagaaaaaagaaccttgaattggtttctttttttttcaaataccctttacttaactttgatgttttgtattcaaagtttcttgtttttaggcatgttttccctgcccaaaatcttccccagcttaagttttctaagctaattaaattgctaataatgagaagtgagtgattatggagaatgaaaagtggaaaattcagcatgatggtgatggtaaaaagttgtgactaatatactgaaatactattattaactagttgtaaaaagttattatattatatacactacaaggagacaggaaaaaccataaaaagggcggggcttataatttgtttcctttttttaactgtcatggtggtacttctagggaaaaaattggtggacactaatattttagttaacacttagaaagacaaaaagagaaaaaaaaagtgtgtaataagtaatatgatgtgataaaattaacaagtcgaaatatatgggaggtgaaagtgtctacatattatcatccattttcagtagttattcaatattttaaaagggaacgacttaaacatacgcaagagttaaaattataattattgctttaacattgggaccagtatccatcttttagatgtaactagtactactatttaaaggataaacatgtttggactttgacaagttaagtggattctagaataaacaagtggcatgtggggtccaccttgctgtgaaattattggtaactttgtggaagaaaagtacaacaaaagaacaaacaagtaacaaaaggggttaatttgtcttgaaattgctaaaggaaattttcaagggtcagcagttaagaaagtgcagtttgaataaggagttataataatttaccatttattgttttgtgtttgttgatgtcacagattgaagcaccgtggtcctgactggagtgggctcc

SEQ ID NO: 24146 - DNA, 494 bp, Glycine max
  Intron number 1 from transcript Glyma11g15180.4 (locus Gly ma11g15180) derived from phytozome v7.0 (chr-ID Gm11; pos 10884354 to 10884847)
tatcaggtttgaaggtggagggagactgtaaataggtatgaatatttggacatgctaagttatacatgaagcacccctttaaccacctcactttgttgtaggtttgaatagaacaggtaagagttgcaggttacggtgggttaattacctccaccccgatctcaaacgagggaagctcacaccccaagaagaacacctcgtcatggaccttcattccaaatggggaaataggtttgagaaccatgcagaaataattaaactataagctacctaccttccaatcatcatcactcataattttaattaattttttcctaccatacagtactattagtattaattagttctttgtcttatgtttttttttttatagaataggatatcaaaagatttataataatttatatacattgagctagatcgtttgacaccttattttgttaattagttactttgaatttttttccttaattactttgatgattcctttgcag

SEQ ID NO: 24147 - DNA, 758 bp, Glycine max
  Intron number 1 from transcript Glyma09g06400.1 (locus Gly ma09g06400) derived from phytozome v7.0 (chr-ID Gm09; pos 5153351 to 5154108 reverse strand)
ccacactccttctcttgtgcacatcaggttttgttttgcatacatgccttaatttcatttaagggtagcgcttagttataggttttttttataatgcctaactacatatttatatcattctttttactgcaacatatacaatttttttatcatatttatatgttaaactgttttttttcatctcatttatattccctttttcttcatatctctgtcgtatttatcaaattttctctttttcatttatttcttccttctatctctttctcccctatttcatgcactccacgtataacatattcctttttaaattttaggcattgtcaatcatataatttctttagaactctaattaaagaataaaaaaatgtaataaacatcttttttaacatgtaacattgaaaattacagtttaacattttttttaaaaattttgagtcttgttaatcgatgtcctaaaatagattaaaaaaatggagaaataattttttttattaatagagttcattgaaaatcatcaaagaatgtattattataatattttccaataaaacatttctactttttgtttgtttaggaaatttttcttaattttatctaacttgtgacatgtacattgcttcatcatgattgttatggttttttttttccttttatcggcacacattagttttgttactacaagaaataaaatttatgactttttttcattattcaattcatcttatatcttgatgctgtgattgtccgaaggtatt

SEQ ID NO: 24148 - DNA, 420 bp, Glycine max
  Intron number 2 from transcript Glyma10g39420.1 (locus Gly ma10g39420) derived from phytozome v7.0 (chr-ID Gm10; pos 47091302 to 47091721)
ggcttgtcttgcttggagagagagtgtcatcactggtatattccactacttgttcttctttcttcttctccttctccacttcatccccaccctttgttcctttttcttgcaaaagtttttcccgttgtgaaaacaagccgacttctctttttgttttctctcgcccaaagaatcttgctttttcccttccctttgaacgaaacaaacgttaaagtgaaacgcaccccactagtaatcattaggctactctctttttttctcttctttacctctccatgcctccaaataacactcaaaaaatgagtactagtacttgtctttcattaagttttctgttttcttatttttattgaaaccatggaatgtaaaaatactgattttcattgatgaggtttttgaaaacagatcacttgatagcag

SEQ ID NO: 24149 - DNA, 814 bp, Glycine max
  Intron number 1 from transcript Glyma09g34100.2 (locus Gly ma09g34100) derived from phytozome v7.0 (chr-ID Gm09; pos 40532981 to 40533794)
cttcaaccccaacaaatctcaaggtaaactaactatctttccctctcccctaatttctactctctcttttttcctaaccctctttctttcagatcattgacctctacgtaatctatgccgtcttcaccgctctcatccaggtacttttcgctcattctttcttgtcattcgggagacaaaacccttcattgaattcagaagatctcctagttgtttgttttcaaaacaattcttaacctcagtcgtagatttggatgattgttgactagtgtggagttgttttaggactaaaaactggaagggaagcaaatattcttcttaggccatttctgcatctgctgaatggaaggaagattcatgtttttccggataaccaaagctcaatgaatgaatttgggtatttgatttgcctctgatgtgtgtttactggaaatggaaagcggaatttgtttgcctttaacttatacaggctctaaaatttgcagtcataaaacactctattttgacctttttttagaggaggattgcaataagcaagcttgtcatagacgttctaggcttctagcttaactatatagtcatagagtgtggatccaggaagttcctccagaaatttgtaatcttggtgctttatttgatattcgtctagtttctagtttaacgatttcctccttcaacattagaagaaaaacgtactggtgaaatcatttattttttttgtgagggctcaaggttgtttagtgggtttatgttaaagttacatttgttgaaactcgtgttcttatttttttttgtctgtgaataggttgtttac

SEQ ID NO: 24150 - DNA, 662 bp, Glycine max
  Intron number 2 from transcript Glyma08g47160.1 (locus Gly ma08g47160) derived from phytozome v7.0 (chr-ID Gm08; pos 46079800 to 46080461)
cccaggtaactaacatcggtctttaaatggagtttaattttgattggcttttactgtaaaaaaaattgtgaaccaattataaacacttggacataagtaatttttatgaaaattaataattttattatatgtgacgataatctggataaaaaatacttacattatccatatgttttaattaaaattttattattaattattttccttttttattttttgagagaggtgggggtcagatattagtattcttgggtatttgattggtgttatgtggcgagccttgggccaattgtttaatgtttttctgttgggctctgagaagcccatttaaaatttcacaggctccaaaatgaggttcatcaaacaatccaaatataaggtccattaaagggaaaattttcacaaaaaaccaattttcagctcataccatgtgtctgcatcttaggacttaggagtcacctcttttttgggagaaattattacataatcctgaatcttcatagtcttaaccaatcttcatataacacataattaaatataattaacttctttttcataaaaattgtcaagatcacatgtaatgattgagaccttaaataataatgatagattctgtatcttgtgttaacaatggatgaatgattgataatgcaggtgcagac

SEQ ID NO: 24151 - DNA, 829 bp, Glycine max
  Intron number 3 from transcript Glyma11g11940.1 (locus Gly ma11g11940) derived from phytozome v7.0 (chr-ID Gm11; pos 8513416 to 8514244 reverse strand)
ctaggattatcttgggaaacaatcaaactctacaggtacttcatcaattcatctttgttgtgcttgctgtgatgtttcactttcaccacaaaattcttcaaacacttaataaatgttaagctgttattattgttattatgattcgaacaaggaccaagaagttatttagtgattgagatgagcgtagcttaggattttctgatgaaagttatggatcttcatttctttatgaatatagcttggcatttcaagcatgaaacaacattacatccatttcgatatgcctgcaagtctttagttcaagtaaatcaccactttgatcctaataagattgtaagcgttgattactttaatcactttaatcatggacttcataataaaactttcaccttagtctctgactttgtaaaatgttacaaaatatcattcacttaattcctttccactatactttgacttaagtgaccgacgcttgtaattaaagcaattaaagggaaggtttattatcttattatgattctgtaagtaaagcttgttagactgaaggatgttcttttcagatttcaaggtgatataacttaatttatcggaaaactaaaaacactaaccaaaatagttgcaattaaaaacaaattttttatgtactatgtacagcttcacctgctttgaagcacctaaatttaaacatttaactgagcaaacagacacaaattatgtgttaatactagtttgcatacatgcaagattaaccgtttgcagtgcagacacaactatattttatttccctcatatagggtcagagtttatatacagggaaagatttgagcaa

SEQ ID NO: 24152 - DNA, 406 bp, Glycine max
  Intron number 1 from transcript Glyma09g25110.1 (locus Gly ma09g25110) derived from phytozome v7.0 (chr-ID Gm09; pos 31187727 to 31188132 reverse strand)
tttctagcacaagtttcttgctagaacagaaattggtaattgtctttcttaacttcaaaatttgtttatataactcccccttcctcttcttttatgtgatgttccttttgtttttggtttcaaatggtatgtttttcgacatcaaaagggctgccaaaaaccaatgcaattcaaatgtcttttctctttcagtaattgactcatggatccaactcatgttatgtcataatatttgaatttttggaggtggcagtggaacagaaggtcatactatgacttgcacatgaaatacattatgtcgagccctatctgtattatataacaaaccaataatctcactttccccaattagttctttctgttacagtcatgatgaaatgggttttttgttcccttagctgaaggg

SEQ ID NO: 24153 - DNA, 705 bp, Glycine max
  Intron number 1 from transcript Glyma12g33730.1 (locus Gly ma12g33730) derived from phytozome v7.0 (chr-ID Gm12; pos 36940181 to 36940885 reverse strand)
ctccactcttctttctgtgtgtattgcaacaacaagtaaattctcttctgtgctgcactttcttgtttttatcaccaccctttcatttatttgactaatattttaagtggattttgctttctggtttcaagtttggcttttgtttacatatttggctatattttattattgttggatactggatagtctcctttttttgtgtttttattttggaggtggggttgttaattttagccgtttctttggcatatttatattctttccttgtttatggtaattttgatcagtttaagttggagttttcttgctgttttgttatgagaaaatagttaaaagcaaaggattgtcaatagtatgctgtgaattactgaaagggtgtagtatgattttatagaattatggactagtcatcatttttataggtggctagtaattaaaactgtgaaaggttggggttgagtttggcaatattaggtaaggaccagtttgattgattattcaatataaatgtgttctgggatgggatttatctgcaatcctttttatgcttttgtaatatcaccctctgatcaatgtacattttttagttttaggcctatagaaatgatcaccatcgattgtggctctttgttgatttttgttgatttttttccctgtgatttgttgccagataatcaggtagaaccaccttcaagttctgatttt

SEQ ID NO: 24154 - DNA, 841 bp, Glycine max
  Intron number 2 from transcript Glyma08g44630.1 (locus Gly ma08g44630) derived from phytozome v7.0 (chr-ID Gm08; pos 44201652 to 44202492 reverse strand)
aacttctcacatttgaagcatctgatttggagaaggtttggaattagagggacaaatatattactatatcttcttataatatttcgtattaatcttttaatatttcataaaaaagtattagatgaaaaagaaatatatttagtttttaaaaccataaaaaatattcaacatatttttatttagtaagtaaaatgttaaatatttaaaattattctatattaaatattaagtttctaagtttaattatattaaggaattatttctaaattttaaataaaaattctttcgaattttttttggtcttaaaattcttttgaattaattatacatatcttctttatattttttttattgtgatattctttataattttaaatatgtatctatatctatattctaatatataattttaaaattatacatgaattgacaatgcacattgcttttaaatttaaattatatttttttatatatattcttaatttattgttatatttttcttaaatttaaaattatcagtgaaatgtatataatactttggtagtcactcttatttgaaatatgtaagatgactaaacgagtacaggctaaataattaaaactaaaataggaacaagtaatttttgtaaacaagttcagctgcaaaaaaataaaataaaaattgttccaaacacattttgccatcttgctattgaagataataccttgtcccacactcagttatagatttgatttgtttctttaattattttggcaatatttttgagattactgttgaagggggtttatgtaacttggaaatgcagggaggttcatcaaataaagttgtggactgcattct

SEQ ID NO: 24155 - DNA, 653 bp, Glycine max
  Intron number 1 from transcript Glyma09g30070.2 (locus Gly ma09g30070) derived from phytozome v7.0 (chr-ID Gm09; pos 36986844 to 36987496 reverse strand)
atttccgaccaagaagctcatcgacgaccccagtgcgtgccctctcctctcactctctccccccttcgctccgttcaattcctcgctctctgtctaattcccctgcaatcctcgccttctttgacttttgccgtcgacaattgctgcgttctgaatgctttcgccgcggttccctgcggaatcgcgttctggatttttttttaactgtttgtgctctgtgcattttgttgacttttttgtttcgctttgtaaaatctgtttgaacctttaaatgttttagcattaggctttgactgaatcgcaccgtgctttaaatgacggaaatcgctgctcgagttcgtaatatttgatgtgaaatgttgtagaattgattgcgatgatttcctgttcatctagctgttttagttcgaagattacgattcaatgtgagagttaagattccgatttatatttttttatgtttttattttccttagtagcactgcagttaggattatgtttatttttttttttcttagagagattttgcaataacgaaacaatttacaatatgtttttaagcatttattatttattcatgtatctatgtatataacagaggaacaattgtctccaaagttgattttttatttttcttttaaatttgattgcag

SEQ ID NO: 24156 - DNA, 477 bp, Glycine max
  Intron number 1 from transcript Glyma11g10300.1 (locus Gly ma11g10300) derived from phytozome v7.0 (chr-ID Gm11; pos 7404845 to 7405321 reverse strand)
ccagcaagagctacaagcctcgaatcattgtcaaggtaacctccctctcgaatcccacatcgactacactagttactccatacaattaaaatggattatataaacagaacatgcatttacaggttaaaatgagtttctaagagccaaaacctccttcatgcattttccgagttcactcggtttaattacaatttaatttaattatttttatttattatgcgttgtgtgcatgcctcacacatggaatcggtccttggatttggaaaggatgatgtaatcattaatatataagaatttactatagtgaagtggggccactttctgatttgattcctagctactagtattgttcttcttatgtttcttataggggtcctgtatttgtttttatttggctataacatcctaaactaatgtagtattttgttgtgttaaatgaatgaatgggaggacagagtatagtgttcgagaacttga

SEQ ID NO: 24157 - DNA, 743 bp, Glycine max
  Intron number 2 from transcript Glyma11g07250.1 (locus Gly ma11g07250) derived from phytozome v7.0 (chr-ID Gm11; pos 5084983 to 5085725)
tcttcccaactcgttcacacactgttgcagctcaggtatggtatgagggctttgctatcatcttttttttggctcgtttcttgtgcatattgtgtatatggacagttctctgtaacattcgtattgtggctatttgttctgctttatgttattccttattgggtcttttggttgttatactttgatgtaactactaactagtatccatgtgtaaaaattatttcattgttaagtgtaatttatgaagaaaaaaaaaggaatcgtgaatgattgcatgaaggctattgaatgatgagttcaatcagatgaaatcaacagtagcttccttaggtttgtattataaattttcttttatgtaagtcatagtatgctttgtgacgtgatttaactacagtcttggatcacattcccactgtcaccacttacattcataattcattcttgtttgacacttcattattattttggatacatgacattttaaacttggctatataattatgttgtgtatcaatgatggacaacgatttaatctttcatctgccaggtttgtgcttttaaaaaatcattgagattaccccatagtgtattgtttttttctgcttgtacagttagtcatgatgtaaacagtattggatggtgcaccaaagtatattaagttgacactatcatgtcaagcatcccccctgaatatgctggcaacactaattcatgagaataaaattctgtatagggtggtataa

SEQ ID NO: 24158 - DNA, 486 bp, Glycine max
  Intron number 1 from transcript Glyma10g39830.1 (locus Gly ma10g39830) derived from phytozome v7.0 (chr-ID Gm10; pos 47418620 to 47419105)
gtggctgccccgtcagtacccatttgttttctggggtaagcaaatagaaaacattgtattgtatcagaatgtcttttttctttctttgattaaattaccatactaattttaatcatgtcaaagtatgagtttcagttttggacttccattatcaactacttattagaaattattagatgcatttttgaatgaaattattacacatgtgaagaatcatatcatacatacatgtagtaattaccctcgaatgcatagaataactggcacggattatttttgtttaatggttctaccgattatgatgatcacccgcagagactatctgtagtgtcacaccaaaaacatagattaccctatatgtgataatttataattcaatgatggctttacgcttccagagttccagtatatcaatgcatatactaaatttcaatttttttagttatgtttggtaatgtttaaaatttgttgttattgattagattg

SEQ ID NO: 24159 - DNA, 517 bp, Glycine max
  Intron number 2 from transcript Glyma11g34560.1 (locus Gly ma11g34560) derived from phytozome v7.0 (chr-ID Gm11; pos 36345529 to 36346045)
agatatcaatcatctttctcatccttgtatatacggtattttctctttcttcttctccttcttccttctgttaaaaacacacacacacacacaaaagctagagcatcatgtgcctaacacttgccatcatcacgtggaagacaaaatagattttgcaaagttcagattaaccgcgtgaaacttttttgaacttcttagtccttttttctttggttgttgctaatttcactaaatgggtatggatggttgttctcaaaatttctcattttactttgcatacgatcctagattatgtaaagtatgcaataagacgtaggcaatgtttggatatagctaaaattcagtttagatagaattcttattaattagctcatggagaagttaaatcaaagagcttctataaatcagtttatgtataagctagctcgattcatttcactttcttatattcttctcctatggagaaatttatccaaataaagtcacaaccaagttggtaagccaaatttgatttata

SEQ ID NO: 24160 - DNA, 964 bp, Glycine max
  Intron number 4 from transcript Glyma11g34560.1 (locus Gly ma11g34560) derived from phytozome v7.0 (chr-ID Gm11; pos 36346247 to 36347210)
gtttggcctgctcctgctagatccttggtaaacagaagcattcacgttctgttctgttccattcataacactctgctattcaaggatatatatatatatatatatatatatatatatatatatatatatatatatatatatatatataattattgttacttgtttttcctgtcactcataagtatggttattgttttgctaaaaaaaaggagaatagttagttcaccggaatacgctacttctaggctaaatcaagatgatttaattgtcatcattcataactcaattgagtatctgataggtcagcttcttaaattgatcttagtatatcaagagattagtcctcggcttctagttaagggacttttcacccaaaaaattaaaaacacaattgagtaaaatctcattttagtccttgaaattgtatgcgttcgtcaaatttaaaaaattctcaatttactcctgacttgtaaaaccacattctttcctttttggtgtaaaacaataatgtggaaaatgaagtggaaaggaattaaacgtttgactttttgcaaagtcaggaatcaaagtgagaattttgtaaagtcaggacctacgatgttctacctttacaattttaaggaccaaaatgggggtttactctaactcaattataagtgctagaaagttgacttcttttgtcttgtttggttgatttgacatcctctcattactaggggttacagcttaaagcaaatagtgaatttttcccacactttttccttccaaagatttggttaagcaatgttgacttgtatcttaattgtgcactacaacatgagctgttctgcatcatgtagtgatgagtaatgcagcatatgttcataactggatatgcaatgatctttttggttcttttaatcaacatatgttcgtaactgttactgtggaagaagtattgaatgacattcctgatgtcattagg

SEQ ID NO: 24161 - DNA, 894 bp, Glycine max
  Intron number 1 from transcript Glyma09g30750.3 (locus Gly ma09g30750) derived from phytozome v7.0 (chr-ID Gm09; pos 37527879 to 37528772 reverse strand)
tacaaccaggttttcttcttcacttttctaattttattttaaaaatttaatctttttggttatctttgttgccccatttattcaattttggagaattttgtttcccttttcttaatttttaaggatatcaatgtttttatttcttagggttggggtggatgaaaagttcttaatttgtgcatgttttaattgatgtttgacttgcatgatgatgatgacatgggtgtacgtgttattgtcatcaatagttcttaattctagtgatttgaatgcaatatttatgtcatggtagatcttgtctaattacaaacaatgacgattgattggtgaaccccccaacttttttttttttttgcagaaactaaagactcgtgtgattaaaaaggatgtgaatcctgagtggaatgaagaccttactctttctgttataaatccgaatcacaaaattaaactggtaaagtgaatgaattggttaatgtctttttttctagtttgtaaaacttcagttctgttaaaagaggctgttgtagattttttttcctttttgtttagggttggtgagacaagttgttaatatgagaagttaatcatgttttttcttgcctctatattttggaaaaacaagttattttcatgataacaaaagtgagaatgagttcacaatctacacaacacccctgaacattgttatctgtgattgagtaattgtagtaaatttcatgaattgttctgcattacatttgccatgccttgaaaagtaaaatcctgtttgcaatcctcaaacgtaggtactaatttgttctctaatatatgatgttaggatacatcaattttggttcatcataattagactgctcattggttgatgatcctttctgattttgcagactgtgt

SEQ ID NO: 24162 - DNA, 499 bp, Glycine max
  Intron number 2 from transcript Glyma12g16400.1 (locus Gly ma12g16400) derived from phytozome v7.0 (chr-ID Gm12; pos 15598774 to 15599272)
gaggctgaggaggttaacaagcagcttgatcaaatgtacgtttctgaatcactctttcttcttttgaattcgctgaatgttgttagtttaatctttttgtgtaaaaaaagtttatttttgtgattccttggttcagtgtgtatttatatgtataaaggtgaatgtttggagtggataattgagttttatttaccctttcttataaatagagaaactcagtgtctcatggagattagccggaaccatggacacgtggtggtcctggaccatgtactagtttcttgtagggaagagagttatagaaatggaaattagaagttggaaagtaaaagatgtgatcaaaccagattaaaaatggggtgaaaaaggagatgaaagagaatttgggtttaggaatataattaccctattcatatttagattacttatatttacaaatgtgaattttggtgtttggttggtgttttcaggggttacaatattggaatccgtttgattg

SEQ ID NO: 24163 - DNA, 868 bp, Glycine max
  Intron number 1 from transcript Glyma11g08590.1 (locus Gly ma11g08590) derived from phytozome v7.0 (chr-ID Gm11; pos 6078999 to 6079866 reverse strand)
gagatcatgtattgtattcaaccatacctgcttgttttgacagttgatccagtgtcatttatcttcctctcagccgtaattgttgttgccatcgtttaatctgaaacctgaaacctctgatccacagacttgactttctggttcattgcagtagtgcctactgtcaatttctctgtcagtccaactctcttgtcaaaagaaatgacatttgcagatgcattggtagtcaattgatgcttttcatcaaatgtttagctttgttgattgcatcttgtgctctactaaggtagaatcttctattggtggggttggctttcccctcctgaaagagaaatagtataacaaaccatgagctaaatcagaaaaacaaaatcaaaagaatgcactgcttgagattataagcatgtgatgggtagagtaatgaggaagtgtgtgaagaaggaattgtagaaggataggagatgaagcagaagcaaaacattaagccacatgtcaatttttgaacactaaagagtggctgtgaaaatatcataaatgttcatgtttataccaagtgttcagcgtcggagaaaggggggaatttgactttttgacggactactgttttatataaatttattatttatttatttatttatataataaggatttgttttatccttccataagtaaacacgtgtcacgtggcgagggaaacgggggcgccctctgtttacgctacaatctagatgaagcaatcaaggcccacgacgacgcgttttggacttttcagaaatcgctgcctcttctcacacctacaaaacccgtcgtctatttagtaattcccctcacagcagagaaagaagcttcacaattcacattcccacca

SEQ ID NO: 24164 - DNA, 536 bp, Glycine max
  Intron number 2 from transcript Glyma10g08340.1 (locus Gly ma10g08340) derived from phytozome v7.0 (chr-ID Gm10; pos 7176048 to 7176583 reverse strand)
cctagtgatccttacctgagagagcatttgcactggtattttaatagagatatatagcgagaaattaacaagttatttttgcttcatataggctaaataaaattattgaggttaagttataatgttgtcattacttgaaaaccaaacgaattctgaactgagagagggaaaaacttttgaccggtgaacttacttcaattctggatttggaatagacattgatataaataatttttttttaaaaaaaaataatgctacaaaaaaaattaattcatattttaggaatgacatttgaatgttaaaagaaaaattgttttgaagtacaaacataattatgttttaatttttttgataaatttgacattgaaaattaatcaattctatgcacctaattgtttttgaagaagggctctaagttctaaccaataagacctaactttactgtacatatatatactggcaaagcatataacaattctcaggtctcatatcctatacaggccacttaattgtttcaaattgtgcccttttgcagg

SEQ ID NO: 24165 - DNA, 557 bp, Glycine max
  Intron number 1 from transcript Glyma12g33820.1 (locus Gly ma12g33820) derived from phytozome v7.0 (chr-ID Gm12; pos 37001419 to 37001975 reverse strand)
gtgaagatatcagacaaacggtactgtcaaaaatctcttcctacttctgtcttctgcttgtgaaaaatatgagttttttagccaacatcaatggatttatggaaccccacttcaatttttgtgagaaggaactttttttgtctaggaaactggagtgcatattgcaaatttattgtttaacaaaattacctgatattaccataattttcatatgggtgtctattctcatgttgattctctggtgtagaagttctatttttggtgatatataatataacctcattcttaagttgattatataattatatctattccaattccactatcatatcggctttctcgtacacagtttaccaaattacaattcatcaaagttgaagttaatataattttcataatccttattttagtacgttatttcacatgggtaatgggccctgaatgtctgttctgttctcttttcatgattctctgtgtgtgtgaacttgtggctaagagttttagtggtttgatgcttgataggtccaagattgttacgagctgtcagctgagtacga

SEQ ID NO: 24166 - DNA, 530 bp, Glycine max
  Intron number 1 from transcript Glyma09g04480.1 (locus Gly ma09g04480) derived from phytozome v7.0 (chr-ID Gm09; pos 3306234 to 3306763)
gctttcatcgttcaacatattctcaccatctcagtgtaagcaaatcttcttattttctttgaaccctaatctcatttaccccctccccctcctttttactcaattgtaaatcccttttccgtttaaatttgtgggaattcttgttgtccgtctaaaatttgtctcaaatctgtgaaattttttgacaaaattttggacagaatttttaatttgcaacgaggattttcagacgaaatgtttttcgtccgaaactcatctgaaaagggtttgaaatttgtctgaagattcgtgtgaaaatggcattttttagtagtgggaaagcttttagctaattattagataatacaaattaaattatagaaccaacaaataaggattcaagttatagctggttcgatcatgagttttttttgttactgatctcaacggcatgtactgttaggtgtatttaatgagtatttttcatttgatgtcactgaataatgcttttgggcattaatttaccaagaatttgttatttttatttcagc

SEQ ID NO: 24167 - DNA, 645 bp, Glycine max
  Intron number 2 from transcript Glyma09g04480.1 (locus Gly ma09g04480) derived from phytozome v7.0 (chr-ID Gm09; pos 3307112 to 3307756)
gtgaagacaccagaggtctcaaggtttgttttcttcactaccatatgtacgataatatttgtgttgtatacaattaattgatgtatatgatttccaaagttttttagccatgtaaaatgctgtaaaaaaagaaaattatacaactatttatcaatcaatcttgtgattggaaagtgagaaaatcataaatttagaatgaaaatgactcattttttttttgttgttgtaacaaaatgcaatagggtagaatgtaaaatgtgtgtgagtatgtgtgtaggttgaggattctcttggtgggttttcctcaatttctgcctcaccttgatgaaatccaagtgttgtgttggtcatttttaaattgactcagactatataataattaaggaagattaaggtaaggcataggtaatgttttaataaactagcttgtaacacagtttccatttagttctatgtttatcaaggtatgagagataagagtcaatcatatgaacaaaccgtagttggtatcaggatatataaattaataccatgacttgtaagtactaattatacttatgtattttttttttaaataaataaatttgattgtttctagcattaaaataattctataattgttattgttttttttattactaatag

SEQ ID NO: 24168 - DNA, 616 bp, Glycine max
  Intron number 2 from transcript Glyma09g38500.1 (locus Gly ma09g38500) derived from phytozome v7.0 (chr-ID Gm09; pos 43852759 to 43853374)
agcgtaggctaattattgtaccttattttttattcattggaaaccataataatggcactttatatatgtctcatcatcatattaatcttcaagactttaaccaccaccaaatggttagtatgaataaaattagattcagtatatttaaataaagtcttagatttgaaaaccttatgattaagattaaatattctacaaaaaatagttaattagattttcggtgacaaaaaaaaataaaaatcttcaacggttctggatgggcaggctaggggtacaaaggcaaaatttgaattttgaaaaatttggtcactttttcttttagttagaagttggcatctgtttatcaaatcggggaccaattttaaatattacgcgtctttacattaatttcttcccacatcatcagcttttggaaggcgtgcatataagggaaaaatgttgagccactgacatagtaagagtttaagaaattgttctcttggacgtcctttcctcaccttgaataaatatattgtaattattgttttgtttttttgtgttgatcgattatatatgtgattgtgaaatgtgggtgcatgcaggaccattcaactttgaggctgcaaattcgaaaggg

SEQ ID NO: 24169 - DNA, 457 bp, Glycine max
  Intron number 3 from transcript Glyma11g00930.1 (locus Gly ma11g00930) derived from phytozome v7.0 (chr-ID Gm11; pos 495331 to 495787)
atacccaagacgttgcaggtatcatttctcatgtctttttgttttgattttagttcgtagaataaggcatgctttcccaattctttttcttcatgtcgttgtatgttgatctaatgacacatccagttttttttatcaatgaagttaaatgtcaagaagatgtcttttactgcccctttgctggttggctgaaaatatcaaactggcttatagaattttttgcagtgggtttatttagattttatcaaacttaaatattacttctcatattcactttatgtgtcaaactatatctttacgaatgtttatgataaatttatggcatggggaatatagcagtatactaattctattatctttttgggtctgtaagagtaggacagaacgtgaaataatttctataacttttgtattgtcatcttgaatttcatagtgaaagtgttggactggggtgagg

SEQ ID NO: 24170 - DNA, 748 bp, Glycine max
  Intron number 3 from transcript Glyma12g31420.1 (locus Gly ma12g31420) derived from phytozome v7.0 (chr-ID Gm12; pos 34984192 to 34984939 reverse strand)
tggcaatattcaaaagctcgctgattttttggaaggtaatgttaattatttcatttgcggtgcaatcaaacctaataacagtattcattcattgtcatacgtaaatattgagaaattttgtctcctttatactgtaaaaaaggacattttcttttttgtttgaaaggcaaataacttgtatatgaaagcaagccagtatgtatatgctgtacagtaaactacttacataaaaaaaatgggaataaacccatgcccatgccctgctctcaaaaaatagcaaccaaaaaaatacattaaaaagtaagtgtgaaaaaatacgttctccttaaatcaaactttcaaagagttatattatttttacattttttataatatatttttatgtcgttttgtttatcgcactagttgttttattttatattttttttctctgatgtcatctcttcgttaattgtagaaaaaattatagaaagggatgtaaaaatacatattttctcatttcagatttcagaaaccagctttgagtcggtgtatcgtaaaactcaagatgcaagtccaaccataataaacgactgatcataaatttcagtccaaacaaacaacatgactacctttttttttatcgcactactataaatttcagtccaaccataataaacgactgattctcaagtcgtgttctttttttcgatctttttttctgcctcgcaattaagtgtaccacagaaaaaaaaaataacaaaaaaac

SEQ ID NO: 24171 - DNA, 472 bp, Glycine max
  Intron number 1 from transcript Glyma10g31200.1 (locus Gly ma10g31200) derived from phytozome v7.0 (chr-ID Gm10; pos 39761642 to 39762113 reverse strand)
tggtagttgattgggccggagaaccgttcattgcaccatatgacaatatttagcaccatgtttattttgattttattagtttcatagttgcactacatgtctttcttgttggtactttttgagttacgaatctacacttctaagaattaagttagttgcgaggaagaaaaatgaaggttgttttacttcttcgttgtgctatgggttttggcatcatctgttgcctttgcttatgatccaagccccctgcaagacttttgtgtagctatcaatgataccaaaactggtggtatatatttatattcttactcttacataaatattgttgctacttgttacattattttgtgtcaaaaataatattcatcataaaagtttctttgtgatttggtttttaaattaaatgtgcagtgttcgtgaatggaaaactttgccaggatccaaagcttgctaaagctgaagatttcttctt

SEQ ID NO: 24172 - DNA, 1005 bp, Glycine max
  Intron number 1 from transcript Glyma10g34490.1 (locus Gly ma10g34490) derived from phytozome v7.0 (chr-ID Gm10; pos 42659407 to 42660411 reverse strand)
gcatccattcttgagccatccaagcctgtcagcatttccttctctcactctttcttgttcgtttctattttcatgtgtgacgtgttctaacttgtaagcactgtgatcatgagaaagcaatcaacttttggtgacccatttgtgctgttgctatttgaagtgaatgtgtggtattggtgatgattcttttgattgctaaatgctgaggaatttggtggatcaagttgaaaaattactgattttttttttttattggcaaatgttggtttgtcagttttgttagaaatgtaagttggggagatttgaacccacaacttgttcccccttccttcaaaaaagactgtgattgatgaaatgaaagatatttctactctgacaaatggtgcaacttatacggggttgtgctggttttgttagtcttgtcttcttttaagcactgtgattctgagaaactaatcaacttttaggttgttgctaaggaacttagtagatcgagttgtaaagtgactgtcatactcagatgaattgaaagacatttttacactgacattgagtttgaatttgctagtcaatttgatttggagtcaaaacaacggtgtgtattgaaatattatttgtgcttgtttgcatgacaaagatacggtgctggtttttcaaccttcgaggaagggaacttgaaaactctcaccaaatggacaactcttttatttatatatttatttaatgtaaggtagcatcggtttagttttggagggaggttggtgtgtgtcctatagattatttgattgtttcacaaattctttttagtaaaacaaaagaaaaatgttagtctttaagctatgaaagttaagtagaaaattttaaggtcttaaaagaaagggtggatggtcacatgcattttcctatagaatttttagtccatattcaatgaaaaatttcagtggttgtcaatttggattttgattgaagtgtttggaatgcattctgcagactttctttccagct

SEQ ID NO: 24173 - DNA, 789 bp, Glycine max; identical to SEQ ID NO: 18205
  Intron number 1 from transcript Glyma10g42940.3 (locus Gly ma10g42940) derived from phytozome v7.0 (chr-ID Gm10; pos 49784272 to 49785060)

SEQ ID NO: 24174 - DNA, 970 bp, Glycine max
  Intron number 1 from transcript Glyma09g07980.1 (locus Gly ma09g07980) derived from phytozome v7.0 (chr-ID Gm09; pos 6983842 to 6984811)
aacaagcccctctcgatctctggctcgtcattgcggttcgtttcgcgctttcaatttactagtttcatgaataataaatgaacatgctcgagttttgatttcctagttgcaactgcgtgtgatgattctagtgaatgagatggtctagctcagttgattgagtatggtgcgttagttttttttttttttttttgattggcaaatgttaatcgttaggttgttagtttttgttagcaggaggatacaacccttgacctttccttctttcttaagccagccaatcaaacttatatctcccaggggtgcgttagttgttgtatattccgtggtacctgtgttcgattcctatggaaaaattgcgtgtgattctgcggttttgcttatgctctctctgtgcgtgttgtaacacgtgacaacgtttaatttctgatgggtgtttgtaaggcctgtagaaataatttataattatatggcaagtcaatgatgagtttaatttctacgcaccgactgtaaaaaaaaaaaattacattgttaaccgattaaaaatcatgctaggtatgactttttgaaagtagttattgtgaaagtaaacaaacttgcacacatgatgatttctgattgattgacaatgtaaaaaccctttacaccgttaggtcatatactatttagtgcgtgtttgtataactgtttcaccatccgttacacgtgttccatgacaccaacacacatgtttttaaaaaaaatgctggttaagtttgggaaaatggtaacccaaacacactgttactcatttatgattgagtaatagtgtatttttatacagacatattgtattccctatttaaatgcacagattgcatattatctgtttttgttttctttgctttgataataattgaactcaactgaacttctaatatcatgtatgtgtgcagagggagtacttcaagcagggaaaaattgatcaatt

SEQ ID NO: 24175 - DNA, 761 bp, Glycine max
  Intron number 1 from transcript Glyma10g01130.1 (locus Gly ma10g01130) derived from phytozome v7.0 (chr-ID Gm10; pos 799706 to 800466)
agttaccgaaggtttgttttcgaaatgactccccttttgttctttgatctgttctttccctcgattttaatttgtgctttgtggtgcattcgttgattgcaacctttttggttcgatatgcggttgggtagtgcttaggtttgaaggatgatttggatttcagggcaatgctggatctggattttggaatgagtattgctttgaaatgcacgtgcattgttcattagctgttcagtaacaaggtgaagttgaagaggatcataaagtatttgagtgtttagattaagcttttttgtattcaaagcaaaatttcagtgagagtgcatgcctggtttggatttttttggggggaaaattgtttttttttttttaatttctcagttaggattttgattataggctgttttgaaggaaaaataaagtaatccaattccagacacacatagagcttttgaaatcatgatttttgttttttaaatcgattcaagccaaacttgcccgtggaaatttaatgatatgcctgggtcctaaagtttttgagaacaaagaggtagaaggtatcatgtcactgggaaagatgtgaatcacttgctaactggttaatgctttttactgatactgaaaagaaaagaaaaattagaagagtgaagattttaatagggtgacaagttttggaaaattggaggatttcgagttcaaacaagagagtgaagccttggtgcaatgcaattgtaaggttgcttccttgtgccttgtaggac

SEQ ID NO: 24176 - DNA, 519 bp, Glycine max
  Intron number 2 from transcript Glyma10g35450.1 (locus Gly ma10g35450) derived from phytozome v7.0 (chr-ID Gm10; pos 43648696 to 43649214)
cttctcacattattaaggtgtacttgacattgaaggtaacctctccatagtattacactttttggtctatcttgtgtttgtcatggttgttgctttgcatatctgtaaattgtgttctatattcagctgtgagtaaggatttgacttaagtgcagtatatgtctagatggagtgggtatgctcagtagtatttgatttagttactggcatataaaaatcatgtttcattgttgtcttgactccagatgcattaaatttagtccaatttctgtgaaattggtttgaagatcacgatttacatgtacacttgagtctatttgaagtttttaacttgttttggattcttagataatgtgaatcagaaattgttagggccaaatttctcttgaaatcatttgtttttatttctttccaatggattgtgctattaaagcatcatttacggaatttgcaaatcttatatttcaaagagctgtcctttcaggttgaaaatttggggacatctcctgcttcagaagt

SEQ ID NO: 24177 - DNA, 752 bp, Glycine max
  Intron number 1 from transcript Glyma09g05830.1 (locus Gly ma09g05830) derived from phytozome v7.0 (chr-ID Gm09; pos 4575627 to 4576378)
tgacaagtatcagattttgtgacagttgaggtgaggtgaggattggttttcacttttcagcttgtgcaattcttgaatttgcaattctggttttcaatttttgaatttgagattattatgatttatgagttgaacattttcctaatcttatttgattttgaatcattgttttgagtttggctgaaaagcaatagagaacaaaacttaggtgaggtatcataattaggtactcttggctgtgtttctccaatgagaattcgagtttcaccttgataatgcaaaccttaactatatggattacctagtccaattttgatttgagaacaacattaaaagcacttatggaactgcatctaagttttgtccttgaaggcttttggtgatgttagttatattcttcttatgtctgtagtcggtttaaataagctttgcttcagtttgttaaggctagggcagagtagccttgtagattatatgttgattctataaattgggtttgccattttttttttccttcaaagatgggaatggttggtgatggaatcaatcattgaaatattcaattttgcttgcttttccagattttatgttagtttggatccttggttcgagtaggcatgaattacttaagagtttagtagttaacattcaacttttgtgtgtgttttggtaactacacaattgcacattttgttacctgtgttttcttttttcaagggtagagaaactgcagaagtattgaactgagcact

SEQ ID NO: 24178 - DNA, 980 bp, Glycine max
  Intron number 1 from transcript Glyma12g35600.1 (locus Gly ma12g35600) derived from phytozome v7.0 (chr-ID Gm12; pos 38731306 to 38732285)
ccctccgccgcagggctcaacgtgtcaaacaatccgtgagcacactcttctcttgttttttttttcttttttttctttttcattcctagtttctgggtaagaaaattgatatttttttatatgataatcgtcacttgggtttcaatttgacttaggaatatgtgccatgctaagtttctatgtattttcgtttataaaaaactgtaaaaatgtcaatttgacttgtaaagtagttgttataaaagtgaataacttctcatacacggttgtatatcattagatgacagtgtaaccgtgcatttcaattaaattctagatgttggagatcttaaattaactagtgatatgaacaaaatagtgtatataaggggaaggtaatcctcgctttacgagttagtttttgggttgaattagtttaaggccgaaattcttagatggtataaagtatatatcctaatggatgttgttggggctatcgggtcattataggaccacctacatatatattatcttacaaatttcacgcttgagatgtttagtcttcagcatcaaggaggtattgaagatttcacattgactagtgatataacctaaaaaagtgggaggcaaccctcactccataagttagttttttgaaattctaagactagaattttttttaaaaggtccgttatttgattttgtataattgtcactattcgtgttttgctgcgtttggtatttttcaatttgtctgtaggataacatgtgtagttaccctcttctttataaatgttttggtgagaaatgatttcaaagaatggatttttagttttaaaaaatgaaattggatgtattgagttgattttgttgttgtgctgttcacattaagttttgcagtgatgttactgatttgtgctgttacgatgcagtctgtattcattgaaatgggttttgtggttttagcaattcaggtcttcaggagagaagtcgataaagga

SEQ ID NO: 24179 - DNA, 519 bp, Glycine max
  Intron number 1 from transcript Glyma12g31130.1 (locus Gly ma12g31130) derived from phytozome v7.0 (chr-ID Gm12; pos 34729517 to 34730035)
cccccttttctggtctccgcaactttgtttttcaggtactagtctcaatttcttgttttcttgtttcaatttcttgtcttttatttttgtaagtgaaggaggagttttactgctcgcttatttcgtatgttgtttcttcaataatgaaggaggagactatgtctgcattgaaatttgttatgcagaactatactgctctgttattcgatatgttttttctttaataataaaatactgtattgttgtgtgttattgaactattgtttatgtacttgtgttatcaactttgatagttcaactgttatttttggatgctatgtactttattatgctaatgttcttaaatttggagtatggatggccttctcttcatctcttgttatgaactttatttgttatttggaatattaggtactttaaatttggagtatggattgatcacactagtaaatgctctttactctcaagtctgaactgcgttaatatgattgcagggtttggtctttataagaaagaagt

SEQ ID NO: 24180 - DNA, 675 bp, Glycine max
  Intron number 1 from transcript Glyma11g11510.1 (locus Gly ma11g11510) derived from phytozome v7.0 (chr-ID Gm11; pos 8214991 to 8215665)
tgctcatctcctacaccagcaacacttttcctacggtcagtgctaccactaacaaaccttcacatttttctgtgctcttctgcttctaccttactgggttttcagataataatgacaaaatatggcttgttatcaacttttgtcagaattgggtttacttgtgattttcataattcttttctttttgattttgttctttgggttttcttggttctgtagtcctaaccgtgttgctgatgctaaggtttcttctaaatagctaaattttcggattttttccccatcaatttcatatacccttattagagacgaccgtggaattgggcctgtttgtaatgttttgggtgaaaagagggaaaaaaaaatattttggttgaatcttggatgttgatttcaatttttagttgctgtgcttgatatgattccaatggaggtgcgatgataattccacgaagatgcgtttttgctaaaattgctttcttaggacttttatgatttagatccttcctgttttttggatcgatacaataatcttcaaaacaattccctttgtgctgtttgacttgcaattgactgaggggtggggattgacttttagatgtagtaatttttgtgacatcttgtgattcattggctacaggactacgtgccaactgtctttgacaatttcagtgc

SEQ ID NO: 24181 - DNA, 304 bp, Glycine max
  Intron number 1 from transcript Glyma09g38480.1 (locus Gly ma09g38480) derived from phytozome v7.0 (chr-ID Gm09; pos 43831553 to 43831856)
gccgtcctacttcaactgggttggttttgcttcttcctcttcctttctcttttcattttgttctttcgcatgcacttcaattcttgtttaggggatatataaggttgcttgagtccttaagaaacaaggaaataacaaaaactaactatactaataattaatcaacatttgccaataaaaaaaattatgtgtattttctcatttctgccttgcatgatttgaagcctgtcaccttttttttgatgttgtttattattattccatttgttcaggctgtattataccaaaattgggcttggcccaa

SEQ ID NO: 24182 - DNA, 772 bp, Glycine max
  Intron number 1 from transcript Glyma09g31860.1 (locus Gly ma09g31860) derived from phytozome v7.0 (chr-ID Gm09; pos 38462123 to 38462894 reverse strand)
attttcgtcaatattcccggaacccctatcaacatgtaagtggataaattattaattgatcatattttattctttgattgtggaaattttgagtataaaatgtgtctgaatgttatttgattgtgatattatatacttattaattattagcatctttcatttatgagcaggttagtttatttgtttaaaaaatccaactctatcccatttaaaaagtttttttagggctaacagactagtttatttaagtaattaaatataaataattttttttcctcttcttatcattattattatattgaaattgttacaatatattaaaatcatatatttatttatctttttttaatattaatttgtatgtggacctaaagtctatatgctcgttgaagggtaaatttacatcatttttagatgtcttattgcaaaagagacttttaaataagctgaaagttagattaaatgacattaaaaatgaatttacatcatataagcatgtctgatctgaataatggtgcagggtttgtctaattgacttaattaaaaatggaattaaacaatctcattttgaataaccaataaaatttagatatttatcttattctaaaattctctcattaggattatgactatcatatgtatcattttttttattttttttcatatcatttatgtgtaaaatcaaaattttatatttattaaataagaattaataattaaaattatatattctttagtttgctacccttgagacaactccaagtacaaccta

SEQ ID NO: 24183 - DNA, 645 bp, Glycine max
  Intron number 2 from transcript Glyma09g25820.1 (locus Gly ma09g25820) derived from phytozome v7.0 (chr-ID Gm09; pos 32055074 to 32055718 reverse strand)
gaggcgattcaattcgaaacaccagagcttgacgcgttcttggtgagattcttctttctaattttgtagttatataatataaccttctgtgttttaagaaaattcattcaatcgaatcaatctttaccttcgttttttttatattttatttctctgtattttaaaggaaaatgtttatgtcactgagacggagaggatgcaaatgctgtctcaaacttcagaagttgaaaatagcctggtaacgatgttatattttatagacactcatatgaactatgtactgtttcagtaaatgagtctgatagttggatggtggaatagttacattactctcttgttgtaagctttgattatgtgttctctaagtataaaatatattaatgcagtttttgctattgaacttgaaatatggaggagctgaatggattttgtttctgtattatccttggaatgttgataactttttgcatcattcaatatgaaccatcaaataagagtggaattggacttacataggtcatacagtaatagtaatagtaataggacacaaggaaaaatttcaattttttattatttattttccattcatttgtttgtttccaaacttcagagagaataagttattctattttccttgcaggacat

SEQ ID NO: 24184 - DNA, 981 bp, Glycine max
  Intron number 1 from transcript Glyma12g07650.1 (locus Gly ma12g07650) derived from phytozome v7.0 (chr-ID Gm12; pos 5285835 to 5286815 reverse strand)
tatttggtgccagcaacatcatcaagttccttcaggtagttacacgatcaatactaacaattttttttatccacaaatattaattatttgtattattaattttttttttgttaactggaattcgaatctgcgatctatctttcgttctcttctctcttcaacatcttttttttctctgagtcgatgatgacagtgttaagaatccctccattgttgagttgtagttccctgtatcacccgtcaaagcgtcctctccacaaagacatatgaacaaaagtgtcgacaaagtgtagataaataaataataagattaattatattttcagtcctatagttatagaaattttcgtctttgatctctaaaaaaatattttctttttgatttctcttttatagaaatatgtccattgcggtctttgtcttttataaaatcgtcttttttagtttcttatgtatgaaacaaagatcccacataacacattttcatacataataacgagtaaaaagagatatttttatttactaaaaagtaaaagcaaacattactttataacaacttaaaaatatattttatcttaaaaaaaaaaactctctactttagcagtgaaacctacaaatgtctaatcatgcgaatctcctgactttattttttttcctaatgtcaataactctttcctaattagatgaaacggagtttggaaatgcattttcaacaacctaattctaacgaatacctggtggtgggcattcaagtagttatacttaattaacactctcctgtattccaagtcttagcctttaaaaagaaatttaagatctagaagcaaccaacagatacctaaatttttcttaaccattaaatattttttgtccaatgtattttctcaagggtagaaaattaaaacttgggcattttttatcatctaaacttttttttttttgcatttatttttcaggagcttccagagtctcagagagctg

SEQ ID NO: 24185 - DNA, 962 bp, Glycine max
  Intron number 1 from transcript Glyma10g23650.1 (locus Gly ma10g23650) derived from phytozome v7.0 (chr-ID Gm10; pos 29999278 to 30000239 reverse strand)
tggtgagtttttttttttttttaaatatataattttggtttcttaatttttcaaattatagaagtttagtcacatcatctgtttaccatcggttgagacattttttatttcttgtgattttttaaatactgagaaattgtaaatgatcaatgtgattgatgctgtcataattgtggtcttgatgattttttgactgattgtggtcgtgatgattcaaaagcattgattttgtaggtgcagttagaagttagggttgcatgttgatttaatttgtactcagagattgttttttaaaatcttggaataaaggaataacgttttttttggtgaatttttaaactttaagatttactgaaacatatcttagataaatttaaaaaaaatgaacttataaaataaccgactgtacagtaattaaattgttttatcaaaaaaaaaaaaaaagaagaagaagaagaatgtaaagtgtttttaaaatctttccgttatcccttgattcaagtgatgattgtgaatttcattatattttgattaatagtgcgtttgcttaagataattttttttacaattgtaaaaaaaaaaatcatatcattatccttaaaataatagtatattttttcattattccttgcttaagatatttaaaaataaataaattacttcttttttatattacttttgaaatatgttatcatacttcaataggtattaaaaaactatagtttagtaaaacaaaaagaattttagaagttttatatgtgaattatggatcgtgtttttgccaaaattgtaaatatttgattaaatgattttgtttgtctttaataatgagcacattggtaggctttgttttgtttgtgacatatatgtattgtgttaatttggtggttgattttaaattttggattgactttggtctccatgaagggagttgttgggcattctccacggttggtgcagtg

SEQ ID NO: 24186 - DNA, 300 bp, Glycine max
  Intron number 1 from transcript Glyma11g20640.1 (locus Gly ma11g20640) derived from phytozome v7.0 (chr-ID Gm11; pos 17436160 to 17436459 reverse strand)
ccctttggtcacaaccgttgtcagtctcttctctctgtcttgttttttcaaaactttaatcaaacacttagtgggtcaactaactaaccaaaaatttgaaccttcaacattattttttttcaacttcttgtatgcccacttgagtttcatggtcaataatgccttttttgatggcgcttagcgtaaaaaatgttaacttcaccttctgtggtcaactccaaaccaaattgagttctacctctacatatgacacttgttgcttcagggtttcgcaggttgtcggtttttccacgtttgcaa

SEQ ID NO: 24187 - DNA, 351 bp, Glycine max
  Intron number 1 from transcript Glyma10g38100.1 (locus Gly ma10g38100) derived from phytozome v7.0 (chr-ID Gm10; pos 45975288 to 45975638)
actattcatattgataatttctgctttaagtatccttcctttttagttttttctcttcttttaatttatttcaaattcagttttgtttctgttatcgatgaagttgttgtcatgcttgcaattttctgttatgcctcatattcttcatttacttgtacccctttatcacaggctaatctttcagaaaatagagtttatgttgagtctattaaaattccatttaagccatagactttaaattaatggcacttgcctttttttggctttttattcctctctagttcctgaagttgcattgcattaaatttgattatgattatactcttttggtattaagctacttggtcgaga

SEQ ID NO: 24188 - DNA, 650 bp, Glycine max
  Intron number 1 from transcript Glyma11g09100.1 (locus Gly ma11g09100) derived from phytozome v7.0 (chr-ID Gm11; pos 6437075 to 6437724 reverse strand)
aagttgccgcctaagataaaatcgtattcaccatttccatttcctagtgagaattgatttattttaagtttccttactgcacagcataatcttacttcagcataggggatttacttagggtttcatttgccctgtctgattctgaacactttcaagttatgttgtaatcattaattttgttttttgttaaagataatgtaaacatgtttatgccaaaatgaaaggtcttcatattagtagaatgctagaattttatgtgttgtgcttttaaaatcaaaatcaaatcacaaaacgggggaggcttacacactgacagagtaatgtgagagtttcacttatacacttttgatatttccccccagcaattggtgcagtgatgtttgattagtgttttgaagtgcttgatagtggcttagtttgcttgatttggatttggatgcttaaacagtctgacggggcattgtagttttttttttgaagaagtgaagttgatcatcttcttgtgtgatgaagagaactgtttctttcatatttcattggcacttttttgcataatgtaaactcaaaccatatataattgaagcataacctgttgacatgattcagtacactaaggtaatgcctttttgtcttctccaggattcttttgt

SEQ ID NO: 24189 - DNA, 763 bp, Glycine max
  Intron number 1 from transcript Glyma11g37820.1 (locus Gly ma11g37820) derived from phytozome v7.0 (chr-ID Gm11; pos 38826477 to 38827239 reverse strand)
cggcgacgtttgtggccaggtaattattatcattccatacaagaaaaaaagttccatcttttttatgtgtgcgtgatttttgtgagaggatttgctccctttgattaatcgtcgtggcttcgatttgccccctttgattaatctcgtctttggtttggggggttattaaaatgataaaatgaaaatggtgtctggtcgtggccattctgtaccctagtcgaccttttttttttttttttctgtgcgttttaatgtgtgcgtgatttttgtgatctaaatttggctatctgagaaagcatggatttttaagcctatttttagcaaatatgctggactatttcttagggatttaatttatggcacatgcacatgcttattcagactctcgattctttcttcttcattttcttttgtttatgaggggggagaggggtttgattgcgcagccataatgggattggaacggctgaacaattaacaatttgcattttgggttttttgcatgtgtctgatctgttcaagatgcagctttttagtctattattgattagaattgcccccttggtgttacgttcaatgattattgaaaaaaaaaacatcaatagatagggaaaatttggcatatggatcatggtttgatttatttacagggtggaatgaagttgcattgtcaagttataatgttgttgtattatccttcttgatgaatgttgacttagatgtttgctctttaatgatacaggagtcaagtcaagtatcgggc

SEQ ID NO: 24190 - DNA, 686 bp, Glycine max
  Intron number 1 from transcript Glyma12g28780.1 (locus Gly ma12g28780) derived from phytozome v7.0 (chr-ID Gm12; pos 32137717 to 32138402)
atttgtcgctcaatagttaaaaattactcctaaatgtatgttagtccactactcttccagttcccattcaactctctcctctctcttcgtctaatttccccccgaaaaatccaatttttactttagggttttgaaatcccagctactgctttcgcctgatctgcgattagcgattgggtggcggcctctatttccgaggctgtgataagcttatcttgcaccgtaattattattattattattatgatgtatgcttattagaaattttggctaagaatgcagttgtttgttttgaagtacactacatactgagctctggctctggggtggggtggggcatgaaatgcctgaattgcagccgagctttttcattagtggggcagtatgcagagttgaatcattgcaggatttattattacttttttttttggctgggcataaaggagtgaatgctttactagtctgtcttgaaaatttctccattgtcggttttgagataaatctgtcagttaccttccgagcaatcatttatagtttgcgattgtatacatgaattgtgtgttttagatggtgaattgatttatatgtgtgtaaactaagttcctaatattctaagttaaattgacacgaatagctgcttaagaatgctgaattgtggggtttggttttcatttcagtgaagagtg

SEQ ID NO: 24191 - DNA, 892 bp, Glycine max
  Intron number 2 from transcript Glyma12g28780.1 (locus Gly ma12g28780) derived from phytozome v7.0 (chr-ID Gm12; pos 32138659 to 32139550)
ttctgtcttttcaacaggtaaactttcctgattttcttcaggagctgaattctggaatcatgtattttgcttgaatgaaaattttggctgttaattggaaattaattatgaagattgttgtgcatcattttacccgtttcctttcttcttaagtgttttgattttgatctccttattggaatgcacctttcatctttagtatataaatagatggattggatagatgcataatgcattaacaacctaatcacctatcatggaaattcagttttgaatttaccgaaatgtgggaaggtcattactctagccatatatttccaaagtggctttgtcatcactgtcaaaactttactgtatgggttcaaaaccatgatatatgataaaggaaaacggctcagtccataaagaatcccccccttctcatttcttgtgttttgtttgtaacccactccttctggtcatttgttgctgaagtttgttttcagtatgatgtgtcctggttgctttgctataataatacctgctgcccaaagtcaatgaagggttgggtcaactggtaggatcaggctgtttgatttctgttgataatccttcattggtaggtaatctgtagatagccactacaagctgcaaaagcatgtggcatgccataaccacttagtgtcatatatgtatcactaagtagccaaatcatcttagaattataaatctgttcgtaggtttctaaaggctttttgaatgctttttaagggacagaactaaatatttcttttgtttattatttgctatttcagtggtaatgaattttctttttgtcaactgttttaagtattaagtaatgcatgcatcgtctccctttcattcactgtttgctccttttaaatgttttcag

SEQ ID NO: 24192 - DNA, 696 bp, Glycine max
  Intron number 2 from transcript Glyma12g13390.3 (locus Gly ma12g13390) derived from phytozome v7.0 (chr-ID Gm12; pos 11829445 to 11830140 reverse strand)
aatttcgacccgcacgagcgcttggattcccgaaggtatcgtcaattgtactaatgctttgaaaatacaatgcatatgtgtgaaattttgaatgactttgctttagttagtggaattgttaactctatataaattagaaatgacttgcaagggttattcttttggatttgagtcatttatggtgggaggtgcactttataagaaattgaaatcttagttgatggattacaggaatttcgtaatttgttttacatgtgtgtattttattataaccataacttttccctctaaaatgcactcaacagaggatccaaaccttaggtcatcaatgataaaattaactgttaatattacatgtacatgcataactaatcataaatgcgttaaaatatcaaccgataggttttttttatcaaccctttcttactttagaagaactgaatcccaaataatgttattgcttttcatgctgtttggtatattcaatgtggattagatattttgtcgagaagaaattcagaagatattttgcattgtttatttgattgtaaaaatattgcaattagagctaggctagggaaaaaattgtgttatgcggtccctctctttaggttaattagtttgtgttcacaatgatttcctgacaattggatttttcttctgaatttaggtagctagcatctctaggattccttg

SEQ ID NO: 24193 - DNA, 1040 bp, Glycine max
  Intron number 1 from transcript Glyma09g06750.1 (locus Gly ma09g06750) derived from phytozome v7.0 (chr-ID Gm09; pos 5497736 to 5498775)
ttctcgacgctcctctcggcactcccgatcgaattgtatgtctcaattgcatctaatccctgtttctgtttctagggttttcttcttatcccctctcgtttaattttttaaattttaaatttttatttaaaattttgattgataccctaaaagaaatgaagtgactttttcttttttaattattttactgcttgtttgcatctcttttctttaattcctatgctaataaactatcgagcgcgtgcgcggagctgtattagcttaatcagtggtctcgaatttgaattctggatatgcaactgcattaaatactccataatgagaactttatcgctaatgtgcagattgtgatatgctaatgtgcttccacttctcttgtgtttaggaagccgtggtattgaaattgagtttttttttagtctaagtgtaaatttatgtcaatcaaatagatatcaaagttaggaattttaaagtaattattataaaagtcaatagtaatttttaattatatgattatccacggttggatgaaggtgaaccgatttcaattacattcattaaaatatagctgtaaattggaattaattttttgttactacttgtaacggaacatgtcttttgtctgctctattttttttttcattccgtttttcacattctgttttgtttatgctttcctctcattaaatgtgtgttttagttggtgttgtattttgggttttacgtttgctttcattgttcaacttcaattttatcctaactttaaaattatatgtggtgtatagtcttctgtgtctgtgcttagaattttatttactttcctatagaaagtgaatggaagttgactctatagatcaattgctttgtatgtttctgttcagatgactagtttatgcatgctcgtcaactcttttgaatgttttcctttaatgatgacgtctatttgtttgtgtatttgtttctgtgttatactgaatatggttagattttttttatttctcataggtacttgtgtccgggaaggaagatccagaggcagc

SEQ ID NO: 24194 - DNA, 626 bp, Glycine max
  Intron number 1 from transcript Glyma09g35680.1 (locus Gly ma09g35680) derived from phytozome v7.0 (chr-ID Gm09; pos 41626431 to 41627056)
ccaagaatctcttcgttttgcctctctgctttctggtatgtgcgattctttgcaatttcactaaaattaaatgtactctactagatttaacttaacaacacatatacatcaataacaataaaatcttaccccaccagcaccacatgaaatggactacatgatacaccgtacgcgacctcattgctatagttaattacaaatctttaaagaatactattattattttgcatgaggtcttgacgacttcttcaaaacttactcttttttcgcctctctcattcattttactgaactaaaaaaatcatactatttttttttctaacttgtgctcctcgtggaccttttttttttttgtgcgtgtacaaaccatctatagttacattaaatattttatagaatagtgtgtgtatacatacacacaagcagtatgggtacactgtcatgatttttttattttttttggatgcagatactgtcatgttttgttaatcaataataatcgttgtaaattgaattttgattttaagatatgaatttgatatacttttttttagtgatttgaaagtggatgcaactgactaggagtattttgtttttgtttgtgaatggtcagagaacccttctaa

SEQ ID NO: 24195 - DNA, 990 bp, Glycine max
  Intron number 1 from transcript Glyma09g38800.1 (locus Gly ma09g38800) derived from phytozome v7.0 (chr-ID Gm09; pos 44064231 to 44065220)
tccctgatcacatcctcctcgacctcttcctggcgagtaccactacttatcttttctcttctttcttattctaataccgtacttcgtagttaactatggttgtacttgcatgccctttattcatcttttcttgattctgattgattgattgattgcgacatgcccttttgcttttattaacgcctcttctttagatcttctgtaaaaatcaaggtttgctcgtaaattgctgttgttgttgttgcattcgtatcattgaaaggttatgcagctgcaagctctttggcctttcttttcttatcattttctgtaaggaaaaaaaaacttagatatagttattttacctatgttctcctatcaaaatcttagtttgattttattttacccatgttattggtttatagaaaccattattgcatgaatcatagaggtgggattccaattctgattagagaataataccgaaagtacataagaaattgcatctaagttttgtactttttgaaaattccaaggactcacgttaagcaaattatgaaacaaatttcaattctcactggtacaagattgaattgatagttatgttgtttggtctttttgggggatgagggttggttggggacttcctagagtccgattttcctttaactcctgttttctttttcgggatatcaaattttgaagtgtgtttttccctgttgctgtaaacgttgttttggttcttaactggactaaacaagtgaggcttttttttttttaacaagttttttggtttttgtggaatttgtgaatcatgtttcataactgggatgggaatgtcaaatattatggatctggtttctatccttttgttgtctatataaatatgagtgatggctctttcatcctaccctgaagttttattctgtcattatcattcagcatcctcattgcattacatggttttcatggacagagaatattgaaggctgggaagctgactgagaaagt

SEQ ID NO: 24196 - DNA, 609 bp, Glycine max
  Intron number 2 from transcript Glyma09g06450.1 (locus Gly ma09g06450) derived from phytozome v7.0 (chr-ID Gm09; pos 5182158 to 5182766)
aagacgccgcaatctgcctctaaattgaaaaggtattacaaattgttttgtttgttctaattggagttagtgcgtgttttgttagcttattttgaagaaataatagctttttgagtgaatgttttaagaacaagcaattattcctagaaataatctcttacgatactgcacttattaggttgattattaatagggtcaccttgtgaaagctctcttatttgtatattaatgatgaaataaacctcttgtttactttcattactctgtcaagtaacaatgaaaatcaaattcaaatactcctagttcacgcagcaactttctggttgttgctttattttggctttcattcaggtggggatttttttttaaataaaagaaattaaattcatgctatgaattctgtttaagtgtgtttgtcaactttgagttacagtggttcctgataatgtactccttttttttaaatgattatatacaattaaatgtttttatcaggcttgtataaatctttgttttgttttgtcgggagttgataaaaataaaaaatttgctttgctctctgccccttttgcaggaaaagggaagaaggtaaaggtaagaaaaaaaaga

SEQ ID NO: 24197 - DNA, 409 bp, Glycine max
  Intron number 3 from transcript Glyma09g06450.1 (locus Gly ma09g06450) derived from phytozome v7.0 (chr-ID Gm09; pos 5182845 to 5183253)
aaggggaaggttagattaaacgtattttaaaattacaatttatgtggaagactggaactttgatgtgtgacgatgatttactctggttttcattagttgtttcttttctgtaaggctttattgtgtgcttatgatcagcttcataaagttttcttattagttttggctttttattctttaattagatgctgtacttgaattctattttactttatagaagtttaaacaaaatcctttcgtcaggctattgttatatagatttaattatttgtttctgattgcatgctctgccactctctgactgattatttgtttttctgcaatctcccctttttcattagcatgagataattatataattgtatctttttgatgaagttgttactctttgttttcttagggtttgacc

SEQ ID NO: 24198 - DNA, 1022 bp, Glycine max
  Intron number 1 from transcript Glyma09g02120.1 (locus Gly ma09g02120) derived from phytozome v7.0 (chr-ID Gm09; pos 1403483 to 1404504 reverse strand)
aaagctcagcaaacagaaatccaggtaagtcacccttctgctttctaacttgtcaataaattacaaatgttgtagttgtggtagtaatggtaccaagaaaatcacaattatttggctaggtggttagttctatgatcataattctttggatggataaacgagaggatactagggaaggttgtttgatcatgagcaagaaggtggttctctatttcagttacactgcaaaattaacttagagtaatgctaaagtgacattgattgtgccttgaaagatatgattgttaattttttgtttccctagagtaccaaccaaggtgttaaattttggctggttactttgtggttattgtgactggatgcggttggatgctgccattgcaggctgcaatcaaggtgtgatgtggctgtggccccaaagctagggttgctgtctgcattttaaaaccctgcccctggaccttttgataggaacaatatttgaaagatagagcttagtcatagtgaacaacaaagaatgccaatggagaaatctctatttgttttaccgtagagtaattctctgtataattaagcctaattaaaggtgcggttttctaaggagcataattaagcatttatttaataatctcttatcaaattagagcatacttataagctacttccataagtccaaataagttcttcctaattctcccttatctgcctttgagtgtaaactgactgaccatcacattttcatttactggacattagaatcttgtttattttaaattacagtccaacaaagttgatatggcctttacattaatatgaaatttatattaattcatgtggtaagtattgatgggctttaactattcagaactcttgcacatttacatctactcagtttttgagttggctatgatatagcttattagcttaaaatcattgaatatcttgaacaatttaatcacctttactgagctctttgtttttcttcttatcaacccttgcagaaagcactatattctcaagca

SEQ ID NO: 24199 - DNA, 428 bp, Glycine max
  Intron number 1 from transcript Glyma09g07550.1 (locus Gly ma09g07550) derived from phytozome v7.0 (chr-ID Gm09; pos 6457390 to 6457817)
attgctttgtaaatgtaagtctacgtggcagttatttacttattcattttttttacgacgagagacatattagtaaggtagtggctcttttgaatatactctttattattagttggaaattataagaaattacaattttgttttttggatttcacttcttatgtaataaatctcacttataattttgtaatttaataatatggagtgagtctcagttataattttgttagtaatagtaacactccttagtggatggatatagccaatattgaaatgtatgaaacctggccattccgctagaaaacatttggatggatataatatagtgctgtactaattaatttatatagtaggaattgtcaaccttattttcttcttcttttactttattgtttacctaattaatatatttgggtctcagggttgtg

SEQ ID NO: 24200 - DNA, 1008 bp, Glycine max
  Intron number 1 from transcript Glyma10g04320.1 (locus Gly ma10g04320) derived from phytozome v7.0 (chr-ID Gm10; pos 3292938 to 3293945)
catttaggtatgtatgaatatttaatcatccaaagcttctgtttttaatcacaaaatgtaattttttttaatttatttcttctttttgtatggatttctgaggtgcccttttttggttttgatttattggtggatcgaattagtttttctatcacttatactcaaaatctgagctttggatgaatgggggtgctgtgaatttagatatgtttgatgaaatctccttagcaagttggaaactttctctgtgttattgttagagctgtttgttagcgatttattgggttggctaatggaaaggtgcatgcttgtcatttaggtgtcggtggaaaatctggggtgaagttgtctaaaagagagggtgatttggaaattttttatttctgtggttcccggaagatgaagttttatactttatatttgaattagggtcttttaagtggacgttgttgtcattccatgattattttactggaatttttgaaccgaaaattctttctgctttagttgactttgacttgtcttgcatgcatcattttcattggggataggcctatgttactagttccacaaaggtaaggtggcatgtaccctttgcttggtcaataataacctctttgtagttttgtacctgacccttcttcctccattccatcttcctatggttttttgttgctgttggattcatcgaagtttatgtctaatgcctcctatagtgtgatattcaaatagacatatgtacaagaatcattagtcatgatatgtttttgcgtgaagagaagcttgtgttactacatctggaatatttatcaacattttagtctaccatgcacttgagtcctgtttaattgatttaaataaatgaatatataggactaaatagggggactatcttatacatttaagtcatttcccagtgctttgtttagaattcttttctggtttgtgtaatattagtttattgtatgttttttcttgagcaggtcagacagatactacttctgtgaa

SEQ ID NO: 24201 - DNA, 731 bp, Glycine max
  Intron number 4 from transcript Glyma09g00310.1 (locus Gly ma09g00310) derived from phytozome v7.0 (chr-ID Gm09; pos 79926 to 80656)
gcaaacccatccgtgtcaataaggtatgaatacttacttataccaacgggtacaactctcctgtgcttgcttcccttctgaattcaagtttttattttcttccattctaaaatgtttggtatgtgtgattgaaagtattaatgcaaaacaaataacaaaacaaaaacagtcatttactaactgattcatgatttccgtgaatctctatgaccacttcttcttgaggggtgttagttctcttgtatctcaggactctaggcttatttatagccttttgaatgagaatgtgtgctaactgctaaacaattttgttacataaccattatagtgccaccataacactataatgcggcatttttcaacacctctgccattggcaatttgtgaatggaggccaactatggcctgtttatgtgacagaattctggcattctgcctttgataaccttggtgctaagtactaactactaggtagtattgaacttttatcgtatgccattgctagatatcattttatataattgaatctcttattttttacatagtgattattctttcatatctgtattttatttgtacgaactttgtagtactctccattcaagtcctgctatatttcttccttgtattaacacccatgccacttgattaacaaaatatttagtttctatgctgcttgattgattttacaattttttggttccaggcatcccaagataaaaagagcttgg

SEQ ID NO: 24202 - DNA, 762 bp, Glycine max
  Intron number 1 from transcript Glyma09g24980.1 (locus Gly ma09g24980) derived from phytozome v7.0 (chr-ID Gm09; pos 31045195 to 31045956 reverse strand)
gctctgacctcactgccattgttacaggttaacttttgatggaaaatgggtttccttgatttgttctgttcttccttaatttactcatgattggtttcttgttcttatgagatgggaaattccccttcatgttaaaaatgttaactttatttgaaagggtatatatttcaaaccttagtttgagaattttgtttttgtaggaatgagtacattgaagaggaatatgaaatgctatgtcttttttttattctttcttgatgattattgctcaagacttcacacttacctttgagacatgcatgcattgttttgcttttattttaatgagtgctagtgctttatgcatttggcaatgaggttttaaattgcagttgcggatgtagttttattgcaatccttgatattgtgaaaaattgtgcacaaatgcagctactgcagccacaattgtagttgtgactggacctcggagaccttgatgttgcagctgcaattgtggttgtggaggaggaaaaagttaatgtatttctatcgattgctattgttatggttgcttgttggctagaatatacttaggtatgtatgtcaagtatgttgttgtagatttgggggatatatgttggtggaattaattcatcacagtgctcaatttgattctggtaatgcttgtctttttctgtgtttttggtgcaaatgacttatcttcattgtgtggtgcatgctgctgcaggggcaacaagtggtattggtgttgaaactgcacgt

SEQ ID NO: 24203 - DNA, 883 bp, Glycine max
  Intron number 3 from transcript Glyma10g41000.2 (locus Gly ma10g41000) derived from phytozome v7.0 (chr-ID Gm10; pos 48204637 to 48205519 reverse strand)
aagaagtgattaagttttttgaaactcaccataaggtaatataaacacactgacacatgaagtttcaagttcttatgtttatgccttttctgtagtttatttattataatacaaaatcaataatgtattgtacggaatgttgtttgtttcatttaaaattgtctattctataaaatattgtaattatttgattgatttcattgtaattatttccttttatttgctgtacatagaaggccactagaagcgccagtgaggtgagtagattgcatggtttttagaatagggagagcaaaaaggagagggatctcatggtgaattcaaagatttggtctttaaccaagccaaatgatgtcatgtaatctatgtagtcaacctcacctagtgggataaggcatttgttgttattgttgtattagtttcacataattaggattagaataattagttcaaatatcttgtagatcttgtaatattcttgccctaattgtgggaaacctcttgtacaaaatttctacacacacacacactcaatatgattggcctgggactggaagactctgctaagcaagttttcagtcaaaaatttattccttgactctgtttcaagtatcaaaatattctggattatgacttatgaacacatgcttcatatattctgtctgtcattgcatattttgtagtttgatagcaagtttcaattttgtgagaggtattgctcagaacttgacttgtatggtgtttcttttatcaaagtgcctcaagctttgaaacttaatgaacctttgtccttatcattttcttgtttagttttgcatttgactttttttctttttctctatatgcaggataaatacaaagtttataatctttgttctgagcg

SEQ ID NO: 24204 - DNA, 615 bp, Glycine max
  Intron number 1 from transcript Glyma09g16640.1 (locus Gly ma09g16640) derived from phytozome v7.0 (chr-ID Gm09; pos 19978864 to 19979478 reverse strand)
gtggaggaggtaacacttattttttttaccttaaaggaatgtaattagcaacatgacaattgatacttgacacacattatttattgagcattaaatgttgtgtgacttcatttgaagggtcatgattatgaacgttgtttggaacaagtgaaaagacaagcaattatttgtgaaaaattagaattaaaagaaaatgttacattaccttgtttgagaaaggagaattggcaaagaatagaaaaaaaaaggagaatattaaatataagttttatgaatatccctaaaatacattcaaactcaaattaattctggattaccatgtaactaaaattttctctagattttcattcctctcacttatatatcataggaatgtataagtatgacaaattgcttagctatttggcacaacttatccagaaataaatcataactttataatttaatatcgtaattattcgattaacattatctcgacaaaataatgacataatgtttgttgttcctgcatggttcctaactatagttaagtatctttagtatcctaggttaagtcttaatttacattatagtaacctttgaattcaggaggtgacagaggcgagcctaggggta

SEQ ID NO: 24205 - DNA, 678 bp, Glycine max
  Intron number 1 from transcript Glyma10g42820.2 (locus Gly ma10g42820) derived from phytozome v7.0 (chr-ID Gm10; pos 49672473 to 49673150 reverse strand)
caagctgtctctgtctttctaggttcttgtttttttcaaatcccttatcttttccttattattcgcctttccttctttctcttcatgggtgtctctttctgctgtacgtgatttcctttcggtttacttccccttcttcttttcgcaatcttcaatttgcctgttcgcgttttttgtgtttttgttttcctatcaaaatattgtctatgctttcatgagaaatatacatgcattaacataaacatcctctcaaaacatgtatgagttcatggagtggatgattaaggcggttaacttctgaatattgcttttttgttccttgttgcgtacatacagaaaaataaaatcctgtctctcttattcttctttttccttttctcttggaacttggaagggggaatggcttgattggatagatatgacatcttgattttgttaggtttttatcactcttttttttttttttttgtttaacccatatttttactgtatataagtgatttttttttttttttacataaaatatgtcttactcaaatttgagttagaattttgtgttccttttttttctacttgtaaggattttcgtgagatatatggttcatttgatgtttagtttgagtttgttgacttgatgcaacagtcacagttgggttggttggtaccaaaggtgaggca

SEQ ID NO: 24206 - DNA, 1067 bp, Glycine max
  Intron number 2 from transcript Glyma10g28850.1 (locus Gly ma10g28850) derived from phytozome v7.0 (chr-ID Gm10; pos 37736552 to 37737618 reverse strand)
tggaggaaaattcacctggaatactggaaattgaggtatatttctcattatatataccagtattttagaaagaaaaaaaaatgatgacccagtaaagtatacgataattttttataataaaaaaatatacattggacttttacatataaaatttgatttcattttaaaaaattactcctattgtgaggaaaaaaagtaatttttctacaattttaaatgtatattaatataatagttagtaataaatattatttttaaaagcataggtatatatgatatgataattgatcattcataatatgttaatttttatttattatttgttacaaaacgagtaataaagtagtaggctaaggatggtaaagaagtggaaagtggaccaagataaataaaaaatgaaatagcaatgtcacgcattgccacttgagctcttcgttttttattacataaattaaataattaagtagataatatctatcacaaaaaagtacaaagtagggaggttaacataatcacaaatcaagctcagtggataacgaatccaagtatccaacgatcatcactaaacaatcaacaatttcattcgttctacgattattttaattgaataaatgtaaaatttaaaagtgtaaattaaaagagtagaatatttaaaattataggaagatatatatataaatatatatatatatatatatatatatatatatatataattgctagataaaattttaaaaattataaattaaaaataaattttaaataaaaatcttgtcatgtttttgaaaatgaaatgcataataaattatttgattttttaaattaattattttttataaatagatattaaatttagtacacagaaaaatataaactaatgcaatatttacactttgaagttcatacggctttcagggaaagaagcatgcatattcagatagtaaaatcaaataaattttattcacccaacagtttaagtgtttcaaaatagtttatgcctctcttatgtccataaaattattttccctgcagctagacaaagtaccgtcgttctttcgcgagattga

SEQ ID NO: 24207 - DNA, 805 bp, Glycine max
  Intron number 2 from transcript Glyma09g38380.1 (locus Gly ma09g38380) derived from phytozome v7.0 (chr-ID Gm09; pos 43760565 to 43761369)
caagtgattgggcactacaaggtacttcatgtctttagctaaaatataagctaaaaaaatgtaacttattttagcagagcgtttcagtgagtgtttgaattcgcgtaaattgaaatattagttaacgtggatttaggtaaatgttcacatgtttgatttttggttgaggttgaggaattgattctgtgtccaaaattgatttaaagttgaaacaattttaagtagcttttgtgttggataaaaaatttcgtactcaactttactactaacttgcttttagaaagaaaagaaatccaaatgtagaccacatcacttcaaaattaattttacaagcatccatccaaatagacatatgtgttttaattcattcatcgagcattggatgtgacatgatgctattacagtgtatttgtttctgagtcaatgaacactttacgagcattccatcagaagctttaaactattgcttttgcgtaaatgaataaatttgacgtgttttcactactgtatgtgcatattggatgtgtatccaaacacactcttaatctttacagtaagactgacatgcatgtaactctctccaattataggtcaagccccttgtatggtaagttgaaggagtaatttgaggagttagatattgagttttgaactgcaaagttgttttctgctattgacttatagttgaattgaaggggttcctcgggttttaggcttacaatatgtcatcattagtttggattagttggtataaagtagcacataacttggtattattttgcagatttttattccctgaggaagg

SEQ ID NO: 24208 - DNA, 535 bp, Glycine max; identical to SEQ ID NO: 23345
  Intron number 1 from transcript Glyma12g00270.1 (locus Gly ma12g00270) derived from phytozome v7.0 (chr-ID Gm12; pos 50888 to 51422 reverse strand)

SEQ ID NO: 24209 - DNA, 927 bp, Glycine max
  Intron number 3 from transcript Glyma10g00890.1 (locus Gly ma10g00890) derived from phytozome v7.0 (chr-ID Gm10; pos 619815 to 620741 reverse strand)
ttacttaccttattgagcaggtctttttttctctcttttttttattgttgcgattttcgtcgtcgttgttgctattgttaattgtggtgtcaaggtcttaaattgcggttgtggttattacaatccttaacattgtgtgaaattatggatggttgactgcatttgtggttgtggagaactcaataatgtggttgaagttgtaggtttagactttatactgtgttttaaaacatggtgtagtggtgtaaatacgcaatttgcatgtgaaatgtttgttgtgttgttcttgtcatttggaattgttgagttcctagcctttggtgaataattataataggagaatttggttttttattaagtttagtctgatgaggatattgctgttgtttgaaattgtcaaacttcctgtgctttgtctatttgataaagaatgacctaagaataataggtggaaccaagttaccatttgtatagcttagatattcttatgatgttaacggaaaaacagagtggtttgtcttgagccctgtggagggaaggaaagaaaaagagggtcattggtggaaacaaaatgcatttcatcttttttcttcgccattctgctccatcgtactttaaacaattcaaactacggagtctattttcattattctgttctgttccactgcatctcttttcatcaatcccaaaagtctaacaagtttatcttttagaaacccgtgcaagggaactctttaagagaaaagaaatacaagtaaaatcttttgtaaactaaatatattttcccttttcattgttatttatttgattattgcaagggaatgaatgaatatgcataaacaattattctcttgtgatatttgagtgatgattcttttatttattttgtcagaacaaggcacaactggttgtgattgctcacgacgt

SEQ ID NO: 24210 - DNA, 991 bp, Glycine max
  Intron number 1 from transcript Glyma09g29870.1 (locus Gly ma09g29870) derived from phytozome v7.0 (chr-ID Gm09; pos 36762127 to 36763117 reverse strand)
caatacagattttcactcttacagctctcagtttggtatttgactctattcatttctcatcttgttcttacccttttgtgagaatctcctctccagtgcccccctgacgaagaagctctaaaaaatgcagtcttccacttaatttggtgcaaaaaaagctggttggggggggggggggggggggggggtagagttttgactcttcactgggaaatccgcttcccaacaggtttctgaattctgtgtgttgttgttttccttgattattgcttgatcattgcctttacatcgggctagaattcttccactgattccaaagttaattgctatttctgaatgctatataatacagtaatgtgtgtgtgtgcgctaagtttttggaatgcatgttggaatgctaagtttttgtactataggttttggtaagtggttccctaattggtttctttcaagctccagaggattttacataagggaattcattacttttatcttgaatgatagtatgggggagatcctaacttcataactatatttcactatttgttttggtaagttgcaaaactagaatagctactccgtttaatcgttgtatgattacaaatcctcattatcttattgctgttttatggtcccgaaatgttagaacttagaagtcgtcatctggaaaataaattgctgccaattgagatttggttaagaatcaatttggattataagtgcaagggaaagataataccggtacccctatgctgcatcaatatcaatctggttgtgttactgctgtacagtatattagtgtttgtttttttttcatactgcactaaatcactaatcactttctagttactattttataatttatattctcccttttcacatttcaagttaaattgcagtatttgatttaaaattgctgatatgacacagaaacttatgtattggatgttttgctaaattcatgaaaaaaatgcagaattatcaaggaagc

SEQ ID NO: 24211 - DNA, 798 bp, Glycine max
  Intron number 2 from transcript Glyma10g29920.1 (locus Gly ma10g29920) derived from phytozome v7.0 (chr-ID Gm10; pos 38661089 to 38661886)
acctccccctccggcgacttctgcaccgacggacggtgaatgccactttctttgtttttctttttaattctttaaatgttgtgttttcagattttctctgctttattcctctttacttttagatttttgttgagtgaaacgcttttgatttccgccaaaaacttcttcttaatttttttttaaaattatatttcaaccaataacatttaaaccggtgatttcgttaagggctcatttttagttgttaatttctttgttgctagacttctgaattctgaatctgtgaccatgtcttaaatcataatcctttttttttacaagtacattttactttcgtttcgacccctgaccctgatctgaggttttagttaccatgggatgccattatcaatgagatttctccaacagttaaacagaattggacttgcagtccaacattaacatttcaattatgactccatcacatcaagttagttcagaatattgaatatatagaggaaggatgatgatgtggtacaagttcaaaatataatgttagttttggacttgtttttatgtgtaggtcgtaattttatctaattttgcatgttattacttgtctaaaagtaaatactagttttatcactgattggccatggtgaactgggctctcatctaacaaccggtccatatttaaaaacactactgtaatgctcccacccttttaatcttttgattcacttttatgttttggcaaaagttttcaattttcatgaccagaattgtgccctttcttatgttagggtaaaggataaaggg

SEQ ID NO: 24212 - DNA, 918 bp, Glycine max
  Intron number 2 from transcript Glyma12g24840.1 (locus Gly ma12g24840) derived from phytozome v7.0 (chr-ID Gm12; pos 27643860 to 27644777)
gtgttatagtagagactgagaagaggtaaaagttcactttttgtatccattgtattaggttttgaatactttagagccgtttgatttgagaaacattttttgttttcgttttctatttcaaatttgtataggaaaagtggaaaagaattgttttcaatattttctatacaaacttctaaacacagaacacattaacaggtggcatttttttttaaaatgaaaacaggacaagttttctcaaactaaacaccctctatggtttctatacattccaggacccataatgaaaatctcatagtgattctatctcgctcaaacaggattatctctatcctccgatagatgacacatgtgatttatataaaaaaagactcaaatgtaattttgattttcttattttgtttaatccgtaattttggtcttttcattttaaaataaacatttaatcttttaaaaaattcacaattttagttcttatattttaaaataaagacatttgattcttttattttagaaaattcacaattttgattctcatattttaaaaaattaatgatttcgatgcaatcttcaattttatttacgttttattttatttatttcttacattatagttaattaaatcattttttgatgatatattaaattgagaattggactaaaattaaaaaatttgtaaaatagaaggtcaaatctttttattttgaaatagaagattaaaattgcatattctttaaaacagatgtcaaatgtttttattttaaaatggagagactaaaattatgaattaatcaaaaccgggggaccaaaattgcatttaagcctaaaaaaaatgccacagcaagaaatgaaaagcctattataactgtgttctcttttccatttcttttcctccccagctacatcgagactgttgac

SEQ ID NO: 24213 - DNA, 278 bp, Glycine max
  Intron number 2 from transcript Glyma09g27490.1 (locus Gly ma09g27490) derived from phytozome v7.0 (chr-ID Gm09; pos 34326099 to 34326376)
cttttgttgtcaacataggtgacaccttcgtatgtttgatctctctttgaatgcacctatcttaatttggcaaacaatgatttttcctcgatgatgtttgtttttatcggtaagtgtttgttattaattttgttagcagagaggattgaatttgtgatttttcttctctttccttcttctttaaccattcaactcatcttatatatcctttttgtgtaatgtttttgttattcttattcttattcaacctttttctattattgtgtaggctctttcaa

SEQ ID NO: 24214 - DNA, 432 bp, Glycine max
  Intron number 1 from transcript Glyma12g10930.1 (locus Gly ma12g10930) derived from phytozome v7.0 (chr-ID Gm12; pos 8939662 to 8940093)
aacccggttttcaccaggtaaaaaatagtttgaacttttgaaatgatgaatattttgggagatttgatgattgtcttccttttgatctgtcttattggtgcatgtctggtaataatataaagtttttttttacactactatctgatcatgaattttttatatatgataagtttattaatttttataatatttatttttaaagtcatatcaaagatgatttctgattagttgacatataagaatttttataatgacactgaatcaaaattgaactcttgttttttttggggaaagaatattttacataaaaagttcttttatgaatttaacaaaaagattatttggtcatgataagctgaattaatcttttacccttgtgattatgaaattggatcaggtagatttaaagggaaatacctttggcctattggc

SEQ ID NO: 24215 - DNA, 604 bp, Glycine max
  Intron number 3 from transcript Glyma09g08650.1 (locus Gly ma09g08650) derived from phytozome v7.0 (chr-ID Gm09; pos 7975802 to 7976405)
caagttatctattgagaagagcaagtaccttggaggtttgtattgtactattgtttgctatacttgtaccaattgccgtctcggtttgccaaagcaaataaacttaagtaaaagttggttttcttcctcacattggggaactattaaggtttgaggtctcttttattgttgcgtatgtgtaaagaatgctaattgttgtagtagatttgtttctgggagggtttggtgttggggattgggttttgacagtacattgaaacctaagcataagatgcattgaaatttgaaattcaagattcggtatgctctgatttttcgccttcatcctggacaccggtgaaggtggtcttaaatttttatatatcttagagtagatatcaatcatatcatgtgtataggttttcaaggtggttgggattgaattccctgtgccataggcctccataacctttgatatgctattataaaggagtaagtttctctattattgctgacctgattgtgaagtcaatatatatgtgaatgatctttgctttagctaaaagattaagcataaattgaaatgtttatgctaataacttagtatgttgatatttgtcaggtg

SEQ ID NO: 24216 - DNA, 524 bp, Glycine max
  Intron number 3 from transcript Glyma09g41230.1 (locus Gly ma09g41230) derived from phytozome v7.0 (chr-ID Gm09; pos 45920747 to 45921270 reverse strand)
tatattctgtgaaatatttttttaagctcaattttgtaatgattctttatttaaatatgtttcatgaatttctgttcaaactcggaagcaagtactgctacatatactataggcacttagttttgtcatttgtgccatctattgtgtatttatgctttacatggaacaaattaggtccacagttctgtcatttgtgtcatctattgtgcagaactttgacattatcaatttttcctgcccctttctagaagtaaacctaaatgcacttatcggtgctacatttgtcatacttcttctcccttttcctcaactttacattttgatatgcaatgcacattaggtatattcttttgatctctatttggaatccttgcatcagcattggcctgtactggaagaattcatacttataacttaggagtggtagttacacgtcttttatgattttttatcattagtagcttcatgttggtttgttgtacacagtttaactcttttcttaactttccttgaatacactcagg

SEQ ID NO: 24217 - DNA, 1009 bp, Glycine max
  Intron number 1 from transcript Glyma11g06920.1 (locus Gly ma11g06920) derived from phytozome v7.0 (chr-ID Gm11; pos 4884370 to 4885378 reverse strand)
actggaactcaaggaggaggccaagaaactactgcgtaagatttctttttcttttttctttcttgttagattctatgatttgtgaatgtcggttgaatttggactttatttggtggcatgcattgttctttatttgacagattgtgtgtacgaatgtgttagtagaatctctttctctgcattgttttagaattccattagatttaacttggaattcgtgcaatgcattttgaacgcacatgctcttaattgatgtcccacacattgatttgattgttgataaatactgcgtcgttgtttttatttactgaagagggagaaagcgtgttaatgtttattgctattgcttaatatgattgcctgggatgttgatttccaagatgaatgaagcatttgcaaacgccatagcaaattacttaatagaccataatacaattagctatgcaagttttatgcatttgattatttttggtcttaattgatgttaagagagagctttcttcgggtgtttcagactgttatctctggcttcacttgctttaattgatgaattgtgtgatttaagaaaaagaaaattccaatgtattcttgagtttgatacatatagcatctagattaccaaccttgtgaattttaagttacaatgtcttggattatatatagagatggttatataaagttcagggtataatatgctgagctagtgagcttgttaagggataaccacatttttttgtaagacagaatcttcgctcctttgaagggatgttcttttatgttgataaagtaactataatgtatatcagacaagcaaataagccaaaattgaatgagtaatttatagaagtgcatgtctgcagttcagaaacaaagacttatttagtttatattacacttgatgatggaaattggaacggtctcttagacaatactgcttggaaaccaatatcgaaaacttagttttgtggtttttattgcagttggacggcaatcactcagctggtgcatc

SEQ ID NO: 24218 - DNA, 462 bp, Glycine max
  Intron number 1 from transcript Glyma09g34660.1 (locus Gly ma09g34660) derived from phytozome v7.0 (chr-ID Gm09; pos 40997157 to 40997618 reverse strand)
ttgtccagaaccacaagtgagttcaactttgttaaatcgcatttatccttttaatttgttttgagtttatattctttccattattgatattttcaactaagtgtacaatgtgaccgtgtcttcttgacgtttctttcctttcaaatgctttcttaatatctactgtaaactttttacgggaatatactgtgaagggaataaaaagatggtgttgtgtaaaatttcaagaaaccaaagggtgtggcattcgatatcaatttgttttgttattgaaaggttagagatgatgggtattcaccttatattctttattctacatttgtaaactagttgagtggttttccccagtgtgggggcacttttgcttgtgatcataactgaatttcttttcatattggaggttagttgatgatttggttgtttaatttgtcgtgaacaggattattatcatcattgacctag

SEQ ID NO: 24219 - DNA, 920 bp, Glycine max
  Intron number 1 from transcript Glyma09g17010.1 (locus Gly ma09g17010) derived from phytozome v7.0 (chr-ID Gm09; pos 20741386 to 20742305 reverse strand)
ctgatcattctcccccatcatcacttcattctcctgtaagttactttaactattagttttttttaaaattattaataaactttttaagtgaactgtaacaatgaaaattgcccttgattgttttagtcataaatagcaaatctttggtttcaaactattgaaaatcaatcctcatatatatgttctttaatgtgttcaactgtccattctctagtctagtatgcttttaagttctaactaattttcttctaaattgggtttgaacctaacttaactaaaaaagttacctcattaggttagggtttcccccacttatgtacactgtttttttggtgacatcaattgtcaattgagatctccaacaaattttacatacatttataagtttgatgaaggtctagctcggttgggtagggtgcaagagttattgtaaatcccctttggtacatttatcttcaattcctacagataaaaaaaaatatttataagtttgatgagtgagagtaagcgcttgcacaatggtaaagtagctcggtatgaattcgaattcggaaacagtttctttgcatatgcacgagtaacccataccttctcatagcgaggagtcttatggcaccgggtactttagttttatgagtgttcaggatttgagatctttttggatgtggttggtatttaattgttggtggtagatagatgagtaacactacacttttaaataatatagttgcattatagattggcttttgatgttataagaatgccccttttctgcagcacatttttcatggactcaattagaaagatgtcttgacactttcaaagtcttaaaattgtagatcctatactttcttcaaattttgtcaccatctatttatagctactggtcttatagttgagttgcattacaatgtagggag

SEQ ID NO: 24220 - DNA, 817 bp, Glycine max
  Intron number 3 from transcript Glyma09g27600.1 (locus Gly ma09g27600) derived from phytozome v7.0 (chr-ID Gm09; pos 34453611 to 34454427 reverse strand)
agcatagcaattggagctgctgaaggtttagcgtaagtgtatcttcccctctatatttaatttcctcaaaaatccacatattcttttcacttcctaatagtttcatgttatggttgaaaattccccaatgaaaacacatgatatatgtaagaaatcagatgacaatatccattgaacagtttacttagttttttttaaaaaaaattatggtttaaccgtagttatggttgcatatataacgattagcaaaatggcaggcaaatacaaataccttatggaccacaatttaaaactgagtttgagaaaaaattattaggtggtatatatggcctattttaatctccataggacacacagttgagtttttttttttttttttgacggaaaaatttgagtacatgcatgtcacaaagattgatcgtgcatgttcggtagctagttgatgatttgagaatgggccaattcaagtcttctaacattgaagtgagttagtatttttagttttagattgagaattgcacatttgtccaaaaagtctaaggctctatgtactaatgcgctccaaattatgtatgaacctaacctttcttttttagtccatgtgagacttctttattttataataacaataggcttgtgtttaagcattatttctagaccaaaaacaactgcttctaaacagtgcaaaaaatatctaaagaattgtatttgattttctccctaaaaatattccatttttggttgcatcattaagattaatatttaaattattaaacttttgtcaatctatttttcttttggacaaggtatctgcacc

SEQ ID NO: 24221 - DNA, 973 bp, Glycine max
  Intron number 4 from transcript Glyma11g07870.1 (locus Gly ma11g07870) derived from phytozome v7.0 (chr-ID Gm11; pos 5537168 to 5538140 reverse strand)
tgctggttctgttgccgttgctgcatcatttggaggtacatgtttccttatatgtgattgggctttactataatcttctcatgttgtgctatcatgccttcaatttatacagaaattaaatagccttttgtaaatttctagtgtagtttaaggatactatcagaaccaccgactaccaagtcattatccataaatttatgtgtcttggtggtgtattatctttaactgctacattaacttgcatctttaattaagtgcattgtatgtgtgattgtacccctcctttttggtacctctggtacctaacttactaatatatacacatttgaatttgctgattacaaaaacaaaacattaattgctttatggcattgtttgattcgtgtaactaatacccctagtagaaaaaggcttggttgtttacactttacagtaattgcttcaatgaaataagttagataattgtcagtcaagctgcaaaaggaactctttgaattgcctttataagagaagttatagaggttatatgggattttttttcttaaattttaaatagtcaagaggagttaagcatgcccttacctcctatatgctattatcttgaagacagtacgtggctatttggtttagcgttaaagtagaattgattttgaaaatgctgagagagaaattgcactgtaatgtgtattttctattagaaagtgtgagaattgatttctaactgtacaacaaatggagtctacgtttagccactaatttacaatattcctttgcaaattgccatacaagctagttatgttattcagatgtatttatgatctatattgcaaataaacaactcactttcttgcagtttttttttttgtgtgtgtgtgtgtgtttctgttggtgatgctccttttttagacgatgaaaatactttatgtatcactttgttttactagctgctggagctggactcagtggaagcaaa

SEQ ID NO: 24222 - DNA, 644 bp, Glycine max
  Intron number 1 from transcript Glyma10g04500.1 (locus Gly ma10g04500) derived from phytozome v7.0 (chr-ID Gm10; pos 3467773 to 3468416)
tgcaccctctgcttttctttctggaaattcaaacggtgagagctttcttttctcttgttttcttttacactctactggtttcacacggttcaagttcaaagtttaaaccttttgctcaactgaattcactagcaaattttgtggaaatgatttgccttttttccctccttcttatgaattttatagttgctgagtcattgtgggtcggtttcaattttgtgaatttggctccattatcctttttctcaattttatttgacatatacaaattttaaaggggtttgcgtcaatacaacagaacgaagatgagggaatctgaatgggtttgactcgaattttactttttagtggtggggtttgtggtttttgacttaaagggttatacttgttttctaattactttataatctttctgttgtgtttgtttttcctgttatgggatttcaattccactgcatacagtttacccagtacgaacatttttgttggaaattccaaatttgcggcgctcttgatttttgcttaatctaaatgcatgaacaggagagtataaggttctgaaacggttgttttttgtgatgtctgagatttgaattgtgtgtgacattgctggatttgcagaattttgagtgaagaggagaagt

SEQ ID NO: 24223 - DNA, 600 bp, Glycine max
  Intron number 2 from transcript Glyma12g03070.1 (locus Gly ma12g03070) derived from phytozome v7.0 (chr-ID Gm12; pos 1973762 to 1974361)
agctgtggttccgccatccaagtctgccaagaagggtattggaaatttcctctatttcgcagttatgccgtcgtgttttgttttgttttgtctttttagattatttaatatttatattatgaatgctttgttttataggttgtagtaattggcatgtttagttttcagttgggaggcgctgacatcggaaatctgagcaagcccttttttgtttggttttcagtctgtttctgttgtatactaagtttttcttcaattttgtctcgaagctcagtttgcaatgtaaaataagaactggttgttgtttttgttaattctgtttgcataatgaatttcattcatgcaaccttaaatccaaacatgcaccttttattctctgtgactgtctgatttttatttttattttttttttctatcgtgtgttctagttatcttttttttgtgcgattagggtaaagccttgctagtactgttaactggttactcaaatgcgataaattgagattttggactttttttatagattttttgtgcttttgttaatgattgtttcctcttgctgttttgatctttatgcaggaggcaagagacaagctcaag

SEQ ID NO: 24224 - DNA, 526 bp, Glycine max
  Intron number 3 from transcript Glyma12g13240.1 (locus Gly ma12g13240) derived from phytozome v7.0 (chr-ID Gm12; pos 11571991 to 11572516 reverse strand)
ccctgaaaccagtagttttggttggtgggttgcaggtatgtaccaaatttgaatctgaaatatcgtattttttttaatttgtattttctttagtttataacacatatttggctcatatcactttgggtttatgtttgttaggcattattttatttgatacaatgacaaataattatttgaattgtcagctacatgaataattgttaattttgtcaccttgaaccttttgtatgggttttacatagtttacaaatgatactgtatagaatagtcttgatttactaatttgtgagcatattagcgtttagtcaactgcatttagtaatgcctatacacaaattatcttgaataccaattctctatagatattatccattatgactgcctaatttaggtttgggaatttctacttcctaagttttggctcttagctttccccccttattatcatgttttatttttacgtttacttactacggtactcttcttgttaacaggatagtttctttgctagtttccttttggg

SEQ ID NO: 24225 - DNA, 880 bp, Glycine max
  Intron number 1 from transcript Glyma12g13240.1 (locus Gly ma12g13240) derived from phytozome v7.0 (chr-ID Gm12; pos 11573388 to 11574267 reverse strand)
tctcacgatctcaacggagccctctcttcaggtattccccttttcttctcccattctctaaactttcttcttcttctttttttttctccacgaattttacttttccattttctgcggatcttcttattttttgttctgtagttagttagtttctcagtgatttttagtagtacttgatttgctatctgatcttctctttaatcggatttcgccgtggtgtccgaaccgggagagtgaagcgaaatttagcaagtagaataacgagtttgtgatttgtgaggatgagatcaacagttctaggatttgaatttgtagtgttgtttgcttcgtgtttagtcagatactcagcattctgctagaatttcgctacgaatgaacttggaggtcttcatcaattgcttttttaagtagtgatgttgaattcatgtattgggttttgtttacgaagtattgcactatttacaaaaaaagaaaatgcatttcctgtatttgtatgatttgtgtatgcttatactaagtttatcaagtattgtgttattacaatgaagaaaatgattttcctgtttttgtatttagtgtttgattgataaaaagggtacttggattgtgaatttcatttatcttatttaacagtgtttctacgtacattcatatctgtgtacatttcgggaatgctttgtaatgcattttttgtatagaatatttaattttaattggagttgccaagtgtatatcagattgtgtgtataatacttccaactgcatttgattttcttttaaagtggtgtttcagtaaggatttattttagctctggtgttgttgaatctgtggcttatttttatgggtgaatgttgacaggtcaccatctagactgcaatc

SEQ ID NO: 24226 - DNA, 416 bp, Glycine max
  Intron number 1 from transcript Glyma10g41740.1 (locus Gly ma10g41740) derived from phytozome v7.0 (chr-ID Gm10; pos 48754101 to 48754516)
atccttgttgcttttatctgcttttcccattttaggttcttaaatgtttccttcacaatttgtgaaacattgtctacttttctgtaaatgtcccaagcccagttccttctcctacatcataaacagaataaaatattcaaaataggtcaagaaaagtgacattgatgatgtgcctaatctaagttctcttcttgtcttaaaatttcaaatgtacagtttactacacttagacggcaaggtctgagttgctctgattgattgtctaatgtctaatattattggtgcaacagtcacaattagcatgccatatttttctctgcttaactttatcgtcacgcttcaaatctgtgttatttgctaaattgtttcttctaattgcagcagttataaagaaagggttgagtttgaaggccaaa

SEQ ID NO: 24227 - DNA, 783 bp, Glycine max
  Intron number 1 from transcript Glyma11g11130.1 (locus Gly ma11g11130) derived from phytozome v7.0 (chr-ID Gm11; pos 7917258 to 7918040)
ttccagagacaggttcgctactttcattccattcctggatcacacttttcgcaatctaataagcttcaattccagctttgcttcagatttggtttactgatagatactctgcctttgtcctacaacattattatgctttcctttgcgcttagtttctcctcatactttgtttttcttcgcaaatcttcaaattgctgctaacacaagcttggattgagtgtgaaataactgtttcatagcgagcgaacccgaatgattcgttagtttaggatagtgttgattggaatttgtggaatgaggctttagtttaggacttctttggaattttttcgttgatttcgattgagcaaagaaatagggatttatacgagctttttctgaaaggaaggtatcttccattgccactttttgttggatagatttgtcttcttggtgctttatgatgttcagctaatcaccttttctctctgtgtgtgtgtgtgtgtgtgtgtgtgtgaagatgtgttcttcctgttttgtttgatgatgttccttttgtctccggaaaccagattccttatttttttttttacttttgtactcctttactctcttcaatttctgtaacttgtgctgtttctccccaaaataagtatgtgcctatacatttccaattatttatattggtcaagattactggattagtaagttattagttctttactatttttttatcaagatgattccttgctgtaatttttttttttgatgtgggacagttatattctctcgaagaaacaactg

SEQ ID NO: 24228 - DNA, 761 bp, Glycine max
  Intron number 2 from transcript Glyma11g11130.1 (locus Gly ma11g11130) derived from phytozome v7.0 (chr-ID Gm11; pos 7918058 to 7918818)
tgccagaaactatataaagggtgcaggaagtttatgtaagtgcttaatggcattcatgtatagagtattagatctgtttttacatgtactaagttaattcttgattttgaatttttatttttatttaggaatgattttcttgaatacagcagaaagaagtatagggctagtttttctcctctgttcatggttgtttcaaggggatttctattgttgatcaaatatgctaagaaattagacagctttgttgcatttgtgagccatgttaactcaccattatcttctgattcttctcgttattctttttaggagaatttcatatctcactctctagttgtactttctctagtttgtttctaatagtattcttccataacttttcaatctgttttttgacacattgaagttggtctattaattaaatgcaaatgtgtttgaactcaaaaattgacgttaccaaacttggccatgaactggtatatgtggaatatctaaatattaatgttcaccaagtttaattaaatgactagagccagggtcttctgtaataataaattttcatctatttgtaattgtagatagttattgattaatgattgtggtggctaaaagatgtggctttaaatgtacaagcaccacattttggttgaaaattttaccaatcaaatttgcccaacaaactatttgttggaaccactgaaggtgaagttattaattctttattctgcaactcctcaggacagctttgggggaagcatata

SEQ ID NO: 24229 - DNA, 735 bp, Glycine max
  Intron number 2 from transcript Glyma10g42490.1 (locus Gly ma10g42490) derived from phytozome v7.0 (chr-ID Gm10; pos 49431432 to 49432166 reverse strand)
actttcctcgcctcaaagattaagcgaacaacgtaacactccgtacactcccttggtttaacattcgaggattttcttatctcgcttaactatttaacgctgattatttgttgtttctttaatttatttatttaactgtcgctttttgcttgtaatgctagtatatcacgttgatggcatgaatctcttcctacaaatgtcgatttcgttatatgtatgtagtttaacctgtgatctagaattacaggctgaagggacttactagtatgtcttgaactgttttaaaattgaaatccttgtataattttttcccctccgtggtaaaattacatgtaattttggatattctcgtgtagcttgtgctacattttgttgtttttgttcaacttgatttaagctatgtagctttgaatgtttaaatgtttaatgtaatccagaattggcgccatgcttgattatacgagcaatttgctttccaaatgccagttgtgatggtgagggtgggatggggtttggcagaggtcacaggcacattcccttgtgaaaaatgaaaaaataaaataaacaatgaattataacttttgggttaggaaaaagaagaattcacttgggaatggggttggtatattctctttctatcagttcttcacttcccctctgctccattaattctctattttttttttaatttatccaacaggttgtccttgctgcatccattgtgagcaaatctgg

SEQ ID NO: 24230 - DNA, 466 bp, Glycine max
  Intron number 4 from transcript Glyma12g35280.1 (locus Gly ma12g35280) derived from phytozome v7.0 (chr-ID Gm12; pos 38392934 to 38393399 reverse strand)
gaggtaagactaatatgtataactgagttttatctaagtgaactaaccttatcatacatttcattttgtaaacagtgattaccacataatatttatcattacgtatcaaatatatttgttttatacaacaaatttaccaaatgtttcgatgggaatacaccatagctctcaattgcaacttaaataggaaaaaacttcaccctaaacaaaactattagcaagcaacatttctcgttaagaatatactcattatattcaaagcctaatcatttatcatttgttgtgtttggaagattacgtgtaatgtttcaattaccgtttgttaaataaaagcttcacttaacggataaaaccaaactatgtataatgttgacaaaatcaacactagaaggctagttaaattgtggaaatagtacttctgattctgcttacttgcagatttgtacgtactgctaccaataggaga

SEQ ID NO: 24231 - DNA, 524 bp, Glycine max
  Intron number 1 from transcript Glyma12g35280.1 (locus Gly ma12g35280) derived from phytozome v7.0 (chr-ID Gm12; pos 38393768 to 38394291 reverse strand)
cgggattttcttcctgcacctggcagtgagagaaaaaaactaaaaaatatccttacatataacctcatacgaatttcatttcatatgagacttatggtccatattatattaaaaatatatttatcgctttaaccaattcagctaataaatcaattatgttaaaaaataattaatttcgttatatataacactaaaatttaaatgtatatttaatacacatataagtttacataataaattttgtaagaattaattttgatctaataatgacatttttacatatataattttttataaacctatgatttttattataccatcttagaattttgatctctttggccgctcgttatcagaccactcataaatgtctgatcacaaattttatgttcaagatattcaatccttgacttgaggatgtgttgaagatcccacactgttggaattgagttatactcattgattcatctggtcttgtgtctaatatatatatataatctgtttacaagtttactatattgaaa

SEQ ID NO: 24232 - DNA, 801 bp, Glycine max
  Intron number 2 from transcript Glyma11g11620.1 (locus Gly ma11g11620) derived from phytozome v7.0 (chr-ID Gm11; pos 8289474 to 8290274)
agtgtagggagtgatctattggggggcttctacaggttccttgccttctctctaatctttattattagtcttcaagttgagatgaagggcttgcagctgattttgtttcataaaatttttaaacttctttctctcatcaaatcatataagatagaataatatacataatacattttcaatgtgaattccaataaataaaaaatgcttaggacactcattagttagcaagacccttactacttttggttgctatagtgcatgaaaatgtatagatctgttgtgttaatatctatgaaatttttaggttaaattacttttttcgtttctaatttattttttaaatttaatttgttcctctagttttttctttcaatttgatcctctattttttcaaatcgattcaatttggtcaacaccattaagaaatcatactttatgactgtttaaaatcttcactaagtgattttaaactgccacaaaatatacattttctaacgccatcaatttaatttaggcgacatgaccaaattgaacagattttaaaaattagaggaccaaattgaacttaaataataaaatagaagacaaaaaaactaatttaaccaagtttttacttaaatatttatcaaagccagttagctggtctcacttataacaccactgtactgtgtactcatcttctggacacaggtttctatgttatttaatgattccatcagttttgttttgggcaagtgagatttgatcaggtttgtttacatttgatttttactttttttagggagaaattacgccgagcaa

SEQ ID NO: 24233 - DNA, 519 bp, Glycine max
  Intron number 2 from transcript Glyma10g32470.1 (locus Gly ma10g32470) derived from phytozome v7.0 (chr-ID Gm10; pos 40941327 to 40941845)
gggaggacaatattgttccaaagagtttccctgtatgtttcttagttagcttagacatagggcacattcactctttcttcacagcttcatgcaacatccttataattgctataatctttaatattttgtttttgctattgctatttggtttagttagttctattaataataatgaactctcttatatactgtttgatttgaattcaggttgacaaactctttaagctcaagtatattagtttggtaaattatacacattaatgtgaattatgtaagatgcttaaaatgtattatacatggaatagtaagagttgaagaaaactaattccttatccacatacacagtaatatccaaatcaagcaacaagtattgtttgcacaatgaaaataaaattcttagtttcatagatgaataagtagacacaatcaagttcatgggcatcatctaaatatggctatacttttggctcatcagcagtctcatggtgtttacaatgtttatgtttttgaaggtctgtg

SEQ ID NO: 24234 - DNA, 832 bp, Glycine max
  Intron number 3 from transcript Glyma10g34480.1 (locus Gly ma10g34480) derived from phytozome v7.0 (chr-ID Gm10; pos 42639662 to 42640493)
aaagctacactagaatttgaaagtcttgaagaggggtaattttctttttcttcctttcaattttttcttcccatgttttggatggcctgtaatttaagctttatgcacttcagtttcttaccatctagaaaattagtatgtttgttccacttctttctaagtggtaagtaacaaatcagaagctttgttggtgaataattctggagagaccaacagctaaggatctccacattaaaggtcttcaggaaattacgtgagccattttgttagagtttaaatgggggaccaataatgtctttaatagttttaatatacactttcactggaatcctattcaattataaacacagcttgaagtctgccctactttctgctgatagctacgcatgtgctttgcatgagagtggcatagatcaaagcttaaaaagattacttggtgctctgaaaccaagaaaacttttatatctttgcctttgggtagctgccaaacaaaaatactcagttaatccttaattataaaatagggagaaaaccacccatgagttgttgtcatcattaattgtttttccacttagccgtcttctgtctttttatgcatgtatgtccattttagaccaagaaatgtatgaattgattatcataaaaaataaaaattctcatcgttaaattcttgtgcattttggcctttaatatatcagggttcaatatacttgactgatgagtgttgaccatgaggcatgcaaatttttgtgcaccaataaaatgtgtctgttgtggtatttgaatgattcctgcagatttttggctaagatattggtacctgaaggttcaa

SEQ ID NO: 24235 - DNA, 393 bp, Glycine max
  Intron number 1 from transcript Glyma11g12420.1 (locus Gly ma11g12420) derived from phytozome v7.0 (chr-ID Gm11; pos 8859755 to 8860147 reverse strand)
ttcccatcgctcttctgcgtttctgaattttgaaggtaactttcaattaagttcttcgtttttggcgaattccgtggaagttcgatttgctacttttgtagttcattttttgtaaatttcattcacacagaaaaatggtttcaattttgaattgacaccaaaagataaagttactgatctaaattcgattgtatagtagtgattttctgtatcaagttggcgaaaattggattctgctttcttcgtgtgatgatgttgagttccgaatcttcaaatcatatgatctagttttgttcatttttctgtatctgcatgcgatggatttttaattatttttcacagttagttagttattaacttacagttagctgttaaattaccgagaatcagtca

SEQ ID NO: 24236 - DNA, 723 bp, Glycine max
  Intron number 2 from transcript Glyma11g15020.1 (locus Gly ma11g15020) derived from phytozome v7.0 (chr-ID Gm11; pos 10759671 to 10760393)
tgccatctcccttgcgtttctccaaattctatcaggtgtactatcactttattatcattattattattaacaatcttcttgccacattgttgttctcgtttgttatttggatcgcacaattaaaatttattgttaattggcttgatattgtttatacaatggagatcttttcgatttttctatcctgtgtaccagatgcataggacaagaatatggattatatatgttttacaccatattaaatatgatcaaaatagatatgatggatgaactttgttgttgtgcttaagtttgttcttaagctctgcaaatcagtatcatttactatttacatagattgcaatcacaaatcaaactgtgagagcttactctgcaaaatatgaccaacaggccagagttatatccagggagggaggggagtgataacagaaaaaagggttcaaagttatccctctttctttcttttttttaatggggggtatactaatactgatcagtgaaactaagttttttttttttcatttatctattattctattttcttgtatacctatggttcagaagtatgtgtatgaaaacatgcatcctacaactgttgattgaaatttgttgtgtgattataaacagggattttgtctgaaagaatcccttagtctgcataacttaatttttcttgatgccttgtttaaccaacatttctttcattcttgaccatagtctaac

SEQ ID NO: 24237 - DNA, 1044 bp, Glycine max
  Intron number 1 from transcript Glyma12g36520.1 (locus Gly ma12g36520) derived from phytozome v7.0 (chr-ID Gm12; pos 39569712 to 39570755 reverse strand)
acgaaggacactccgagatcacagtaacaagacaggttcacttttttaattcttcatttttttatgactgtagcaacgaagtttggatcttgcaccctagcgtgttaatttgttaggtcttgtcaccaaattttaagttttatatgaatttgatgttttaactttccattttaagatttttttttaaggattttgacatttgaattgaagaaatggtggaaggaaagaaaattttgactttttatttctagcagttaagttatttatttatttattttaaattttttagtatacaatatgggcaatgaagttggaacttacataggacctcatacaaactacctgaattcctcactacttggcccaacttagtttgctaatttttgtagttttgtcttctagatttcaggtttatttgtgtccggtgccttaattttccattttaaggttatttttaagttatgtatcaattttgtagttttttgttgttgagatactgtttattgtttttgtttgataattagcattaaaaaatgttattatttgaaatgaaataaatcaggatttgtttttggttttatctttcagctttgtttgcctccgatgcttcaacttttcggttttagggtactttaccacaagtcatggattaagtttccatttttaggttattttggcgaggaagaattactactgacagtgttaaatgttttttacaatgtcatccagtcattaattgttatccatcaattagaatatactgaaagtcctaacccattagggtcagcctactgtctgtgtggggaggagttgagcagtacgcttgaggagtttaaaagttgcttgaattgatttactgtctctacctttataaatttaaagcggttgtttttgttttaataatgggttgagtgagtattacattttaaaataaaaaatttgttattgatgatccactttgaaagttctcattttgtgtattatgttatgtgttgggggtacaattcagattgtggttgggggcaggaacaagtatttgatcaa

SEQ ID NO: 24238 - DNA, 652 bp, Glycine max
  Intron number 3 from transcript Glyma09g29770.1 (locus Gly ma09g29770) derived from phytozome v7.0 (chr-ID Gm09; pos 36603522 to 36604173 reverse strand)
ccaggaaaaacccttccttgtttgatcaggtaattgcttgctctttttgccttacattgtttttaccagcctttctgctttatcattagaatttgattggaatacacttaacaaggtaaaggatttttacgttgttattcaatcatggattgtcatataattcaaaattgttgacttttgtaataatttcattaaaagtcatgtttctgataaattggtttatagtgtgaaaatctttatgctaacagtgtatcaaaattaaactcttattattattgtcattattaattattaatattattcgagtttgtattactgttgtctaattgaacatgcgcattgataagttgcttgaagatgtttttctcccttgttttctgctataactttgtccatgagttcattgtggcgattctactttatttacagtaagtagctggcataaattttcactgcctcagtaggagggatagttctttgttttacacttaaaatgtggctgggataataagtgaatgcaggatagatgccaccaagataatgagatgaactgacattgtttgttcttcctttatgcatatagttgaaataactgacaatcttgtgaattatggcagttgctttcactagacttggataatattattagtaa

SEQ ID NO: 24239 - DNA, 599 bp, Glycine max
  Intron number 1 from transcript Glyma12g05350.1 (locus Gly ma12g05350) derived from phytozome v7.0 (chr-ID Gm12; pos 3551253 to 3551851 reverse strand)
ttcaagggtaacccccaattcttctcttttttctcttttcagatcgagggttattattgcttcgtcgaggtcaattttttccattttctattttctaactgatttaataactacggtaattagtttcggactgtttttgattttcttcttctttagtagattgattaattgtacaatattattaactattgatttcctctttaaatttagtttcgcctacaactggaagcacatagcttactagcttaacttggggtgtgtttggataaattacttaattaagcatttattgaataagtgcttatcatgtaagcacttatttatcagttttttctataattgaaaaggaaataagctgttttcatataagtcgttagccgttttcttaagttatcatgaagaactttttgaaataagctgaaaacaatttatagacatatcacaagctatattcataaactctcctaaacacttacacgagtgtttatgtcataatatgagctcttccaaatgtaaccttacgatcgatattagtgatataatctatgttctgtctctatcaaggttactcaaaggtcgtagtatacctggtaaaatat

SEQ ID NO: 24240 - DNA, 516 bp, Glycine max
  Intron number 3 from transcript Glyma10g00380.1 (locus Gly ma10g00380) derived from phytozome v7.0 (chr-ID Gm10; pos 148214 to 148729 reverse strand)
aaacagtgaggtcattttcctgggcactgaaggtagtgtgatgaagttatttatattaatattatttggttttttattcaaactgtgttgtgacctcttacatgtttttttattgaagcatactggtctggcctaatgaaaataaactaaattgaagtataactaattttatattgaagattgggttgccataaacaatacggcagtttttaagatatacttatgtgcatatggtaatgagtggatgccaattaaatcactgccactgcaaaactttctttttgagtagtctagcctttggtagatgtgtgtaagcaagcaccttatactagtgtcctgttttcttcttttcaattcttctgaaagggacaagattatggttgagaatttctttctttttacttttcacttatgaaatctatattaatttttgagaagttctacagctctttaatttacattgctgttccttttgtttttttttttgaatcaccttggaaggctttcttagggttc

SEQ ID NO: 24241 - DNA, 443 bp, Glycine max
  Intron number 2 from transcript Glyma10g00380.1 (locus Gly ma10g00380) derived from phytozome v7.0 (chr-ID Gm10; pos 149681 to 150123 reverse strand)
gaagctccatagtgaacaggaactcagaaacaaatgtaatgattctttttgttatatttttttttcttctttgcattctgcttgggcctttcaattttcaattgtaaatatgttatggcctcagagccttcttgtttgctttcctgtgctaaacattctgttttttgttgcaactttcttgtttgatttcaattatctgcatcctcatgagtcatgatccttgttacaatatattattttattatttaggatttaggatacaagtgatgatgattttctattatttgacatgataaaaaaatagtttgtttccttattgttaacttataatattggctatatctttatccatctgattgtggcagctgattattgttcgttgttcctctcctaaaatattgggtacaggccattggatatcttaatcttgtgactgaaaaaat

SEQ ID NO: 24242 - DNA, 563 bp, Glycine max
  Intron number 1 from transcript Glyma12g32760.2 (locus Gly ma12g32760) derived from phytozome v7.0 (chr-ID Gm12; pos 36191657 to 36192219)
ccgccttgatccttccaacaagctctactttccatgtatgtgtctcttgaaacttttttggtcatggaatcttttttggaggattatcttctcatgagtaatgttatgctcgcttacaatttttttaattatattttatagaacaatattaaatgaaaaagtaaatacatataatgtcttgaaaacataaaaaaaattattcaatatttactatatatagcaagcaggaggattggtagggagatattataaggagatttagaattactcgtttttggcttggatttctagtgaaattcatgttttgttttaattgtttggtttttattatttttattctctagaagacccttatgaatgggttgttctattcttagttatcatggctaacgttcacattcgtgcattctgtttttttttccttgctttagtgttatactatatttaaggtaagctttcttatgatgggtggaagtggaatcaagaatatgatttgtttgcagtggatgttaggtttttccttgcctgatataatgtgacttgactttgttttgattttgaag

SEQ ID NO: 24243 - DNA, 549 bp, Glycine max
  Intron number 3 from transcript Glyma10g42750.1 (locus Gly ma10g42750) derived from phytozome v7.0 (chr-ID Gm10; pos 49622892 to 49623440 reverse strand)
aggggtgacttgggcagacaaggtactgaaccttctttttagtgatgatcatggctcctcaatgcttccttcttctgcttatatatagtaatcctatttgtctgtcatatatccatgtctgtcatatatatatgggaacttaatttagaccatgctttgtgcattgaatgctgattgttgtttcttctcttggcacatatttgaacttaaaaaacaaagcctatgaactctcacttacgcacaagtttgggaaatctgcgactgagttgcacatttattacttattaatcttttctatgccaaaatagtgtagcaagaataagaagccaatgtccttttaaatcttcctctaatggcattttgatgaaatccacaacttttttgtttattctccctactttccatacacaactataaggtcgttacttacttgagttcaaaatataaagcattaattaattgtttcgtaaaaaaatggtctcatttttcttttcacaatgtgtattattgtcaggtaggacaccctcccaacataggaaccaatctttt

SEQ ID NO: 24244 - DNA, 870 bp, Glycine max
  Intron number 2 from transcript Glyma11g27200.1 (locus Gly ma11g27200) derived from phytozome v7.0 (chr-ID Gm11; pos 26816989 to 26817858)
ataatcctgacatcttttttattcctcatttctctgttttctaacatggagtttgaaattctttctcatgtcttcttccacacaaaaaagatttgaatgcttatctgatttatatggtttatgcattacaaagttttttttaaatgtctgtgtttgcaaaattgatttttcatgttacttgtttgaaattcagttatttgctagttattgattggtggctttacgaatactggaggacattgcatgaattttctcttaagacttttcgctttcataatcgatgtacagaagaaaaaagttcttgagtgtttaagatattaacatgtggttgatgatctttatagtaaagtgaagctatagatatagaaaaattctttgactttgttgaaattacagggttttaggaattaagggaggaatttgagagaatagagactgaataatatgttcttgagcattgcaaggtattttagtgttacaagatatgatacactgacctttatttatactattaatagatcataatcctaagtaaataaggaaacaagtaataagataagaaatcgtaggagataatacggaaatatgaaactaatcctacaggataacataatatacctttgttttaaaaaaaattcttaattaaaaattatattgatattatttaagcatttaaatatcacgacaaattttttattcttgcaagtgttagacatcatttcattaactccaaacatggttaaaaagttatgttttgctatttgcatctagaaacaacatctaacaaaacttgtggtaatttttatctgatgaaattgatgtcgttggtacaaagaggtaagttatcaagtatcagcttctagagtcact

SEQ ID NO: 24245 - DNA, 1035 bp, Glycine max
  Intron number 1 from transcript Glyma12g02510.2 (locus Gly ma12g02510) derived from phytozome v7.0 (chr-ID Gm12; pos 1615460 to 1616494)
tgcacactctcctccgatccactctcaggaccaaggcatgcttcttcttcttcttttctccgttgttagttgaatctgctcatgtttccgtttctcactttctacactttttttccctatctagtttccgacttgcgcgtatggattagattgatgattcatgaaacgtatcctgttattcgcactctgaatcgtttcactgttcttgtttactttgttgtattgaatgtaataggattttggacgcaggacacttgattgagataaaaaaaaagaaagtcaaacgacttttacaattcgtgaatatcaatgacgacggagttttgtgaaattgaacgagatccaagcttatgaaaatgaaaatttattaattattattatatcgttggagcttgtatttgacaaactcgaaggacctttttagaatattttaggtgtctgttcaacactttttgtcaacttttctcaagttaactggtttttaatattgaatcacctttttctgtttctattttagaatgtctgctccgtttaagctatttccttcgggttgcttagagtatctggttagatttatagcgacattttcatttttatacttttttttaacccattctggaagtctaaggattaaactatatgattgataacgtcgtctaatgttcctgcttttgcgtttctgagaaaaatatctcgagaaatatgttaaaaaatttgtgtaaattatggttaaaaatatcttgttttaataaaattatggttgtatcattctcggtaaattcaagtagcctagtagtatctgtaaattttgattaagaagggatttagtaattctctgaaggttgtagttcagagttttgaaatcttggctgcctgtttgtgttattaatggtgatctaccttgtatgctagtttattgatttcttttgatgtaaatggatggtccaaaaacagtcctatttgttacacagaactcttatttgttttatgatacttattttgttttctatttacagactgcttcatctttagcat

SEQ ID NO: 24246 - DNA, 603 bp, Glycine max
  Intron number 2 from transcript Glyma11g36670.1 (locus Gly ma11g36670) derived from phytozome v7.0 (chr-ID Gm11; pos 38052251 to 38052853 reverse strand)
gcagaccgacgatttctcatcgcacctgcactcgtgtgtgtaatccttaccctccctttccaactatataaatctaaaaggacatttcattcataattacaaatatatcaacttatgaaactgaaaaacatggaagatgaatgctagcgacacctctctaacactctccctcaaaggctctctttatcattggtttgaatttactgaaaatcattaatttcgataagtttctttctcatttaatatatatcaggagagtgtatcatgaagcaaaacctaccaaaaattgtgatttccaataaattctgactacatttctcttagtggaaacatcaaagaatccgtgattgtgtcaaaaaaaataataatgttataacaagctgagcaaaatctaatttgtgctcctgtttcctgataataaaaaatttgtctctccccttttcccgtaacaaatatatgtgttgtccactttgtgcattgctagaactcttaagaaagatatcaactttattctagttactttgtttctttcctccattttgaaattacctaatacagtctacttgttttttttttaatcatatttcagttcaggtcgcatat

SEQ ID NO: 24247 - DNA, 414 bp, Glycine max
  Intron number 1 from transcript Glyma11g00680.1 (locus Gly ma11g00680) derived from phytozome v7.0 (chr-ID Gm11; pos 325813 to 326226)
ttgattttataataaatttgctcctctgcaatcaggtaagcctttcaccctattctcatttatcgctctggatttttctcaccttttttttttgtcaccgatgttcctaaagatgtgtgtgatgataatgtttccaccatttaattctacaatttttggtcctctgtgccatctgatgctatcgttccggagttttatgttctgtgatataagtttgggaagacaaattggattttcatgtttcaaattactccaaatatatcgaaattcgttggtggcatacttatgatgaaatcggaatttgattgtaggggtggcttattgtaggatagaaaaaatgtgaagatttattaaaaaataaaaaaaaatagtcgtcatgaataaacatgtgatttattatgttttgcaggaatt

SEQ ID NO: 24248 - DNA, 993 bp, Glycine max; identical to SEQ ID NO: 23845
  Intron number 1 from transcript Glyma11g34700.2 (locus Gly ma11g34700) derived from phytozome v7.0 (chr-ID Gm11; pos 36487202 to 36488194)

SEQ ID NO: 24249 - DNA, 892 bp, Glycine max
  Intron number 2 from transcript Glyma09g01960.1 (locus Gly ma09g01960) derived from phytozome v7.0 (chr-ID Gm09; pos 1287318 to 1288209)
ctgcattgagatatttgcttcggggccatactcaggtgtgttgtgtcgctgttgcttatgacccgatcgcgaatgtgattttaattttcgtgtatctgtaatgattgaagtgtagtatttctggtgtttgtttagtcaaatgtggcttcttggtgctagtagttgatgcattggctctctggttgagggttgctcacccttttcatgtttgatattttccgtttaaaattgtatcaacttttgatgtgttttagtgcccttgtgccttggacaatttggcaggggtagtatgaactcatgttttggatgataaaaatgtattctttttacactaatctctgcttgcatatactctgccttgttgtctgttgccacgaggcaaaaaaaaaagaaagcaagattatgttttttcctcaaatttgttgggagtttgcacctaagaatgtagaagacttttagtttgtacttccatttgtttgccatgtgttgcattctcttgatttcagtttatcatgctgaattttgatagtgtagtgcaagaaaggcaatatattgtataaacacacgattgctttggggttgtgtttgactttgtcatttccattaattggtttaaattatgtacttattgatatttagagcaatatatttaacctatggccccttttctttagccactgtatgggtactcttggtaactgttttcccatgttgatcatattcttataattgcaactttctacatgcaattcacgctctacctcttaaaagttatagtgaatttactgttgttacatgcatttgagatgttatttttaccttttattcaatttccaatctgtaaccatctccaatttgtgcatatctctcttttatgtagagagtaacagac

SEQ ID NO: 24250 - DNA, 950 bp, Glycine max
  Intron number 5 from transcript Glyma10g44270.1 (locus Gly ma10g44270) derived from phytozome v7.0 (chr-ID Gm10; pos 50712138 to 50713087 reverse strand)
gcgaggctgcaagaaaaagtcggttgagaaagaaagtaggaatatgtacttacataatttttgttaatatttgttgatacaagtgtatatcttttttctgttttcttctttctccatataattaatattactatggcttcattgtaaatcacaaagacaggattggatttttaatgggcatatataaatttgatggagatattgcatgtagttctgattctcatggtggtatatattctcatctatgtgattttatctatttggatgatcagtttgggtctacagattatgtaggcctgctgacaaactgagagtacaatggacattgattttgttctagtagaatattttcttttttcatagaaaaatcaatttgtcaaaggggaaggtgaaatgagcaactagaggtaaaataggatatcataaaaaatggaaagtcgtagatacaaaaaggaatatgaaaatactcaagaattcagctagactgctcctggctgtttgcttaattctcccaggtagggtactcaacaatacagttgaagtatacttccttttatggtgagaaaatacagaaaatgagtacccactttttttgagctctgactaatttaaacatatattttagtaattaaatattgtgagtactgcatttatttttaccctctctagtgttatatcactggaagttagctggaattttcttcctaactacacttataatggaatctgtgaaatgataaatctggatattcaacctttatagaatagagtgctttagaatggtaacttgttatttttaatgagtagggtagtagtgcaatccaatgattcttatattgttttaatttgtttggcctctatgatactttttagaaataattatttttacatcaccccacttaaattaaaatgcaatacttgatacgataatgacattactccacaggctt

SEQ ID NO: 24251 - DNA, 570 bp, Glycine max
  Intron number 2 from transcript Glyma11g02530.2 (locus Gly ma11g02530) derived from phytozome v7.0 (chr-ID Gm11; pos 1656722 to 1657291 reverse strand)
ccaagagaaacgctagagactctcacgtcccggtacctatttatcatctttattctctcttctcattcgtgcaactttaagccaaagtgtgtaaacaggtttattagctaggtagaagagagagactaaacttcctttacagaaagtttatgtttggaacttactttttcttagaaaaaatggtgaaaaagctttaccaaaggtctcaactctcaagtttgagtcttggtatgcaattgtgttaaatgcttgagagaagagttaaactttttcgcctgtaatagttttagagcagatttgcttcccataaagatacatctgatctctaaaatactactatgctataggtatgatatataatattatatgacagaaagtcaaatatagagaggaactatatgggtgttaatagaatttttgtgatgtgaaggtctctacatataattacatattacctatacatttacacttaattagaatgttttttgtgtggactattatgtaataatgtggtgtttgtgtgataaaattgtagattttggctcctcttccaatcgggtttgctgtgtt

SEQ ID NO: 24252 - DNA, 991 bp, Glycine max
  Intron number 1 from transcript Glyma10g28500.1 (locus Gly ma10g28500) derived from phytozome v7.0 (chr-ID Gm10; pos 37391369 to 37392359 reverse strand)
tcagagtggagaccctctgaaaccttgtaatcaaggtttgtgttgtcactactcactactcctgttctcacctcattaattttctgccactttatttgcataaatgataactgaaaccgcaataagttgttttatttcatgctttgttatgaaagagtactcgtataaatgtgtcatctcattttctttgcatgcattaggttcttttgctgaacttgatctctttggctttggaactgaaagtctgttttacttgaattagacatccaccttgacctttgttatttagctgcatgaaactatgtttatggcatgcatacctatgttttgtttctctggcaagaaattaaacaaactggtaaacttctgcatggttatttagtctccgattatattgaattatagttacaactgaaactgacaggtctgtaataatttttttcatacgcgaaaaatttcagccagttaaactgttgcgttccagcttttttgcgtgttctggaatgatatcttgatcatatttttgttctcaacatcttttgcctcttatcggatgatacttgtaagctttttgattgcttgaatgccaagcatttctcttttaagtgtattacttttgttgaaaatccctttatgcttaattttaagttcagtgacatcagtttcttttctcttctaatcaatttgtctcaactctcaatattcttctcctagtggaactttacttttttacttatacatgttgtgtgattctattctgcgtgttagcatatgacaaaaatacggtcccctctatgattctcagcgaattatgttccaaagttgtatcataagctgttcaatgtccatattattctagcttgaacatgatgtccccaatttttatctttgttttatttgagtcaaccagacatttcagcatgaacaatctaaatcatatatcttcaatccaccacttggtttgcctcttgtagcttgagacttgaggaga

SEQ ID NO: 24253 - DNA, 917 bp, Glycine max
  Intron number 2 from transcript Glyma11g14660.1 (locus Gly ma11g14660) derived from phytozome v7.0 (chr-ID Gm11; pos 10461960 to 10462876 reverse strand)
aatccgcgggagatctctcagactcattaaacagggtatgctttttttctttttctgttcagattcagattattcgctgcttgtttccttgcgcttttgccttcctttaaaaaataatagttacaatagtttgtaaaaaaaatattaaataatatttatcagatgctaataatgtccttaggatattgattaaaaaattaaaaaaatattggaatgcataaaattatttctatgataaatattattggttagtaagataaatacaattttagtacgcggaaaagaaaaaaagcctcacaagaaatactataaatatactttttttaattgattaaaatttatcgtaaagtacaaaataaagaaagaatattaaatatgatatgaaacacattaacttatcatttctaataaattttaatcaatatgttagaagagtgaatcaaagaatatattgccagcatttttcagtctcaccgttgaactaaggtcaatgaaggattataatacttttgttgtttaacccgttaaaaataattttaagaataaaattttgaagataaatataatagctaaaagatagagtgaaatattgtctttctcggtctctcatttttggaaatgtcatgtgtgattcatgttttgttaaaaataactctctccttttaatccctaattatacaaatggatcacacaaagcaatttttttatttgagaaactaaaagcatttgcaataagtataagcataacttaatcaatgtgtgactcatagtttagcttgatagtgtcttcaacacgtaattcctccatgttttgatgtaattcggtactatttcttatgctaatgattggggttgtgttaaattttaactcttttccttttttcccttttttcaggctttgtcaccgactggctggg

SEQ ID NO: 24254 - DNA, 877 bp, Glycine max
  Intron number 1 from transcript Glyma10g06210.1 (locus Gly ma10g06210) derived from phytozome v7.0 (chr-ID Gm10; pos 4961487 to 4962363 reverse strand)
cttcggttttttcccttggtccgatcccgacagtacgctcttcctttttccctgaatttctaacgctgctgattgattgtggaattagaaaattggagttccttttcaattttttcgactttaagcactgcaattggaatttgattctctgcttgttgtcttcaaatagagtagagtggagattcacattacttgatccacaatcatgtcgaaataacagttaacgtggttttagctaaatgctcacatgtttgcttccaggttgaggcaattttcaggttgattaaaatttttataacctaacttgcttttagaataaaaatattagaacctaaatcatgtcactttaaaatcaattttaaccatacatgttgtggcattgttgactgataaccttatcctttaatcatgtggtcaggttagagtgtgtatggaaatacatctacctggggagttcagcctcttaatgaatttcagtaccttgatactagtcttggattagtcttggatttcggtcaattgataccctgggttcacccaaaaaggagaatcacgtcactttaaaatcaatttttgcaaatactccatgtaactcacccaaacaaacacttaatgtttaaagtaaaaatctgtagccttttttcgttgtttcaattagatattttttgtgagtgtggatttgatgcttttaggatttgaagcatattctgtcctacttgatcgttagttgagatgatttttgtccgaatgtctgcatttttaaggcaaatctttgcttgaataatgtcaaggttcagaaattatttaagccttcgtgctgtcacttgtttatattctgagttgcctccctttatgcttgtgacttctcagaaattca

SEQ ID NO: 24255 - DNA, 777 bp, Glycine max
  Intron number 1 from transcript Glyma10g15120.1 (locus Gly ma10g15120) derived from phytozome v7.0 (chr-ID Gm10; pos 17537962 to 17538738 reverse strand)
ccaattctttttttctttctttgtaatttgtccaggttcgtgttttgtccttgttctattatttgttttcttgtttgcgtcttgttgcgttcttgtttgtgtctttgtttcgttcttgttcttgttcttgtcacgtttttgttcttgttcttgttcttgtttcttgtttctttcagactttgtgtaaaaaaaaatccgtttgagttttgtttcaagttaaaaaaaaagttgcagaaattttgaaaaaaaagagaagaaaagaaaaaaaaagtgggtgtttgatctttgaacacgaaattgaggcagttagaggcattttttttttgcaagtctgttattcaaatcttttttattctatttgttatcttatctattatcttatttgttatcttccttgtttattctatttgttatccaaatctgatctgttatccaaatcaaatcaaatcaaaatttgttatccaaatcaaatctgttatgcaaatcaaatctaatctgttatccaaatcaaatccaatctgttatccaaatcaagtctaatctgttatccaaatcaaatccaatctgttatccaaatcaagtctaatttgttatccaaatcaaatctaaatccaaatcaaatctaatctgttaaccaaaatcaaatctgatttgttatccaaattaaatctactacacagtctgtgataattaaactatttttcctgttatataccttgtgtgtctaatttaattcatccaggaacttaagagggagtgagtggtaaaaggcaagag

SEQ ID NO: 24256 - DNA, 702 bp, Glycine max
  Intron number 1 from transcript Glyma10g28450.1 (locus Gly ma10g28450) derived from phytozome v7.0 (chr-ID Gm10; pos 37343911 to 37344612 reverse strand)
tccccgccggtctgtatccatctcttcttcttctcgcatgcaccgctttgacttaggtttctttgtttttctaacaatccaaatattctattcaattctttgtttttctgtttgtgtacttattatcatcgattctgtaattcgtgctactccgattcgggaatagcaaccctgcgctgtcatgtttccaattaccaagccttattattatactaacacacggcgtttgtaattgtttccttgatcaaacgacgccgtttaaatcagatccattaaaagctatgttttcagttgaaaaaaaaatgaggagttcgacacttactttcgcttataactatctctaattgtgagaaatctattttcaattctactgtttataccggtagtaagttgtatactctgtcttgttagtttgtttttggttttctttgtgtttaatttaatcatgtttatcttttgaagatggaatttgaacagtcattagtgtaggtcgggtggatgtttatttataataattatcataacgaggggttgcaaatgaattagctgatttgttatagtcttctcttttgaagtaccttgttatcgtgttacgagccttcctgggatgatttgttgcaaatttatttgttttcctgatgatattgtgaaactttcgaattctgattttgtcgttttcatgtttgtttccaggcgttaaag

SEQ ID NO: 24257 - DNA, 640 bp, Glycine max
  Intron number 1 from transcript Glyma10g34580.1 (locus Gly ma10g34580) derived from phytozome v7.0 (chr-ID Gm10; pos 42750667 to 42751306)
aggtttctgctgattacagagtcactggtttgttctctcctctctctctcttttttgttatttaaaatatttacattcggttgtttaattggatgaaatgaatgtatatatatatatatataatattttatgtttatagaaaagtgtcggattggatttatgatttatgtaaaagtgaaccatgcttttgcttttgcattgggtggagaaattacttttcattttttttatatataaaaagaaattgtttttatctactttatgagaaatggaattggttacactttaaagtacaggaattcgtttgtgttgcttgttttgaagtttgatgatatttgagctaattttgtttttatagcattagccttttttttaaaaaactttttggattatacattgttgttattattgatggtctgttggtagccgattaagcaggatgaagggttttatgtctgtggggaatttttagagaagctgaatactgaaaggtttttgaattggtaatgttgagttatcttctttatgaaaatttgtagcgtttttgtgatattcggtttagtatggagataaaaaagatcgagttagaaattgtgtatgagttagtatgtgtcactgaatggtgcaggggtacctgctg

SEQ ID NO: 24258 - DNA, 271 bp, Glycine max
  Intron number 4 from transcript Glyma12g12130.1 (locus Gly ma12g12130) derived from phytozome v7.0 (chr-ID Gm12; pos 10168876 to 10169146 reverse strand)
ttggccaagtctttagttggacatccatacgttgggtgattgaccaaggatgaaaagaaaattattgctgatatgacaaagtcgatggtgaaaccaaaaaacatcttgctaatgttgaaggagcataaggtcaataattgcttgacaatcaaacaaatttacaatgcaagaagtgcatatcgttcttccattagaggagctaataccgaaatgcaacatctaatgaagcttcttgaacatgatcaatacattcattggcatagattgaagg

SEQ ID NO: 24259 - DNA, 1008 bp, Glycine max
  Intron number 3 from transcript Glyma11g29640.1 (locus Gly ma11g29640) derived from phytozome v7.0 (chr-ID Gm11; pos 30398035 to 30399042 reverse strand)
cactttgcagattgtgtttcagcgattggatcactgttagtttcttttgtttgtttattttgctttcttttgctatttgtgatgttattgtgtgcaatattttaaatcgaaatagaaattagagactgaactggcaaaagcttcaaggtatggtttttgttagttcaactaactagtttgatgtttgtactccctccggaacaaaactattgatgtttaaggttaatgcacactaatgcacttaaaaaatatatttaatactcctcacaagctatatttagtataaaatatcctcatttcatatctatgatgggagtagttatataatagatcacaattatcttggtcatgttgaataggagtatatgtggaagaagaaaataattaatattgagacttggaatctgtaaaacatcaatagttttgaaacaaaaaaagaagaagaagctaaaacactgttttggtccagagggagtaacaaataggcttaaatatgattttggtgctagtaatatgcccactttttgatttatttctttcaaaaacttttcttaatacaatccctgtaatattcaaaattttggctgttagtccatgccgtagcggtgtaacttgactgttttaaacgttgagatgcctaaaaagtcaggaactaaaataaaaaatacaaggtatatgagtggaactaaataaaaatgtgatatacttacatggactgaattaaaaatggtataaagtgactgaagcagttgttaacggcaactaagtaatgacagggactggcgccaaaaaaataaatattacagggattatttaaaaagaaaaatgagaaggattaaaattgaaaactggataaattacagggactaaagacatatttaagcctaaccaataaacatggctgttttactgtcttttgatgcattggttatgtgtgtgttgcatggtgtgtattggttgttgattagagtttgtgtatttgagcagtggatttggctactgggtgtt

SEQ ID NO: 24260 - DNA, 753 bp, Glycine max
  Intron number 1 from transcript Glyma10g35680.2 (locus Gly ma10g35680) derived from phytozome v7.0 (chr-ID Gm10; pos 43949000 to 43949752 reverse strand)
ttttttcccctctttctatttttcgttttttttaggtacggttgtcggaaagtttcgattttttcatcttttttgaataaataggcgaatttatgagatgggtttgggtttttatgcttaatatttcgtttttatgcaaatttttaaaataggttgtgctaaggaggttgaatccgagaatttcattgcgttttgctttgcgttgacttttgtggatgcagaagataactgataaatctgatgataggatcactggggttgtgaatcaatgcatgttgggaagtgggaatgctctacttgcttaaatatgtagtcattaatttgtatttgatatttagtgtagtcttttttgtttgactcaatgacaaagggtgggggagttggatccaaggttcaagtcttgacaagtttagagttattttctgtttctgaactgcaaaaatcatgaaaaaaaattatttgatgttgatccatgatatcatatagattcagtgttgtattaggttttgaatcctgatatatgaactttttgggtttgtatgcatatttttggtttgatctattagataaatttaagaaatttagtctgattttaaaggtttttgaccctttagacttaaggttttgtttaattttgtttatcagaattctgagaataatcctccacagatcgtgtctctgacttgtaattccatgaagtattcttatgtatgtttgccttccctccttatgcaggtcttttgaagcagaaga

SEQ ID NO: 24261 - DNA, 601 bp, Glycine max
  Intron number 1 from transcript Glyma10g32860.3 (locus Gly ma10g32860) derived from phytozome v7.0 (chr-ID Gm10; pos 41235303 to 41235903)
caaagatagcaccaagataattctcaaaactattggtacaaatacagagaaatgtgtaattatggatttcatgctataactattagaatatcaatttctttacaaaacttttattctatatttttttttctcacaactgttgaaactgttgttttaaataaagttcttattttagacttttgtgttttggcaaatgaaggaagtttatataatatatagtatttaagtaatgttaattacagtactattttgttgaaccatttaagtaaaaattctgatatcaatgagtaattattaatcaaactatatccttttggaagcattctataacatctatttcaaccttaaagatgcaagtgtacaagacaattggtttgttttagagaaagattatttggaaaggattaatgcagaatttttttttgggttatattttcttatctttctatcccaaaatatgtacatcccaacttcacctattcgcaatcatatatgtacttatttttttgttatgtatgtcaatacagaactgtaaaacacactgtgctgattatttgtggcatttcaaattttagttctaacatttgtttgttatagtgca

SEQ ID NO: 24262 - DNA, 512 bp, Glycine max
  Intron number 1 from transcript Glyma10g32650.1 (locus Gly ma10g32650) derived from phytozome v7.0 (chr-ID Gm10; pos 41072387 to 41072898)
tgtaagtattcattcatctctctatcatttttgtccagtaatttatataaacttttggttgttggttttcaaatcgttttagattctttctgcattaaacaaaatgagtttggcattctatacaaatgtttgttgaataattgaagaattcagatttaaggtgattgcaagggatacatcatacattagcctcatgtcacgataaaatattgattgagattttggtatagtgataatgtggtcgtacacgaatgtttcagacatatgtgtgtgtagttttattttttccgtattaatcaacaattggcagtgctttgtatgacttcagaaagatcaaatgtatgtacattctacttcattaatgaacattattctatctaatgcagcttaggcatattatgatgtaagtaaacccacttatgcatttcaattagaggggctattttgaatttgttttggttgagtaatttattcttaagttgttgcactttgatttaggaaacagcagagca

SEQ ID NO: 24263 - DNA, 623 bp, Glycine max
  Intron number 1 from transcript Glyma09g38890.1 (locus Gly ma09g38890) derived from phytozome v7.0 (chr-ID Gm09; pos 44129828 to 44130450)
gagacccgttcactccgttttcggcgccggaaaacgtaaaactcttttttctgttcattatttttgctctattattttcgttgtcgttttattgcgttttggtttttgtgacagattcaatgtgggaatgctgtggatgtaactattggataggaaaaaacatattttggcaagaaaaaaataacaaaaaaaagactcggccttgccttgcctttgcccatgtcgtttatcactgattgggttactataatattaaataatgccttgtgtttctcttgttgcttaatgaaattaatgaggttttctcaaaattgtatatttttttttaatgtttgcaaccttaccctgttttagtttattatttatcattacgtttttcaggtagtttttttttttaattctagatgagttgagtttaatgatgataaatagcttgtaatgtgaatttgattaaggctgcatatgtgaaaattgggatgtttagtcaataattgaagagttgtttgtcattgaatggagaattgtatgcgactgtgtttggttatatagagggagaaaagaagtttcagtctatgatactatcttatggctttgtttttggtgatcattttttgcagctgctg

SEQ ID NO: 24264 - DNA, 408 bp, Glycine max
  Intron number 1 from transcript Glyma10g36070.1 (locus Gly ma10g36070) derived from phytozome v7.0 (chr-ID Gm10; pos 44260706 to 44261113 reverse strand)
cctcctgggaacccggtctcttcgctgtcgtagtgagtgctgaattgtgaattgtgaatggcttttttccgatgttgggtgttggtttcggttagccaatgtggaaaagttgcgagctttggtctgaaattgatgatttttcttagtgattgtacatgtagttgtagataaatgcttttaattgttgtttatatatgtggcagttattgagtaaaatggttaattttgattgtttgaactgttgtttgtgttgttccgctttcagtttgtggtgcttttttttttttttttgttctgtggtttctgctaatattattgtcttctgtttatgtgcatcttatgttgttgttgttgctgttgttgtcttgtttagattggtggacgccaatatattgttcacccggggcg

SEQ ID NO: 24265 - DNA, 536 bp, Glycine max
  Intron number 1 from transcript Glyma09g37230.1 (locus Gly ma09g37230) derived from phytozome v7.0 (chr-ID Gm09; pos 42746418 to 42746953 reverse strand)
aactgggacttggactactggaattttgattttaggtatcactcaattcatatctcatgtataatatttagagttataaattttaaactttcaaacttttagaagaataatataatataatcatgccaaataaaacattaaaccaatgtcaccaacatgtgtcgtttttttcttggatttgatcggcttgcatgaaaaaaatctaattggaagagaaccaaaatcccacaaaaaatggtcagaagttttctagtaaaaaataattataaataaaattagtgaatattttatattaataatacggtgacaattcgcaagaaagaagttaatcaaatcttaagatccttgacaacataataattataaaactatgtgtggtcatgtaacttgtattttatttaaattatttcataattagtacgtatgtaccaattcttttataaaaactttgtgatttaggcatatttatttatttgtttacttggctacgtactctaacagtgaatcaagggcttgctactttggcattctttgga

SEQ ID NO: 24266 - DNA, 300 bp, Glycine max
  Intron number 1 from transcript Glyma10g22070.1 (locus Gly ma10g22070) derived from phytozome v7.0 (chr-ID Gm10; pos 28042656 to 28042955 reverse strand)
acgactaacaacatcaaagctttgatattggtaagtaaatgcctcaaaacttctattatatttccagtttctgaagtacgttttttctcactaacatctctttttataacattaatctctttaatcctctcatttgtactaattactttatcttacatttttcttccttttctattaaaaaagttgcccgattttgatatataaatgcaatttctcttttcattttaccaaactttatataaagatattttatttgattcaccaggacatatttgctgctggaactgatacttcagcatc

SEQ ID NO: 24267 - DNA, 762 bp, Glycine max
  Intron number 1 from transcript Glyma11g25860.1 (locus Gly ma11g25860) derived from phytozome v7.0 (chr-ID Gm11; pos 24607025 to 24607786)
ggttttctcgctttttgcagataagcatcaatagggtacgcttccttcacttttttaagcgttagtattttggattatgatggctatttatgtgtgatttttagtaggttttaagaatctgtggtttactgtgggtggaagtcataactagttttgagtcagtttctctgattttgttgaggttttcctgttcttttcttctttgatatgatgtctttttttcctttctcctttcttttgtacttgattttgaatctttgatcagtatagaggatgaaaatactgttctgcatacttttcttgtttaccctatatttgaccaaagcattttataggcatcctcactagccagtgccatagaaagaaggcatttgtctataactagaagaccatcatgttgaactttttgcctgatttatgttttatttcaacttttattagagatttcttgagtctatcagttttagctgaaacgtttgttatcctgtatttctctgaaaaaccaagttcagtttagtttgcataacaaggggatgtagatgtagacattggatgatgttgctttctttcccctgtgacattttgatatacatatcatatagaaggaagatgggatattgaaatactccttttaatgttaattaaatagtgtttgtgtatgtgcaacaacaaattctgcgtgtatattccaatcacagatgccattttctacatgctaatcttcattttctttgatcctatgtgatgtgcagatactagatc

SEQ ID NO: 24268 - DNA, 464 bp, Glycine max
  Intron number 2 from transcript Glyma11g25860.1 (locus Gly ma11g25860) derived from phytozome v7.0 (chr-ID Gm11; pos 24608120 to 24608583)
acactttcttgtacaagcttaatctctgggattgagatacttgattttttttaggataatcatgtagattctaagtaaattaaattggcataagtatacactcaattgtaggaagtccagtgcaaattgaattgctctgtggtgtttttgaattgtgaacttctttgcatttatctttatcattggacctacacagacttagagaaatcatatttttggttttccataccctttatcttgaacctgtaatagcatggatagggctccaattttctttaatagttctatcatggaggtttatttttcatcttgcattacaaacataacacagcagagccattcaattttcactggtttaccataatcatttagttaatatatattataatcaaatagaatatcttttgatgttacagcatcacttgtttaacatatttcagggattctgtacctgaaggtcttcc

SEQ ID NO: 24269 - DNA, 694 bp, Glycine max
  Intron number 4 from transcript Glyma11g25860.1 (locus Gly ma11g25860) derived from phytozome v7.0 (chr-ID Gm11; pos 24608804 to 24609497)
gcaactcagaatcaaagaattgcctggatatagaggtgacaatttccttctgtttaacaatctaagacaaaatatcatttggcttggaagataattttttttacttatcatgatcaatcattagcagattgtttgcacacacattttgaactcaaaatattatagtctaggctccaatatcattaattgtcacatgtaagccaacatagtcaccagacgatctaggttatttgcatgctatttatatgtgcagggcaagtaggatttaaagcaattatcatatctagtttacttgcatgctactatttgcaaggaacttgttgtgtagttggttaggttttttttcttatgccttatcattgtaatattatatttttggctccaacttttctaaattttaagcaattgcttcattatctagtgttcaacctgacctgtttgtgtgaactttcaagaatccatttgaacttgtgtgtaatactacatctgttcatgcttgcagaatccgttttttccactaatttcttcttttatttaatcttcaccccattgaataagcattaaggtcatcttttatttaatcctttccacgaatagatcttctttcaaggcttacagtgtaatctaatctatttatttttctttaaggcaccactgaccaaggtcttggacatatttgagcagtgtagcagag

SEQ ID NO: 24270 - DNA, 900 bp, Glycine max
  Intron number 1 from transcript Glyma09g40520.2 (locus Gly ma09g40520) derived from phytozome v7.0 (chr-ID Gm09; pos 45440896 to 45441795)
ttggtatgtaaaaaaatagtttttattttttatttttttttccttttgtgtacttaatttttccttgagtttcagctttctgtcttttaaaagtttaggtaaatgccagatacgaagcgggtttatgcaaaagggtggagttttttttttattatttgtttttttattttgctcttttagaaaaatctttggtatttctggttgcttttgctctgttcagagttcggggcttagaaatatttgaagtgaatgagtggtttgttaaaaaaaaaaaatttatgatactgagtttgaatttgctatttttaaacatgttttcaaaattttcttaccaaagtatgttttgaagttgtaataatatagcaaaatattttcctatttttgtatttattttaatgccctcttttttcgtccttttggttacgaatcaaatttctagtttcagtacttgaaagttgaaaacttgataactgagcatgtaccgatttttcagagatggaaacaaaaggaaaaaaaatgaactttgttagaaaataactgcattttttcctcatatgattttctattcaaaccctagagtgatgtgatttttgcattttagtgcaaagttaaaagttttaaatggatctgctaattcagctaaacaacttaaaaactccaaagtttgtgtctttgttttctttcttcctagtttgtgggaatcctttgatgggttttcactttggtttccttgcatgtttaagaatggttcaaatccttggttttgctagaatgctcaaatttttgcaatggcatgtgctttaatgagccattttccttactaagtatgattgtacgactcatttctgacttgcagattttggttagattgtgtagacttaggagtgaatagtttgatat

SEQ ID NO: 24271 - DNA, 307 bp, Glycine max
  Intron number 3 from transcript Glyma12g35730.1 (locus Gly ma12g35730) derived from phytozome v7.0 (chr-ID Gm12; pos 38870624 to 38870930 reverse strand)
gaggtaaaatctcttgttctgttacctggctttttgtgtatattcaatatttttgaggcatggcttttcttgtctgtgtgtgcctttggcattagcatctcatgaatccatgaatgttgttggattgcattagcatagcatggtatgttatgattgtgaggttctgtttcacaatggggttaggttgtaaactgttgccacatagcatgtttttcttgtcgcagatatgttataatattgtgttttctgaacttttttgtttttctgaccaggtgagccctttattaacgggcaagcagttccctat

SEQ ID NO: 24272 - DNA, 718 bp, Glycine max
  Intron number 3 from transcript Glyma11g11810.1 (locus Gly ma11g11810) derived from phytozome v7.0 (chr-ID Gm11; pos 8425224 to 8425941 reverse strand)
ctgtaagttgtttaaagaagaacttagttttaagagcttgatgcaatagttgttctactccatatatttggaggccacgtctaaattgaaatgtatggttttgggatcagacatatcattttgaatatgcaagttaaattccaaaaaatccttatggtttaatttatttgtggtaatgtgatagtttctatagttaaagatagaatatatattttcacacttgaaaacacttgtaaaaaccaattttatgcaactaattctttattggtcttgaaaataatagttttaatgaccaattaaagtactttgtctttgtccaacagttgtttttttcttgtacaaatttggtttttttcattttatctttttggttgcgataagaaggttttcatgatccatcgtcttcctatggttgttttgccaaatgaattttgctattcaaagttgcataggtgttcaattacttccttgaatgaatgattatgataaaaaggcctcatgcttgcatattttgtatttataacttaagttgttttgtggagcatttatctgtccttatctacaccattgtgactgggtttcttatagtccatattctctactttaatgttttagttgaaaatagctttttttttaataactttcacagttttccaatttgataatttaggcatgattttgtatttgtatattaattaattgggcatgcaggtcctta

SEQ ID NO: 24273 - DNA, 664 bp, Glycine max
  Intron number 3 from transcript Glyma12g32170.1 (locus Gly ma12g32170) derived from phytozome v7.0 (chr-ID Gm12; pos 35725060 to 35725723)
aggacttgatttgaaggacttggtcctgctctctggtattatttgaaaggcttaaatatgtttttaatctctcaaatttaaaataagtttaattttggtcttcctaatttcaaattgatctttttattccatataatttgaagaatgtcttttttagtggctcaacgtaaatgttcttagagacttggcttatgtagctaacaaattataagttgtttacatgacaaaagattaattttatatttggaggaaaaaaacaaattcattttgattttgcattttgagcagagggactaaaacacactcttttttttcaagttatatggacaaaagattaattttatatttggaggaaaaaaacaaatttatcgaaataactaaaaacatatttaagcttgattgaaaatacacctaaatatttagagtttgaagtggataattttgtttttaaggaatttgttaattatctttcaaaactttagaatgctgtttagataaagataaaaataagtgtcttgttcctatcattcatgcttgcctatttgcttttaaggttagaacgttgttagtatttgaattttgtgtcttgttcttgtgcttgtaatcaccaagagttcaaattgtttcaggtgctcacacaattggtatcgctcattgctcatca

SEQ ID NO: 24274 - DNA, 729 bp, Glycine max
  Intron number 2 from transcript Glyma10g36460.1 (locus Gly ma10g36460) derived from phytozome v7.0 (chr-ID Gm10; pos 44606438 to 44607166)
tgctgggtgaagggaaatactaccggggatttgaggtatgatgctcccattcttcccttttatatgttttggggttgttgtatttttttatgcataccaaaacatgccacatgacatgaaggctctcctaaaacattcagaattaagttgcaactttcatctcaacttctattgagacttggggcgtgtttggataaacatatcagaaaacacttatagcagaagaaaataaggtggtaaaatgaatcaaacttctttcgtaagttataattagcttatacacctcaaattctttacaagttctctcgttaacttctctaaaaattgaggtgaataacttagttttaacttgtgaaagaagtttgatttattttacctcctaattgtaagtgtttcttaagttaatccaatagcttcctcttttttcttgcttatttacttgaatggaaatatgaaagaaaagtactcttcttggtctcgtatcaatatccaactccaattaacttttagctgataattttagttttcgaattttcagctttagctgagtctttattccctagatagtttctagcatgaatctgaatagtttgtaatgcagcaacgttgtctatgttatggtactgacatgaagtgttatgtactaagcagtatgagataggagtgatatctattgattctgtttacatatgtttggtatgcagtgtccagactatttcgttgtaggtt

SEQ ID NO: 24275 - DNA, 970 bp, Glycine max
  Intron number 1 from transcript Glyma11g17950.1 (locus Gly ma11g17950) derived from phytozome v7.0 (chr-ID Gm11; pos 14423875 to 14424844)
aatccgagtggcatcgatacaatctcaagcgcaaggttccttttcctttttctctttttttgtaattaatcgatttatttattttattttgttaaaccctaatttttttatgaggtttgaggatatgcgattaaataaggtttttatgtcctccttgaaagaatgaactagctccgttaattatgtgccttgctatttcatgtttctcagttagaattgttattttacaagttgaatcctttggagagatctgtttttgcgttgtgttatggaatgtgtagaataaaaacaacttcaaatcaattgtgttaagaacatttcatagagtaattgttgagggtatattaataaggtgttagaccctgtttgaataaacttcttaaggcttgtgaaaaaagtaagaagttaaaataaattgagtttttcttgtaagttatacatctcagcttttggagaagttagatgagagagcttatacaaaagttgagtacatgagtcgattttatgttatgggagaaactcaattcattttactttttagtttatccaaatagcgtcttataatgttgggacttgggagggagatgttgttaccaaagaggcatatcaagtgagatgaaagagtggggggggggtaaatttatatcagacaatcacttgtaaaggatgaaagtttgaggggagcaaatttcatccatataattttaagattagaatgcattgaaataatttttactgtctttgtactaagaattaagatatactcctctcataatttcactatacatgatccttctaaatgtgtgtactcacatgcatgcgttgtctaggagggggagaatttggtgactatccattttttttttgaagaacttggtttatttccttgaaaatattaaacaaatgtctgttttttttaaaaaaaatgcatataggtggctggggttcctggggtgactgaagctctatt

SEQ ID NO: 24276 - DNA, 1019 bp, Glycine max
  Intron number 1 from transcript Glyma11g21550.1 (locus Gly ma11g21550) derived from phytozome v7.0 (chr-ID Gm11; pos 18578080 to 18579098 reverse strand)
cacattttcaacttccttcctcctattccaggtatgaccccttttttctctctctctctctcttatttattctttgcccttcaatttttttctttaaaatctcaatctttttgcctaattcaaccataccctgatgtttgttttgtttaattttgctactttcatgtgtatttgtgggatttatggtgcttaacctgcttttaagcaggtaatttgcaacatgaactaggttttgctttgattcccccccccccccccccctccctcccctatttgtaaggattgtgactaattgctatttattattttatttttctgcattttgttgagttatgagagtgaaaagcttaaaatttgatgcttgaatcaagcgtatgtgtgttgggttatgatgtcaaaatttggagcctaaagttggatatttgtgaaatgaatatacaatcatgttcatgcttagtctcatgagagtatccaagtttagtgaagcctgtgaaatgaatttaacagcttaatcattaccatccttgttgacatgattgttatctatccatggtttgctgacattgatctgggctgtatattttttttttaaaaaaaattacttttttgtagctatttaaccagtaaattggtcatgcatctgtgatttggtgctgaatgccctcatcctcaagagtgtttccttgctgatatttctactttggcacgatataatgtttttagcctctctttgttgttcaccctacttgttttaaggtatgacatcattatttgcaaagagattgggcaggtgacagccctgctgcattgttagtttttctcttgctcttctgtttccattatttctgcttgctttagaggatatgctttatcctcgctctcttcgtacttaggcgctaatcctctcttaaaataattttctttgaaaaaataattaatagcatacagcagagcattttctatcacaaagctgctattgagtttgcagatcgctttaataccgccctcgtttgccacag

SEQ ID NO: 24277 - DNA, 701 bp, Glycine max
  Intron number 1 from transcript Glyma09g32180.1 (locus Gly ma09g32180) derived from phytozome v7.0 (chr-ID Gm09; pos 38760409 to 38761109)
gagaattcctagattctgtttcaggttccaattactttcctcatcatttacctctattctacaacattagtaaatgtttcttccctttatatgtaaagcaaatagtttattcacttaaagttataaatgattcttttatattgttatctaatcacagatcataatatattataaatatgttgtgttttgtaataactatcataaaagttatatcaataataaattttgattagttggctacagtagaaattaaactccgtatataaaagaaacaatatttttcatagaaccaaaatggattagatacatggacctggcatagaaatatatctttattctagaagaggaagctttattttgtaattacatacaatttggaaagtccatttaatagggaggaggggttggtttgataagaatagtattgatatgaattatacaacgcctttagtaattgatatgaatgatgcatttatgttagaattgttaatacatgttaaattgtcagtactttattttgtttctaacaaatttgaaattattcttttgcaagtaaaaacgtatttaattaaaatgatcccttcttttttatttttgaaaagttcaactgacttattaaaacttgtatgcacttagaattttctttttttttttggaaaaaaaaaggaaaaacgtttgagactgttgacccaagaacagag

SEQ ID NO: 24278 - DNA, 418 bp, Glycine max
  Intron number 2 from transcript Glyma11g14390.1 (locus Gly ma11g14390) derived from phytozome v7.0 (chr-ID Gm11; pos 10290723 to 10291140 reverse strand)
tttcctctctcttccacgggaaactcaacatccttgtgagttgttgctggggatatcgactattgatatgattaaaatagtatatataagtggagaataatctttatcctatgagctaacttttaagattgaattaggatcacgaccaaattataagatagtatcaaagttttttctagtgattgttgttaagcctatcggattatttgtaattggtttgttatcagaccacctttagatgttcagtcctgcaacgtgttcataatcataactcgtgttcattttcttcccatgctattaagggtcaaaatatgtacttttctttgttgtgaattgctttgaagttcactttggattagttagccctctttatgtagacatatgtattaacctgattaatttgatgtgtagataaaca

SEQ ID NO: 24279 - DNA, 771 bp, Glycine max
  Intron number 3 from transcript Glyma10g43500.1 (locus Gly ma10g43500) derived from phytozome v7.0 (chr-ID Gm10; pos 50164741 to 50165511)
ggaaagaagggactggtcttggagtctctgagcaggttttcttttttactccctcttttttctcctccactgaatgacgtatctgcactcaaaaacatatttttaaatagaccattttcatagtcaaggtaaaaaatgacatactttgtgttaaagaataaaccttaaagtatggaatatccatcaatttaatctctaatttgatatattgaactaacgttcagggaccgagttgaagggttttttttcttcagtttttgggatacttagcaaagttagcacgatttctaatacctgggcgattacttttatgtattcttttactttagggatcattagagagagagtaatacttcaagaatgaaattgaggatcttatttgggcattaaacgatcttaattggaaagttatgcttggtggacaattctttacttaacacctcatcacactttcattgttatgttagagattgtgacttgtgaggtttatttgctttacattttaaattactatgttatacttaaaacaggattcaagatataataaatgatggaatacttgagcataattgatgttaggatcaatttaggcttgttttctcatcccaattcccaaaataactgttaacctcctctttcagtgctactctcatctgcataattgtagtttattttgattttgattataaagtatgggtatttcgatcttgtaataattctgatgaataaatttgttttggaaacagggtaggttagaacctgtggagactc

SEQ ID NO: 24280 - DNA, 553 bp, Glycine max
  Intron number 2 from transcript Glyma11g10770.2 (locus Gly ma11g10770) derived from phytozome v7.0 (chr-ID Gm11; pos 7650416 to 7650968 reverse strand)
aagtgcagtctcaggattgccaattaatctgaaaggtattgttcattttctctcctgctccttgttgttaatatcacttttttatttgcacatgtctcattgatgtctaactacagtttaggagaagtgttaaatttctgacacacttaccttctcattccctatttactacttcaattatttcaaagtatactgagccctgaattggtatacaagtcaacatgaagaatcaaacatgtttcctctcagccactggagagattgtgctcacttggctgtaaaaaactattgaatgttggccattgcaaccaaggccagtttatataatagttcaatgctttaatacatgaataacaagctaatattcagatttatctgttttttgttgataatttcagcaaaactaagtgactcttgttattgaattttgtaatttgattggttatcttttcatagatatggattttgctatgatagagtatgagaacaaatatcgctttactgaaaatagcaatatatgtaggtaaaagggcttttattgctggtgttgctg

SEQ ID NO: 24281 - DNA, 814 bp, Glycine max
  Intron number 2 from transcript Glyma09g03760.1 (locus Gly ma09g03760) derived from phytozome v7.0 (chr-ID Gm09; pos 2740180 to 2740993)
ctcaagtttcttgctgtcctggtaagctcgggtcacacttgtcattgctttttattatcttggagttaatctgatgataaaaccatcataattgaagtttttatagtcactataattaattcaattttatcttattagttctttccaccatgtagatgcacaatttgcattgtagtattctgtgttgattaatctcgtataattgcgtttaatcaccttaggaaagaaaagttcgatgaaaaaatgtttattgagctgttagatttaaaatctatccctgttgttatacattttattgttttacttgcatttcttttgatttttattttactatcttaagattgattgttcatattggaagcagtttccaacttcccagtacacttgttctgattgttgcaattttaggttaagatatggtagtgataattctgcaagaggaaagaatttggcatgacaatgttttattttgtccaaattaataaacattcgtgtgggctgggagtatacataacaaattataaaacctagtgtacaaattgtttcagtttatactgttttacataagttgaatcagcttgagttgcatcatcttgtaactatttgacttttgaaccccacatgtggcaaatatgttagtttggatgaatttagcgaacatgatacttagttctaggtgtatcaccactcttgtacttgggatgttttgtgcattttttcattctattcccttcctaaagtgtcttgtaattttttttcttttcctatgctaactagcttttgtaattgatcagggcctggctgccttgattgg

SEQ ID NO: 24282 - DNA, 813 bp, Glycine max
  Intron number 2 from transcript Glyma12g33390.1 (locus Gly ma12g33390) derived from phytozome v7.0 (chr-ID Gm12; pos 36683089 to 36683901 reverse strand)
gttggcttcctgaaggtattgtctgtgctcctactgcattgtaatgtatcgttttataacgaaagattctgtttatttgcatttgtatgctgaatagttttggtttggttaagtggaaatgattttgaagatttctgtctgagcactgtatgatttagttttagcattttagcttttgatttcctttgttttgcttcagtttggttttctttataaattgaaactggtcttattattcaaaactttcttctttttatcctgtttgctggttgacttgggagtttattgagtgtagttagacgagaaagggacttggaagatattttacagcctatgtggagaaaaaaaattaggactacaaagagtattatattatgtggtcccgctctttggattacctagtctgtgatcattttaattacctgacaattggattttacttttgaattaggtagctaaaaacatctgtaggattccttgtgttctttcttcaatttaattttcgggtaagttagtgtttcttttctgttcttgggttaaacttgatagagtcttgtcggatctgataatataatgctttcaaaatacatatgaaatacagttcttcatatttatggggaaaaggtggtccatctacatgatgcttgatcatatctttatataaacattaatcttctacccaagattgatggattgagttatgccctgaatcttctactttccccactcatacaactgaatcttttagtgaagccatacgtactccttttgtttgtaggcaaagagaagactatttgaagatcaagaagcaag

SEQ ID NO: 24283 - DNA, 340 bp, Glycine max
  Intron number 2 from transcript Glyma08g48090.1 (locus Gly ma08g48090) derived from phytozome v7.0 (chr-ID Gm08; pos 46810711 to 46811050)
gaacaatagcagtgctcccattttacacacttgttctagctccaaaatctgaactaatatgtttcttactgcatttgataaaatttatgatccatgatcacaattcatcttttctcaagtatatataatatgcaaaaagtatttacataggtatgctagatatacatttaacccctcccccccaactaaacttggacctttctcctgtagtagtaaaattacattttggcggattcggatattcttctttctcgtacctttttattggattttgattttgcaattgagtctgttttcctgattcattttccttaaatgcaaaatgcttaccaagaagtct

SEQ ID NO: 24284 - DNA, 483 bp, Glycine max
  Intron number 1 from transcript Glyma11g37530.1 (locus Gly ma11g37530) derived from phytozome v7.0 (chr-ID Gm11; pos 38613775 to 38614257)
gcctcggtatgatcttcttcttctcctccacattctcaatcactatgcattgcaatgcatgtaggccttttttggttatgccatttctaacatttagaattctccttcttttctttagaacaaaatagctagtcacaaatgataaaaaaaaaaaaaaacaaacaaacttccaattttatagactcaaaggatagaatgcaaatatatggttggatagaatttagctggattcaatgatagattgtctggtgaaataaagaatcaatatttataaataaccatgcttttcatcatattttttttcgaaattttatgtttttgttctttctaagatatctaggcagaaatgaactttagatataaatattcttccctttgttgtctaaagttaaagatgatgcgctataatatgcattacgcaatagcagaagcattcattaatcaattaatcattaatttgtttgattacgtgcatgcagtacg

SEQ ID NO: 24285 - DNA, 613 bp, Glycine max
  Intron number 2 from transcript Glyma12g36040.1 (locus Gly ma12g36040) derived from phytozome v7.0 (chr-ID Gm12; pos 39149574 to 39150186)
aagactggaatttttttgaggttcctgaaaatactgtaaggcgtaccatgcatgaagagtactttcactacgttttctaatttatttgtggagaaaccttagatgtagttccttaattgctttggtgttcttcaatcaaaattggacttttactttggcaatctacgtaataaaagtttgcattataggtcactaagatgaaactctaattttgattggagaacaacaccaagagcacttaaaaaattgcatcgaagggtctcttctgggaaacagcttaattttaagcaattgttgaataagtactcatcattatatgttgtttttataatcaaagacaaataagattaaggttgaattgttttcatatatataacttataagttgttttcacaagttaaataggaaagcttattgaaataaattgaaaacaacttatgcaaagatcataagctaagccattttcataagcttaagcgcatatataagtgtttatgttacaagtccaaataaaatataaatgggctcttctaagttttttccattatatataggcgtatctgtttacctatgttaatctacattttcgttttctccataaggtttgctgtgg

SEQ ID NO: 24286 - DNA, 879 bp, Glycine max
  Intron number 3 from transcript Glyma13g01270.1 (locus Gly ma13g01270) derived from phytozome v7.0 (chr-ID Gm13; pos 936131 to 937009)
gtataacaacattaaatttcaagtctgggatttaggtaacgaccatgattcagcaagttctgtataattttgtacttgttgtgcatatgttttcactgcctatgcttgaactaaacagatcttaaaccaacattagagttacagtcatagaaatgaccatgttatagttgcaatttacaaacgtgctctatgagcaaggttcaaattgaatactcattaaataaattttaatgaaaattagtttttaataatataaaaagtaaatcaaatacaagcaaaaaacataatttaaagcgtttaaatgtattttggtctttctgaatagtatgagtttttcatttgatcccttgcttttaaaacgttggaatctagttttcgtaattccccctctcccatagtccctctgcaacttttcccttttgtactgcatggtattcttccatctcatgttaaatacaaacaagcatgcattgaccctgttttagacttgacctatgttagttttacaactgggtaagtgcaatacataaatgagttagcataattttgtcctcctttggcaataaatgtttttatcttttggcatttttgtatgttggtatagtccaagtgaagataaaaacctagacattaactttttcctgtttcctgtttcttttgatatatatctattttagatgtgttgcgtaaagataatttgttaggattccataccataaatatagttcatttctgtttacaagcatgtgaacatgtaattgcatgagacttaatatgctataacataggagggcttttttcaaattctaattctaattttaatatcaaacatttgtttatacaggtgggcaaacaagtatcaggtaaacactttggctt

SEQ ID NO: 24287 - DNA, 802 bp, Glycine max
  Intron number 2 from transcript Glyma12g02680.1 (locus Gly ma12g02680) derived from phytozome v7.0 (chr-ID Gm12; pos 1740225 to 1741026 reverse strand)
tggtaagttccagtgctccacctgttgtttcatcctaagattagaagcctagccccatctatattgtcctttcaaaggagtgtgacattgtattgggtgaaacattttttaatattgttcattctggtggaattggaaatttgaccttccgagtttgaacatttcatatagtgtctttagatggtagctatgtcctatgggatgtctcccaatttgagtaagtcattagttgtgagatgtggtagcattgcgatactgaaagtcataatttcacttgagttgtttttttatttttctgttatattgaaatagtcatattatcaatatgataccaatgcaatcagccttctggatgaataataccagaaaatctggatctgtagagtgacatgggagaattgtttcccatgacatgatgccaagatactgtatgaagtggagttcctatttttgtgaacaaaaacttgaaactcatcctatcccccacactagagtggggtttgggatgttctatgcttatggtttactacgatgctcttattttaatagagccaagtgccatcatgtcaaataaaactgctgcagaccatatctgagtgtggctttcattttactccctctttcttcctttcttttgcttgtcggtttactttgaaggatttaacttattccttttcataaatttgtgattttgtcactcattgcttgtaacttttgcattacctttaatctgagtcaacttgctttacttttgaaattggatgcaggtggtaccctgtgctgtgttagccttgctcattca

SEQ ID NO: 24288 - DNA, 517 bp, Glycine max
  Intron number 1 from transcript Glyma12g02680.1 (locus Gly ma12g02680) derived from phytozome v7.0 (chr-ID Gm12; pos 1741190 to 1741706 reverse strand)
tgctggtacgtttaacaccactcacttgttttaattattgatcttcaacaaacatttatcttctatttctatttgttaattgtgtaggcctggctaggttaagagtttctccttttcagctctttcaacactatatttcattgaatggaatgcttagaaaataaaattagaaacatcagtttttttgggggattagtttcctcagattttaatttaatccatctagatttccttaaccaaaatttgatttttactttaagattgttattttcttgtatacctcccaaattattcatttatttttgacaattcggtcggcactgtttgcttgatttgatttacgtgcgtgtgttggctcaaacaattcaatgtcttgtcttttgttattggacatacgagagaggtatatatatatatatatatatatatatatatataaatacggtttacattttgctaatggttttgaatgatgtacacagggttatcactcaaatcccaggaattaacggctatc

SEQ ID NO: 24289 - DNA, 559 bp, Glycine max
  Intron number 1 from transcript Glyma11g04290.1 (locus Gly ma11g04290) derived from phytozome v7.0 (chr-ID Gm11; pos 2929762 to 2930320 reverse strand)
ccgtaaagctgtgagtatgatctacttggtagtctgtgaacttataccttcttttcatatgatggcttctaaatgactgttaagggtgcctgtagctattatttgaagagtgaaatgcagtttttttttgtcatattacgtcacttctattagcagttacagcattataactaatggttttattacatattaaatggttttgaagattagatgatgagaaaatagcaaatgttcgtagatttttttaatgatattactggcagagaattatggcttttgttgatggtggcatactttctgtttacatggatctgctttggcatttgtcccatgctcatttaccattgcagtggtagtatactctttcttttgaagaatgtggatgtttttggaaatgtcttgcctttgttgaagttgaaggtttttgagttgtttctagtttttaaaagtgccatgtgtacattgaaggttttgtatggaactaatacatattatccagtgaattgtgcttgtaacttttcttttcaacttcatttttcggttgagtgtaggaagggat

SEQ ID NO: 24290 - DNA, 846 bp, Glycine max
  Intron number 1 from transcript Glyma11g19090.1 (locus Gly ma11g19090) derived from phytozome v7.0 (chr-ID Gm11; pos 15748768 to 15749613)
cccgcctcgaaaccctcgtccaaactaccgatctcgtaatccttccctttttcttacactgtttttttcttcacattttgaatgttcttattccggtagctaaatagtgatggttaagaatgtgattaaattaatcttcaaagatatttgatatagtcaaagttgttttttttcttcttaaaaaaagagtattactatttagcacaaacatcctatgcacgaatgtaacattcaactgttgggcttttttttaaaaacaaatattaattgaataattaagaaaacaaaaagagggatttcacagaatacacagttcatgtgttttgacagaaaatattttcgtaacattcagcattttccaaaaaaaagaaaacagtttgtgatgcatctgcaattactactacatttgtctacaatttcccgcaatataaaaaaatgtgatgaaattgtgatttatgtgagacagcaattgcgatttaaaacctttcatggcaattcttgagatcgtggaaaatatcttacaaatgtggttaatgcgattgcaattaaggttgaaacaccatgactttgtgactataattgttgttgcatgtagttttttaaaaacttgatcacaaaagttttaatgttgcagctggaattatggttataattcacaatttacaatataaattgtagaaagttatgaacaaatgtgtacatgcagctacaattgcagtggtgctgtggtagtaatggactgcaatataatacttgaccgttttgatgattttgtatttttattttattttttacatgttctttgtttcagacgatcaatctcgctgcaatttgcacaccggcgga

SEQ ID NO: 24291 - DNA, 447 bp, Glycine max
  Intron number 2 from transcript Glyma11g09150.1 (locus Gly ma11g09150) derived from phytozome v7.0 (chr-ID Gm11; pos 6475044 to 6475490)
gacaagaagcttcagagtaagtctgctttgcattttttttttttttttgcttctcttattctctatttttacatgttcgttcgtgtcttccttttgtttttgtttttgtttttgtttttttttacatcatacgagttttttcaagctggagtttgtttgtttataattttttttggatctagggatgcattaagtctttttttttttaatttggtttttgtcttgtatctcgttcttatctttgcacaatgtttattcattatttacgaattctgcttgtgttttgattgctcattatgtttatacatgaacatatgggttaaacagaaaaacttgaacctatagattcgtagatctttatatttgaaaaaatgtcttgcaatcaggggcgagaaactatactatactgaaatgattggtatttatgtccccttgcagttaaactga

SEQ ID NO: 24292 - DNA, 378 bp, Glycine max
  Intron number 2 from transcript Glyma11g12060.1 (locus Gly ma11g12060) derived from phytozome v7.0 (chr-ID Gm11; pos 8608121 to 8608498 reverse strand)
gtttatctaaggtatgatagtagtattcagttccctgaattttttttaatagatactcataggattataacatagaaattgaaaataaattaagctaaaatcaacttatactttcaaagagcaatcaagacgaaggagatttagttcgattggttaatcaggtgcgtgagtatttgtcttctattcttatggataaaaaatagaaaaatcaaatgagtatataagttgattttgattccgagaaaaactaaattcatttctttttcttatgagaagtttatcaaaatagcatatataacttcaattaagaaacttggatacagaggggccaacttttatttaacaagttagactgatggtttatgttgtttcaggatt

SEQ ID NO: 24293 - DNA, 516 bp, Glycine max
  Intron number 2 from transcript Glyma09g39960.1 (locus Gly ma09g39960) derived from phytozome v7.0 (chr-ID Gm09; pos 44933121 to 44933636 reverse strand)
attgataacaattaggagtttctggttggatagtagtattaatgatataatttttatgatttctgttaatcattataatattaaggaccttagagcccatgctttatacacaaaagttaagcttaccacctttgcaagttgtgacagacaatggtcactgctatgtttttgaacataatttagcaatagaagctaatgcacagtaaatttttatatgattatgatataaatggagatttcgtgcctgccatgtgttaatgtgtgccaggatttacagtggagtaggtttatcttgtcaatgacatgcataggtgctaatggtccataagcaagaagttattgaacttttgaagaaaatataaagcaattttgactgaaatctgaaaacaatatagatgaagaactttagcaatgattattcattatcaaattctatagagctttgagttctggatgcatgtggtggactgtggtgtgaaatccactagtattgtggaagattataagttctagccc

SEQ ID NO: 24294 - DNA, 637 bp, Glycine max
  Intron number 1 from transcript Glyma09g39960.1 (locus Gly ma09g39960) derived from phytozome v7.0 (chr-ID Gm09; pos 44933616 to 44934252 reverse strand)
caagtaagcaacgtgctttgagattgacgcaacatcttcatcattctcttctgttatgtttcccataataattctgctctcagatctgactcactcgctgaccgcaacaacaggtaatttaattgatctgattcagttccggtttctttttgcttcgccccagaagctgattgttagaatttctgaggatgttgggctctttgaatgatgggtggttctcaagttttgattttgatggcttctgttacgtggggtttttgactctgtttttgttgtttttatactttgtgatgtcatgtggtttgttaaagctgtgtttgtttgggtttgaaatttgttggggaagttggaattcgaaattgatttgctcctattgtcatgcatgctaattgtgagtttttattgttaaattttgatttttcttgattttgatgtgaggaaggttgagatttattgaaggattggatatgcttgtactgtagtgcacgtcaaatttattagctttttatgtgggggtgttggatttagcatttataatgcgggggtggtagctgactaccctcatttctgtatgtcagcaactcaacatatgaaaacctcagtttaactgtccaaaattgataacaattaggagttt

SEQ ID NO: 24295 - DNA, 529 bp, Glycine max
  Intron number 2 from transcript Glyma11g29300.2 (locus Gly ma11g29300) derived from phytozome v7.0 (chr-ID Gm11; pos 29882521 to 29883049 reverse strand)
ctcagctgactaaagagcacctttccaatttccaagtacctacttcctctgtctaatcttcccttccttttaaaatgaatttccaagtactagtcacttcactttctgtcataacagaaattatttgttaattaattagttcttatatccataggttttgaaatggctatgtagcagctgcaaatggggtcactagtaatagtaattattgctgcatggtatttattttatataaacttcaacttttaatagtaaactaatcagtgatacgctcaccattctgcatgttctatttcttgtccctttacataaatgtgtccttgtttgatctgtagtataattcttaaggtaatatattgctgagatttttcctttttgtttttaatggtgtaatgaaatttggaatcttgctttcttatttccaaccataaatgcatttgtatccaagtttattttgataatatatttacagttttttatttactattttgtaggctgttgtttttactgatatcagtcttgagaaagc

SEQ ID NO: 24296 - DNA, 742 bp, Glycine max
  Intron number 2 from transcript Glyma11g08750.1 (locus Gly ma11g08750) derived from phytozome v7.0 (chr-ID Gm11; pos 6190094 to 6190835)
ctcgctaccttcggccgtttcctcttcaacgctgggtattcatccatccttcactaattcattcaattattatacaaataataatcatcataaccaattgtagatccacaagtatatattttatcattcaggaatagttgggaaatcgtgattcaccgcaattattcaatgcatgcattccgctcaatttactcatcacctctaaattactcacttgcatggtttatcggtttgatataattacttttttatattataaattaaaatatacaaattaaaaaatactacctctcactctcttcattattaattggacattttaatatattttttttaagaatatttaccctatcagccaaacctggaaaattctaactcaatcatttcaaattattatctttatctttttatctattattatttttatttctaaattgagttttaaatttttattaataaatttaaagatttttatttataattttaatttttatttcaatatacaaatattttcaatgtgaattaattactaaatcatcgataatatgatttctaaaattgttatcatgaattaataatttattaatttgtgatcggattacatagatatattttattataaatttcaattatacccctattaaatttattgtagttgttaattgcgtgtaagtttcattactatgtgtgtttcttttattgttttgattttgatggggtttgattgcgtgtgataggctgt

SEQ ID NO: 24297 - DNA, 609 bp, Glycine max
  Intron number 2 from transcript Glyma11g06370.1 (locus Gly ma11g06370) derived from phytozome v7.0 (chr-ID Gm11; pos 4518698 to 4519306)
gcaaaacttgccatcagtgcaggttatcctttatctgtcactctactatgtgaaatcaaaattgttaagaggagtgctatctaccatcacaccctctaacacactctttattattatttcacttttttttttcgaaatcacaatatctctagccatgatgtagaaagcatattagtagcattttcaattgttaatgaatagttggtgaaggtgcattggctgtctgccatgatctgtgtttactatttgtttaaatgtttgaataacattttcgagacatgcttagcgggtaacatgacactcatttttgtgtgaaaataaaataccattttttttattgtgcactcttgtatgattgtggcaccttcaacactaagagcacgtttctttacttactgcatgccagaacacacacacacacatacacactcgctcacataattgagtttcataagcttttaccgcaatcccatttatgtgatgaatttaattttatgatctatcagtctttatgattttgttcattttcttttctcaacaaactttctcattggatgaaaataatgttttataggcaaaagactcttggttatcggacaagttgtagcc

SEQ ID NO: 24298 - DNA, 847 bp, Glycine max
  Intron number 1 from transcript Glyma09g34090.1 (locus Gly ma09g34090) derived from phytozome v7.0 (chr-ID Gm09; pos 40530666 to 40531512 reverse strand)
caaactccacccaccttgcatttcaaaaatcataggttcgtaatcccaacttcttcttcttcttcttcgttttttttttctttcggatttgaatttaaaaaaaaaaacttaatttttattgttttctgctattttccactgttcggaacaacatggagctttgaaattagtttactggggtttttatttgttcggtgatgggtgatgtcacactcgtcaatttgaagtttagtgtaaaactggaaataatgagttgcaagttaagtttcaggcttggtcagtgaagaagtttatgctagtggtttttcgttattgcctgattaatgtctaatataaggattttagatgtttggttttggacagtgaaaaattaagtcttttcatgttacattggatgatgggatttcaggatgttgtagattaactcattcaacaaggttcaatgatttaccttggacgataagtatttggtatcgatcaaagaaagcattttttgtcataaattacacttcccttcctcactctctctaagtatgaggttttaagtagtgattttgtaccaaagtatacctactttctcagtatgattctcaaagttctttgtgttgcatgtgacaaacactactatcattaagttcagatggtgtctgcttcaagatactggttcaagttgccagctatttagtgatagttatagacaaagtttggattctcctttgcttaattaataggtcttgattgttgaatgatccaggaaaggatttaaatatcttcgatatgtggtctaatcattcatgtatactgtcctgcaggtttgccgttagctgcagttacgcagaagcaggtg

SEQ ID NO: 24299 - DNA, 455 bp, Glycine max
  Intron number 2 from transcript Glyma10g43390.1 (locus Gly ma10g43390) derived from phytozome v7.0 (chr-ID Gm10; pos 50090726 to 50091180)
ataggtaagcatatactattagtctattgttatcatgaaagaaattttctttgtacttcaaaaataatatgaaaaggcttttggagaattaccaaaatagagataaagttttctatagtttttttctgaatctgtggttaattatttatgctgtttctttgtcctgcctcatatatccatatagtgcatgccaaaaaagtatctaattgttgaaattttaagagaaaatcaattgatatgtaaaacatgagacatcaaacctttagagtcacatgccaaaaccatcgaacttaccatttaagtgggaatgtgttaatccttgtcccatgtttgtaatttttattatcctcaaaagcaaagaacttgtaatcaaattttctgtcctgtgactggtgttaccaaatgttttcctgagccgtagtttcacttttggtgggcaggagcactaactactt

SEQ ID NO: 24300 - DNA, 966 bp, Glycine max
  Intron number 2 from transcript Glyma09g10550.1 (locus Gly ma09g10550) derived from phytozome v7.0 (chr-ID Gm09; pos 10647592 to 10648557)
atcacggcgcttacaaggtcaacctcctcaaccaccctttttccctaattttctcatattattgttatatgatagtgattagttcatatgagcacaaaaatacgatacccttttggctgaaatagtgaaatgataacgagtggttgcgagatacacattcaatttttcttcaattgtagaatctcactatgtcagtattaggattaaagagattgaatgaaacttccatttgagtattgagtcctggtgagtattcttctggctattaaaaatttgtgcttcttacaaaaagggtaggtttttatttgatatgcactgtgagaaattgcattagtctaccatgtataatcacttttcaatcagatggggctccgaacaccgtttgattcatcttcaaatgttggattgcatctgaaatttgggtataaatagaggtcgttggctgttataatagttatatgatggctggagtagatcgctctgattccgaatagattccaatgcttataaatgggatattgagcggattctcttgagcagcagctttgtttttttcctttctggagatagaatttatcacttataactgatttattcacctgtctaaaatcttggggctatatctcacactcttacttgagcatatgattttttagatctttgttcaaggtgtttctatgattacatttgatgcttcaacttagacaactatgaactctagtattttcttttaattggataaatttctttactggggttagctttctgcaaatacttaccagctgatcattgattctgtaaaattggagttcatactctgagcaattagatttaaatatattaatggtaaacttaaaccttacaaattatcttctgtgctaatttgtttttcaagtgctttattcttccttctagaaatacatctgattttgataaactcttcatatccaggtgacaattgtggct

SEQ ID NO: 24301 - DNA, 407 bp, Glycine max
  Intron number 2 from transcript Glyma08g43270.1 (locus Gly ma08g43270) derived from phytozome v7.0 (chr-ID Gm08; pos 43103267 to 43103673)
agttgaagtagcaatttcaaaagaaactaaagaatgtcagaaggaagataaaacaaaggtattcttctaatattattgttaatttttcttcttgatgttgtattattgttcttaacttgtgatcacgttaaacttcattttattttcattactttcaattatttcttagtatgtaccaccaatgatgatttaaagattttgatccaatgattttcattttgtgatatttagttaagttcaaaatattttaggctagcattgcaatgttttacacagttcccctcccttttccctaaccaattaaaaaaacaaatgtgatcacattttaggctagcattttcatcttgttgtatagcaagaaccaggaaaaaattacaaggtcttgtattgattttgaaattgcggcc

SEQ ID NO: 24302 - DNA, 698 bp, Glycine max
  Intron number 2 from transcript Glyma10g17160.1 (locus Gly ma10g17160) derived from phytozome v7.0 (chr-ID Gm10; pos 20287632 to 20288329)
ctggagatacaaatgtgagtaaaatttttcttgtgttgttgacatgtcagcaatactttatgttgtaatagattgcttatataagtttattgagcatcaagcatagttaaaatattgctttattgctaccttgagctgtaaattaaattaaatgatccccgtgagaatcaatatcttctatcccccgtgttcataatagctttgatacctttcaaaagaaccattcaacccagtaaggagccaatgaagaaatttcgatgtctaaattgctgatgcccgacaacttttattcttcgtgtccagagttctaattatgaacttagtcaccattgagagtatttgtaatgtgggaaagaaatactaaaataccatatatcgcgtggagaggtatgaggagtcagtttatcaaagttttggaagacagttaaattgatatggagtaaacccttcactatgagtaggcatgtagataattaactgttttctaaacaaaaaatctgttgtataaacacctttaactgtttcttagtttgagtgtattttaattgagaaattttttagcatattaagaaagccatttatgctgctaataggtcaagaaacttgtatcttgatatttatggtgatttcagtctcgaagcaatgtatgggtatattcataatttttacccgtcgttatatacccgtgctgcagtact

SEQ ID NO: 24303 - DNA, 735 bp, Glycine max
  Intron number 2 from transcript Glyma12g34300.1 (locus Gly ma12g34300) derived from phytozome v7.0 (chr-ID Gm12; pos 37470756 to 37471490 reverse strand)
gccccaaagatactgctttgaagaaaaggtgcacagttttccccccacgttttctttctcgttaatttaataaattcaaatttataaaagaaaaaaaaaacacataatcagtctagcttaatgagtccaagttcgagtacttagtatacagttgtgttaattacttagaaaagcttttgttgctcatagtagttgtattcggctggagcagaatagtttttggtagaggatacataggtctaaaagaaaaacacacataatcctcacttggcctagactttagagttctgattatttactttaccgattttttttttttataatttttttcataactttgaagtaacaattgaagactagaaggcagggtagatttttccaatagtttaaaaagacatgctatgctagtcataggtttgtcatcgatttaactgacaggtgtggagtaatataattcagtgaaaatggcaattcaacaaagtttctaaaattatgatggtgagcactggcagcattttagcagcatcaataaacagcttgccatgacagatcctattgcatatatgatgttattttgcttaagtatgatattacatttttctcctgttttctttagccactctccctacatcttctttccctgtctaaaggttaaagattattgggtttaatccagatgcttgttcttggatgaagttataccatatctcttgtttattcctgttgcagggctag

SEQ ID NO: 24304 - DNA, 611 bp, Glycine max
  Intron number 1 from transcript Glyma11g07220.1 (locus Gly ma11g07220) derived from phytozome v7.0 (chr-ID Gm11; pos 5041401 to 5042011)
cagcggagtctccaacttcggtccttgaagacgaggtatgttcttctgtgcctctctttcttcctcgaacgatgataagcgtttttgaagagtgaacatcgaaaaatgcagatgcttctctcactccgttacactcacactcaacgtgctcttgatgcttatgcttcgtttggaatgtatttttgattaaatgtaacgcgcgttatgtattgtaagctttatttgaacggttattttacggaaccgcgtttggtgcctcaaagtagtgttaaaactttttttttttcgttttttgttcttgttctgctgattgagtgatagattttttttttgttatttttttaattaacattgacgcgcataatgtaatgtaagcttcaaatgaacggttattttagggaaccgcgtattagtgttgtcgtcgttttgtgctacaaactagtcttaaaacttgtgtcgtttttgtttttgttatgctgataggggtttattctgtttttgttatatttttttggagtgaattggttttaatgtgtgttgcttgccttttcgttcctaattttttcaaatggaaaggctgtctgtgccccaaaagaagaagttaagttgga

SEQ ID NO: 24305 - DNA, 768 bp, Glycine max
  Intron number 2 from transcript Glyma10g34800.1 (locus Gly ma10g34800) derived from phytozome v7.0 (chr-ID Gm10; pos 42974268 to 42975035)
ttgcgcattcccacactcgccattcatctcgaccggtatatattatataagttataactttatgtcattcatcattcatcacgtacaccatattatttttttttttgtttcaactaccgtaattggggcctttggctctccgatgggatctcgaggcatccccacaagtcctttggaccaactatgagactaatcctcaatccggggcttagtcacttaaaacttatcgcccctccccaagagtgtattctcaggatcaaacccaggtcctcctctcccacaaggttagtgtgtgttgccaaccgaattacacccaagtcattacatagaccatatgattgtaaatttggtagacttgttagaattaacaaatttatcaaatttacggtgatctatttgatatttctgattttaaagtcaaatatgtagtggttgtacaaaactgaagattgtggttttcttctatatttgtactgatttggatgcttagatggggtatattgttgtccagattgaagcaactttgttgtgctttataaaattctagcaattcaatttttgttggctattgtgctgtaatatcaaaacagtgttactacttactagtaacttacgaatgtatctagttttcctgtttggcccaaatattttttttccattactttctttgtcatatgccagtgttctgccacagaaacatgcaagctaccagcagattctatcaccctctcttatttggtggtttattgtttagcacagtgaacctgg

SEQ ID NO: 24306 - DNA, 391 bp, Glycine max
  Intron number 2 from transcript Glyma11g08540.1 (locus Gly ma11g08540) derived from phytozome v7.0 (chr-ID Gm11; pos 6037193 to 6037583 reverse strand)
aatctgggattggctgtgtcttatacttggtgagttgctcagctttcagggcaaaggacaaaacttaaatgcagttgttcaattagaattggagttttaccgtagtattttgcgtaatcctttgatgcaaacctttatcattggggttagctagatggaatttcaattcttattgaagaacaagacaaaaaaacatttgaaaatgccatgtaagttttgactcttgtcaaattgggaacatttgttgggtatggtgctcatgatgtagctacatgattacaatggaatgttctgttggcttgtaaacttattgtgttgtaacctcctgagttttatttatcatttataattgcatgttgtgtaacctgatctttttgagttatacagattg

SEQ ID NO: 24307 - DNA, 545 bp, Glycine max
  Intron number 2 from transcript Glyma09g01110.1 (locus Gly ma09g01110) derived from phytozome v7.0 (chr-ID Gm09; pos 660966 to 661510)
gtttcagacaacgcagatcttgatcaagattacaggtcacacttaattacattaatagacacgtttggattaaaatttacaaatatgtaaaaacaacccttttttcttttatttcaaactggacttcaatgtaaaattgagttataactttgattacaatcagacctaactaaaaataaaataaaaggattttttagtctcccaacatatatatatatatatatatatatatgtatgtatatatatatggctatttaattagtttactctctagctataacttcaatttaagtttctccaaaaaactcggtttgatgataacttggtttctctcaaaagttagtttttcttttcaaactcagttcgcaaaataggaaatctttcaaatttatgtttgcaaactttaacccaattcatgcactaattagttaaatcatatcttgcgcatattttaagtttaatttcttggtacaaaaaaagctgtatctcacggggacacatgtatacgtcctttgtgttttgttcttttttctttcaggaagaca

SEQ ID NO: 24308 - DNA, 721 bp, Glycine max
  Intron number 1 from transcript Glyma10g02210.1 (locus Gly ma10g02210) derived from phytozome v7.0 (chr-ID Gm10; pos 1533816 to 1534536 reverse strand)
cttgtcgccgacggattctccaacactctcaccaggtaccacaatcgtttctcgtctcaatttttaataatctttttgcagttttttagcacgtacgttcagtaattttctaagggatgactttatctacttatagttccaacatcttatcaacgttctgtcggataatattaattagactgttttctcgttttactatatttttccattcaaaatcttaattttatcataggctaggctgtctcttcaaaattcaagtacatggtcatggtacatgacaataaacaagaaaagaagttgtctgtttcctactttccttttaagttagagtattattttacaatattattatttgttcatcacatcatttattctatcacacgttaatctctctattcttctcatcttttttgtttttttttataaaatgttgtaaaaaataaattgcgactaacgtttctctttcttttgttgaataacttgttgagctctatgttcaaaagccacaatagctggcttaaattttggcccgagggggttatttcttgttctctttatgaaaaggggggattcttgtagtgtcgggttaattgctaaactgaataatgaagtgagggattaataattgatatatatatatactaattaattagtgttatgttgaattggttttgtgtggggaacaggcgtgggtacgcagtagcgacacaaagcgcaacaa

SEQ ID NO: 24309 - DNA, 582 bp, Glycine max
  Intron number 1 from transcript Glyma11g30150.1 (locus Gly ma11g30150) derived from phytozome v7.0 (chr-ID Gm11; pos 31192578 to 31193159 reverse strand)
aatcaggttcatttcattttcattcttctttctttcacgttaatttagtctttaaacttttttggttaagatttttagttcttaaacttttcaaaaatttggtttttaatctttcaaatcttattaaacaaataaaaataatgagttcaaatttttttataggaactacaaattaaaatttttaaatgttgagagaccttgactagtcaaacaaaaacttaggaactaaaaatcttaatgaaaaaaattgactgacattaatcaatcaaaagtttgtggactaaaaattaaaatttaaaaaaatttagagactaaaaacttaatccttactatttttgctaatatttagtaaaactagaagcattttttttatgcaaaggcaacttattccaccccggatgtgttttctacttcaaagtgttgccgctaattaatttattgctaatcctagcttaaaatattttcgaagatagcacaggcaaaaaagttaattataactaaatcaatccaattcttaggagataggagcattaaaagatgaaattgttttgaatacgatttgaattactaggggggaggagc

SEQ ID NO: 24310 - DNA, 887 bp, Glycine max
  Intron number 6 from transcript Glyma08g43620.1 (locus Gly ma08g43620) derived from phytozome v7.0 (chr-ID Gm08; pos 43403122 to 43404008 reverse strand)
atctatttataacaagcactggtcttggagttatagtgagttcctttattgaattcaaaattgacctaataatttttttgcatgtgttgttagatgacttcatggctttctataaattctctagatgatggtgttgctttcacatgcatctatacctacttgttacatgaaggaacattcatgactgaagttttcaatgtttttgtctggcttcacttgtagtctgtcccagggaattcacatttgattcaaagcacggttaccattttcaacttatatttttattaatgaattttgttgcttacacagaattctatcaattttggtacttagttgtactgtttgtttctttttgatagaaaaagagattttattagggaaaaagatagaagaacacacctagtgatcttggaaaaactatggaagggaattgaaagctatttctatgcttgagttgcacataacatacttgtgattggatatggcgtgagaggccaaagtctgacaagttatatttgtgcttatcctgttaaacaacattgtccttacacaagacattactttagaaagagcactggaattctgaaatttggttgtcaagcaagagattgtgaaggttggggaataagtaagaaactgaaaaggggatttgcaagaaaatgcttttcaaagtcctttttttctatcaggattagtagaaaggtagtagaatcaagtaagagcaaggtggattataaatacatttttatttcaaactaatttttaagtagtgttattagtacaaagcacagaacatgctctcttgtttttccttctcctatcatttcattgaataaatgcatatttatgcagactggccttctcacagcatatatcttgaaagcctt

SEQ ID NO: 24311 - DNA, 872 bp, Glycine max
  Intron number 1 from transcript Glyma12g23200.1 (locus Gly ma12g23200) derived from phytozome v7.0 (chr-ID Gm12; pos 25503814 to 25504685 reverse strand)
gggccaatcaaaatcccaccacccttggtaagtcatttttaatgtgtagaatcttatataacttgtacacctaactttcttgcatggacatgttagtttgatctatatgtatataaccaatataatcacgttaaacatcgttcattatatttgcattgtaatatgtccactctcattcttgataggaaattaaacttaatcgcaaatattgcacctggacctaaaaagtttttttctccttcataatattttattttttcttaaaacaaaaacgattctctcacaccctttaggaggtgtgagatcatgtgtatggaaaagtaaaaaagaaaagaaaatatatgataaaaaattataaccatctatttactctctttcatcttatttctatccatttttctttacatattatttttttattatattatttatcatatctatcacttcttttcaccttttttttcccttttctttctatctcttttttttccacccacgattcacactccatagtttttattgacaccttataataaataatgtaatgataaaatgagacaaacaaaagagaaagagaaaaaggaatattatgaaagaaataaaagagaaatgggacgtaaaaaatcaaaattgtattattcttcaaataagacttgtatttttctccactcgtgtatctactcctctcaaaattagctaaaaagttattggcggtagctttcttggtgttatttcataccaaataaacaacattactgctttgcatcacaagacaactataaaaaaaataataataatacaatgaatacaaacattataaagcatgtggctacgatgaattaattttgtaacattatatttacagggggagc

SEQ ID NO: 24312 - DNA, 1065 bp, Glycine max
  Intron number 4 from transcript Glyma09g20320.1 (locus Gly ma09g20320) derived from phytozome v7.0 (chr-ID Gm09; pos 25244737 to 25245801)
tatttgatttttgttggaaaagtcttatcctcaaggtgactctatttcattcattggaaatatttgatttttgttggaaaactcttgttgcttgctttgtcacttgaattagatattttgtggttgttgtatgctcacacatttgccattatccattttttaatggttttgaaggtgcttattacgtgtttagttgagaggtggtaaatggagggtgagtttaaaatgatttttgacctagatataaagtacttttcattctgcatttccatcttccactttccacctgctcaaacaacattcttagttagcatatcaccataggaccaaactttctgctgtaactgtaagtaggacgattaatgaatcattaaagtcctgtctgcgatttgaatgctaataaaatgtatagttttatgtctatctaaaatacttatcacatatacaccagcataaggctggggaaccattaagtcacctcttcttcctgcattcttgttctgtttaagtggcttgtgtgtcttcatatagcaaattagttaaactgatttctttatcatactttgcaacttcgaaatactcaaacttttaaaccattattttcatttctttagacttaaaacctttcggttgtctttacctaacaactttagactttgaaatagttggttcgtgacatggtatcagagctgacctccttgattatgtgatcaagattttaatcctttctcttgttattctaattaaaaaaatgaatttcagcatataataataaagggttgggtttgcgcattatctatgcttcaagcccaaatgtcatttatgtgagggtgtttgttaaagatggaataaagccattcatgtggcttcacctagcaacttaagcttttggggtagtaagtagtaacttactagggctcatgaaatcagagtcttgcgtctgtccatgggcatgccatcatgcgtaaattcacattctgataatatctttagaaactggtggtgatttaatattcattttcatttgcaggggagtcaaagctagttttcattttcatttcttga

SEQ ID NO: 24313 - DNA, 674 bp, Glycine max
  Intron number 1 from transcript Glyma09g11960.1 (locus Gly ma09g11960) derived from phytozome v7.0 (chr-ID Gm09; pos 12254163 to 12254836)
gccgatattgcccccaaaactgccgagaatttcaggtatctacgtttctactcttaaagcgtgcgttttcttcttttagtgcttagttagactgcaccttgcctttaagcattgctaccaacttgcgcatgaacttccacgaaaatatcactagttttggttttagtctacaaaagtttattcattttaatttcaaaagtgtaggtttattattattattttagttgatgtgatgtgatattatcttttctactttagaatttaagaaactttgaatttcagcttaaaattgatgcggagatataaggtgggtttgatagttaagggaggagggaagtggggaaggtttgcttccctctactagcaaactaacaactaacatttgctgataaaaaaaataaaaaaagcttacatttgtttcagctacatgacaatgacattgaaaaaaaatgcaatgcatgtttggaatcttgtgtgcttgtagaatagtatagatgattttattacttctcaaagacaatttatttgttcaactgtatttttaactttccttttttttttgtgggtgtttgttattgcattgagattctctttattgacaagttcagttgattaattttggcttttgttatttggcaggcagttctgcactggggagtacaggtactggaaca

SEQ ID NO: 24314 - DNA, 715 bp, Glycine max
  Intron number 1 from transcript Glyma12g12190.3 (locus Gly ma12g12190) derived from phytozome v7.0 (chr-ID Gm12; pos 10338893 to 10339607)
tcctccatctccctcccatactcaccttctctctggtcagttttccttcttttccacctttttcagtttttattctcaaacaaaacaaacacgccaacacgggtttctgttacaagagttttttaaaaaaagaaaaaaaaaaatgaaaataaatttattgttcccttgttttctttctccatatgcttgtctttcgtttcttttagtttttagcgtgtctttgtttctggacttcgttttgttggtttaaggttaaagcgtcagcgtgttgtctttccttaaatgtcgaacaaagcagggttggcttgagttttcttcaagacttagtttatcaaagaaaggaagagttagatagattaagagagagaaagagttgtcattgtttgtttttgtttatgtaactatgtgttgagttggaaacattattattggctttgttaaaacagagaaattgttgtcgaggagataaaaataagaccgttagactgagagttttgcgggagaaaaaaaaaacaagactttgactcttagctgttgagataatttgcctttcaattctctttcttcttagttattaacctcaataatttctcaacttctctttctctgctcctttgttttttcctcatcttaattagttctcattgtaagagaagctgaaactccttcaatctttttcttttcctctgacaccatgattttcgatgaagggtca

SEQ ID NO: 24315 - DNA, 719 bp, Glycine max
  Intron number 2 from transcript Glyma09g32610.1 (locus Gly ma09g32610) derived from phytozome v7.0 (chr-ID Gm09; pos 39121369 to 39122087)
gcttccaacccaacattgtggtatgtgtagttttggcttttcttcaaccgatctcaattgattttacacttctacaggcatatatatatactatagctttattttgtaccatatatgtttaacttattcgtttcaattttttgtgatgagtactgaacatgttccacacatatattttcataattgtcagtaactatgacttaaaacaatatatgcaagtgggcttaaattgtccccaaagcaattcaaggtggtttatttttctaacccttgtttttttttaattaggaaatgattgacatgatatttatcttcttattaatgaaaaagtttatatatatagcatagccctagcaatcttctttttgaatctggattaattgtctcctatttgttgggttgaatttgaaagtgcaagggtagtactaattaaccctaggagaaaaagggatggacggggtgttctgctaattgaaaagtatttgagttaaatataaagtgattaaaagagccaaaaaatgtcattcaaatcatgtttgtcgttttagttttgctaattagttctcacatctaatgttgcaaaaacgtacaagtaataattctcgtgtttcataacatgtccatgtgagtgtagtaatataaacatatatatttttttatggcaagagtgggtttggatcgtggatcttgaaattggacaatactgtttgcttgtgcag

SEQ ID NO: 24316 - DNA, 678 bp, Glycine max
  Intron number 1 from transcript Glyma10g40560.1 (locus Gly ma10g40560) derived from phytozome v7.0 (chr-ID Gm10; pos 47946948 to 47947625 reverse strand)
ccttgcctcacctcagcatcaaagacactcccattgtaagctctctcgcacactttttccctttttcctcaaacatcctttgttttttgctgttctttactgtgaaattaacaactctctgtctcttctttggatgcatgtggcttgaattttttggtcattttcttcctcctctcttaatgtgtctttctctctagcaactcagactatgacttttctggcaacttatttcatgtttttttgctgcttgtcgtgttttgttcccgtgccagattcactttgccatttcagttttatctcttgttctcagtgtttcgctcaaagggttaacttgggagagactcagtgagtcacgtgccttctttcaataatttttcaagggtgcctactcagagcaataaattgataaaaataaaaattaaaagaatagggaccgaccaaaagcctgaaaacccggttctgtgtgttatgagataattttagcttcctaactcaaattggtgcattgcattcaactgtttcgttgtaaagggggaccaatggatcatctttttaaaaaagatgccgtttattctaaacagtgaatttcagttgataagcaagctattattaacctttgttttgttcatggatgcccttgcaggaaacttcatctgctcagtacatattgcagcagta

SEQ ID NO: 24317 - DNA, 759 bp, Glycine max
  Intron number 2 from transcript Glyma09g29580.1 (locus Gly ma09g29580) derived from phytozome v7.0 (chr-ID Gm09; pos 36409085 to 36409843 reverse strand)
tgagaatctctggaagtatattaaccattttggaggtacttgttatatatacatattctttattctaatttagttctcgttgcattcagcacattactaaatccatgtgttatgcagaatttgactgtcggctatgtaagagtaatcatagtatgtaatatatttgttgttattaaccattcagtagccttttacctaacaatttatgcttttagattggttagttttgtcatgtgctagatgacaactgttcacatataaatgtttggattagtaacagtagttaaatacagcactttgatatggaatctttttataccaaaataaaacataatcaaaatgtttgttaactttttatccttttttctacgaggtatgacctcagaaaggattctgtagagcttcttgtatacacaaatatgtatttttatgactcaaaaagtaacaatgttattccatggtgcatatctatggcacctaattatattcttaaatcttgactcattgggcattcaacacctggcgaaacataaatagtagttagggcaattaaatgaatctagttttgattagactgttccacctaccaccaaacacttgattgaagagtagaaaaattatactaatctacattgttagtacgtaatattatatctaatcccacatataagttcgatttaatttgtcggtttccatgtgttgactctttcttctcccatggcaggacttgctgtgtacatatttttgctgctgagactg

SEQ ID NO: 24318 - DNA, 491 bp, Glycine max
  Intron number 2 from transcript Glyma12g11070.1 (locus Gly ma12g11070) derived from phytozome v7.0 (chr-ID Gm12; pos 9096554 to 9097044)
gtaacggtaagccattcagtgtggcttgccttgtaacttggtagtgtatctttctttcttctataattccttgtttgtataccaaaggaacaccaacatatatgtatcattcaccaaagagtaaaccttcactttggtctgtcaactatattattattctcttttctaattagagtacttaaattaataaaattatgtaaataattcttgaagtattgaatatttgtcaatttactaatgtttaggaacaaattttaaggatttttaacttctcgggtaccatttatttacactatgatttttaatatatatttagagattatttatataatttgtttatttgaaaactatttagaagagagaataatactttatatccatgaaattgatggtttattcttcattaaacttatatccggccttttcttttctccttttgattgtgttgttgatcaggatcttgtgcggcgttggattgtgcacgctggcga

SEQ ID NO: 24319 - DNA, 963 bp, Glycine max
  Intron number 1 from transcript Glyma11g37600.1 (locus Gly ma11g37600) derived from phytozome v7.0 (chr-ID Gm11; pos 38656291 to 38657253)
gattgaatttcaggaatcctgggtgtctacgatacgtaatcacccttttccatgtttttattcattcgatctgtgatgatcataatgtcactcatcggaaacttgttgatcatatgattttgttcttccttcccctgaatcccctgttttttcttttaccttttttttttctggttgcgtattcagcaagtgtacttgatgaattggattaaactgataattctacgatctgggaaagtcatacccaaaatacaaaaatcaaaatatattataaaaaaatgtttttttttcacctatccttgaataattggttgcaaaagcggttccatttacaagcccctgtttctgggtgtttggccatggaagatgattttgctgggtcgattattccttttcattggggtgatctcactttgatgaattacgatgacttcacgtgaatagagatttttaacttggattaaaaaattggcaaaattcctttcttttttgttttggaatatcccaccgtttgggggaatgaataccatacttcccctcaaagtttttatctttggattcaccttcaaatattctgtttgttttctctttttgcatgtttttttcttcatctgggtcatctaacatctaaatcaagcgttttatacaacgatcggtgtggatttccttctctgattctgatttttttttctatctcgtatttgttattttatttttatttttttggtcttgttgttcctcctctttcataggagattcatgattttgtgggtctaaaatctaaatgcgtgccttgtgatgattgtagctcgtaaatcataattgataatgccacaataaatggagacagttggtcatataattcagttttttcccttttttgtgtgtgtcacataatgggtttatgtaagtatgtttttgtttgtaggtttgagacctgagatttgctagtcagttatattt

SEQ ID NO: 24320 - DNA, 473 bp, Glycine max
  Intron number 1 from transcript Glyma10g08480.1 (locus Gly ma10g08480) derived from phytozome v7.0 (chr-ID Gm10; pos 7317261 to 7317733)
tcctcaacaaagtcaaccccggtgctgtccttaaggtcccacctttaccactttccaattttgtgtcttttcccttttccatttttcctcattatcagttattagataggtttagattattatgttgttattaataattggttggtttgaatgttactaaatttagttttcttaaataacatcttagatttgagttctgtgtgaatgtagaaaaaactgtggtgactaaaaaaattataaaaaatggtttttatgtaatatagttaatttttgaaatttatgaaaaatataatcaattaggtattgtgtagaaattgtttgagactacaataatttctcatcacttgtatttgaattttctgtttttcttttcttttcctaatagaatggttcttttttttttttttatttggttgctttttgtattgggctgaataggtggtggacaatcctgggcttgctgtccagtctgc

SEQ ID NO: 24321 - DNA, 907 bp, Glycine max
  Intron number 2 from transcript Glyma10g08480.1 (locus Gly ma10g08480) derived from phytozome v7.0 (chr-ID Gm10; pos 7317808 to 7318714)
agcttctcacatttgaagcatctgatttggagaaggtttggacccagttgctcttttgtcttctttcactgtctttctaattatggaattcttggtattacttggatatttgatttgagagttaattccttaatcttggtagaaattttatattggaattataaattaattccttagttgtatgcatttagatatagatttgatatgcatcttgttgatttgtgttatttatgttattaacttgcttgtgcagagtggccctgatctgacaactgcatctaattaatttataaattaacatttgaattgtaaattaattccttaattctttagcaagtaaaaagaatagtaaaaaagattataagaaggatcaaacttattctatattaatgcaaattcttttgaatgaatcacacatatattctattttatttttaatatatatctatatctacattctagtgtatacttttgaatttatacttgaattgattatgtacattgctttaataatttaaaatattttttatagatattctttattttttatatatttttcttaaatttaaaaatatcagtgaaatgtacagaatactttggtagtcactcttattagaaatatgaagataactaaactagcgtatgctaaattattaatcaaaataattaaaactaaaatagaaacaagtaatttttgtaaacaaaatcaattcaaaaaaatttgttccaaacacattttgccatcttgctattaaagataacaccttgtctcactctcagtctcagttatagattttatttgtttctttatttcttttggcaatattttttagtttactgttgaagggggtttgtgtaacttgaaaatgcagggaggttcatcaaataaagttgtggactgcattct

SEQ ID NO: 24322 - DNA, 947 bp, Glycine max
  Intron number 3 from transcript Glyma09g37680.1 (locus Gly ma09g37680) derived from phytozome v7.0 (chr-ID Gm09; pos 43200302 to 43201248)
caagtagaggtgtggtttcagaacagaagagcaaggtgaggtttaaaataattaatatttgaattaaattatttgttgactttatattccctttttttttttcttttcagttgtaacgttcgtcgtcttacctaagttggcacgtgttttctgatatgttgaagcctaactgaggtggattaaacataaaatatgaaaattaatgtggtcacaaaggtgctattttcgattttcgataaattattttaaaattgtcgtattagtgaatggtttgaaaatttattttcacaaatttcaagcgttaaattttgaatgaggggttgaaatcaactactatctcctttcagtttttgttgttagtttttttttttttgcaagtattatttttttattgaagggacaaagtatgaattcttgactgagatgtacatgtggtatggttttgttgttcctcgtcaatgttaattattagtattcgaactgttaaatgcaatcaaagcaactttagcataacgtcaaaataaataatgggtttcactaccccctccttcgacagtgatcaatgacacaattatgtttacaataaatctaaagttagcaataatcatgtgacaaaattaataataaaaataatggggatgtcaaatatcaaaacatggatagtggatagtacgaatggccatacaaatatagtatagtagtgaggaatttggaaatagaagtttgatatttggatgttgcatttattcaaattttttatgagatgtggcaaatggtacattggttgttgatggcgtgtttctgttgttactttgggctattcacgttgttgtaagtttggtgtatattattctttacatggaagggaataatatgaactctaatctaatgattttagttcaataaacgcaggaccaagttgaagcaaactgaagtggattgtgaat

SEQ ID NO: 24323 - DNA, 902 bp, Glycine max
  Intron number 1 from transcript Glyma11g20950.1 (locus Gly ma11g20950) derived from phytozome v7.0 (chr-ID Gm11; pos 17807821 to 17808722 reverse strand)
ttgccataacggtgcttgccaaaaccttattagaagtttcaaactgttcatctatggctttcatgaaatccttgaccttttgacattccataattgaaccacggacacagaaatacgtgtcttgataaacataattataggatgattagatctttgccattgctcatacaatgtaatttcatctgaagtgctagtatcagtaagcggctcatccctacggagaacatagtcaaggtcatcaacactcaaatgaaaacaactttatctttccattccttatagttgtcaccagtcagtcagcaacagagacttcattttttgtcataagagataattaaatgaagtgagtaacattttggacggaaagaagatgaataagaaagtgacaagtgtatcagactaacattttttttattaatagtaaagtaatatatagaatagattgaataaaataaaggctgcaggctgcaaatgcttttatctaatgatctgcacccgtttcttaaaaaatgaactttaactcacatgcgtaaccagtgcacacccaatcgagttccatttcctattagcaacaaaacctcttaacacattcttttcattttaggtccaaagcagcaaaatgcaatgcgtacaaaaaggacaacattcacccttcacccttcatgagcctaatccaaatgcatccttcttttcattacccacaccacccaacataattttttttcatatataaaacaaccccctgcatacctaccccacatcaccaccccaaaaacaagaaagaaaaaaccatatatatcaaagacaaaaatggaaaggatgatgaataccaccaaccttgtgatgattttctagtgttttctaaggccaagaagaatgttgttgttgggcagtgcccagac

SEQ ID NO: 24324 - DNA, 508 bp, Glycine max
  Intron number 1 from transcript Glyma11g04600.1 (locus Gly ma11g04600) derived from phytozome v7.0 (chr-ID Gm11; pos 3126066 to 3126573 reverse strand)
tcgggtaacatctcttcctactaatctagtaatctctacgttgccgcttattgaagatctttagcgacgaaaattaaatgaaaacgaaccgtttttgttgtttgcactctcaaacgttctattctatgacctactttttcaccattttttgtgtttaacgaactcgtatctggaaaataagccgtacttgttcgtgttttacgtgctaggctcgtactggttgtttgtaggaaaacaattagcatgtttgaatcgaaggctatgtgtattgtgtagtaacataacggtttcaatttcaaacaattttcttctatgcgctgaatgtttccttgtaatgcagcttggactagtaaatagtgattgagtttgttgattaaggagcttttacttttggaatgcccttcttgaaaccctggaacttgttgtttgagcttgtatgaagtttatttgtgatatcatggggaacaatattttagtatcttctaattcgtagctttacaggggaaat

SEQ ID NO: 24325 - DNA, 723 bp, Glycine max
  Intron number 1 from transcript Glyma12g35100.1 (locus Gly ma12g35100) derived from phytozome v7.0 (chr-ID Gm12; pos 38250492 to 38251214 reverse strand)
gtcgagacatcattaggcaatgtactatttcattatatcaaattattacttttgtttgcttttggtacaaaagaaaaaaagtattttccgcatgaattatccgttgccttttttattgagtttaataagcttgtaatttagagtaaaagtttacactgtcaacccattagaaataatctttttaatgatttttaaggtagttattatagaattcaacaaacttaccgattggatgacagtgttaaaaacttttatactatcggtgcatggattatttattcttttttattttgatcttaaaagaagtatgactctcaagggtggagatattttctttttgcttttgaagcccaagctgtttaaacagaataatatattgcatgctttgccccccctttttttgtctctcaatgttcattattgttataaaatataataatgcatttgtaaataatagaacagaaaaacagaaaagggaatgaaattgaagttttaaatgttacgaaaatgcatttcatagcaccgaaaaacattataatgctttttgacaactggaaacattttattaaaagcactaaaatggtttttttaaaacatatctcattatttggatatgttattattattttttacacttgcatttcttttagtcttcttactgtcttttgaaggaaaaattgtggagttgtaaataatgatgaaaaacattaattttattggcag

SEQ ID NO: 24326 - DNA, 534 bp, Glycine max
  Intron number 1 from transcript Glyma12g08070.1 (locus Gly ma12g08070) derived from phytozome v7.0 (chr-ID Gm12; pos 5783919 to 5784452)
gtgctccctctcactccctcgccgccaggatcctcgtgagtttctctctctctatcactgcttttttgtatggaattaccgaactgccccttgccgttacccttgctgttacccttgccttcgtttaatgtgcaatgctgtttgtcgtagaggaagggtttggttttgaatttgggattattatttgtgaaatttttgaatctaattttgagtattagaaaccgattctgtgctgtgaatgagatcgtgagatttgtttcttcaaaaagtgcttcaatttttcactcctctgttgtgaattttcatggctgacactgcacttttgtttgattcaccaagaacacttactctcttttttcctctgtatgagtatttatatgcacattttgagagcattttgttttattcgaaatttatactttaagtctttattaattgtgcgaagatgtttatctatttgcattgcttggtatgtggtaattgtgtaattggtgattttggggtttatgtgcttactacatgcaactttttagg

SEQ ID NO: 24327 - DNA, 807 bp, Glycine max
  Intron number 3 from transcript Glyma10g29990.1 (locus Gly ma10g29990) derived from phytozome v7.0 (chr-ID Gm10; pos 38688699 to 38689505 reverse strand)
agttctcgcgccgaaagctacttgtgaattcataggtatagcttcgtcttatgtgtctttgtttggtatttttcctttttgagacacttgatattacgattctattgtaaatatagctttagttagttataattagctgtcataatacacagagagaagcttcaagaggaagcaataggggcggaaggagtaacttctgataccatatcagatatcaaagtgaagaatgaaaacagattgaattaattggtgaatgtgctacaagaaatggtttatatacaaaggattcaataaaaatagaaaaagagtaactaactaagttcatatctgtcataacattttgacagctaattataactaactaaagctatatttacaatagaatcgtaatacttgacttgtcatttatgcattagttaagctctcttgagaataagtttagtcattgtgggttggatggttatgggagaaggtaagagggggaaaggtcacaggtttgatctcctctactcacaaaaccaacatttgccgataaaaaaaaatgtggacttgtagtggatgattttgggatacatgatggcctgaatttggcacgaaacagttttctttgagtgcataatgttgcttttcagtattaaattgttgtgattgtagccagtaattttttaaggaatgtaggttttccaggaacattagttgaagatgaatccacacacgtggaaattaattctagcatcttagtttctgtcaccccctctgtccccaaattcagttttcattgtttttatttgtcatcaaacagttaca

SEQ ID NO: 24328 - DNA, 851 bp, Glycine max
  Intron number 1 from transcript Glyma09g39720.1 (locus Gly ma09g39720) derived from phytozome v7.0 (chr-ID Gm09; pos 44754679 to 44755529)
gcaggttttgacactttgatattgttattttgttgttactttgtttaatttgtattagtttttgttaaaaatcactttagtttttgctaagtatattagtatgttgcataactttttctttaaaatcggctttaatccttgttttcaagtggcttggatgattttagttttatccattttatgttagtaacatagtttaaccattgcactgaactattagaagtttacaacaattttgggttgaagagtaagaaagttgctgtctttggctatattcacattcatggaatgatgcctatgataacattaacacatgacattccaatttaacaactattgaacaagtgaagagaagctttacctcttaactcctcttaaccttttcccccactcttctttttcatgttcttaaaagttaaaaggcaagaatatgaaaagtaaagtaatttaaagtaggagacaaatttaatgccgtacttggaggttggagcattatatattacgtttacattaccctttcttcatgttaagctatgagcctatgatcttattttgctctattttttttctttctgtgtgtatcctaatcttaaccaaaacttgagcttcattttcttttcactagatttatattgcagacaaactagtcaagtgccccatgactccactttggacacttaaaaaaaaatcttttatttccctcaaacctttgtcaaacaaataaaagaatacttgaccgtttattctgttttatttaacttaatattcatgacctctacgtttccatagatttataagattaattttcactttcaggtcttcttcgttgtggcaagagttgcaggcttagg

SEQ ID NO: 24329 - DNA, 746 bp, Glycine max
  Intron number 1 from transcript Glyma09g38660.2 (locus Gly ma09g38660) derived from phytozome v7.0 (chr-ID Gm09; pos 43975708 to 43976453)
acttgagtgagactgagagtctcaagagagtgtgtgtgagtgtttgatattctcgattaaataaatctcactgtctctttctctctctctctctgtctctgtgtttttgttgtgttctctttactacctcttgaaaccaaaagggtcactctctgtgctgtggcctctgttttcaaaggaaacccttgttcttttccttgcctttctttcttagcactgtcttccaactcccaactcatataatttcattttccctagtcttttttgttttcactctttccttgtgaaatctgcaaaaccagctattcagtttagttatcaaaccaagccgaagctcttacattatttttatatataagtaggcaccaaatacacatttatgatacaccaatttgaagcttgtccacacaatacaagattatcaccatcccctttccattcacaaacctaagagtaagaagcacttgtcagtgaccaacaaaccaaccaaccatgatgcctgctcatggcctcataatctctctcatttttgtgtccattttagcaaatgaggcaagcttggtccatgtgagtcccccgtctctctttctcagtcacacacacaaaaagttttcatttttcaatttcattcttcgtcctagctactttttctgttaccctttgtgatgtttcctgtgaattttctcttgggcagtgctgtaaactgaaaaagattttttttttttttttttatgattaggaggcaa

SEQ ID NO: 24330 - DNA, 541 bp, Glycine max
  Intron number 2 from transcript Glyma12g06960.1 (locus Gly ma12g06960) derived from phytozome v7.0 (chr-ID Gm12; pos 4746419 to 4746959)
agtgtcaccataattggaccgcccgatactctttagtaagccccttttgattaatatatcatgcttttgcttttgccactctgacggaattttttttctgtgattctcgattcaaagtttggatttttgggttttgggttttgattgattatgcctttcttttggggttgggttatgggcagggatttatcctcacttcccgaagatcgcgtttttaattgctttttttgggtacttgaacagttttattgatttaatgagtttgttccttgcctaccctaatcacgagaattcattgcggttgttgtagttgttgttgggacttttaatatttaattgtagcgattcctctcaaagctgatgcttttccaaattactgtttactattgggattgatctaggttgggttcgcttgattacaccagaaaatgttctaagttgttattgctttactttggttggtgttggaattttactgacatgtctctgctggtttgttcgtcaattggttggatttctcatagcgaggggggatttttca

SEQ ID NO: 24331 - DNA, 748 bp, Glycine max
  Intron number 1 from transcript Glyma10g03800.1 (locus Gly ma10g03800) derived from phytozome v7.0 (chr-ID Gm10; pos 2829533 to 2830280 reverse strand)
ccttacctatagacatcttgcacatagtattttcggttcgtattatacattgattgatttggttttactgttatacaaaaaagactgcaaatagttgcctcctcattgtcaagttcctaaatttttttcttactaatctgtaatgcaaaccatactcagttagcctccatagtccataggggagtgtaaaatgaaggcaggctcaacaagtgtagatatttgggttttatttatgcattactgtgctcaaaaacagatttattaggccctatatttggataattattttcaaaagtacttattggagaataaaataagaaggtaaaatgaattgaatttctcttataaactaaaattaacttatgtacttcagttcttggagaagttaaatcagtgagtttctataaaagttaactgtaaaagttgattttaacttaaggaaacaacttattttcttctcttactaacagagaagattttctaaatagggccttaacctatattacctacgcatacatacaattatgcagagcccttattttgtacatagtatttactgtttagtttctctgcttatggtatttatagctataatgactgtcatattcaatagtctaatggtttctttgcagctttgtgctagctgcactccatattatccacgaccacggttcataatatattcttgactttttgtttattgattcgtgaaggattctgggggtactggtctattgccttttttcag

SEQ ID NO: 24332 - DNA, 800 bp, Glycine max
  Intron number 1 from transcript Glyma11g36010.2 (locus Gly ma11g36010) derived from phytozome v7.0 (chr-ID Gm11; pos 37565771 to 37566570 reverse strand)
aattctataactgtcaagggaggaaattggtacagatcaaagtttggttgtactttgccaactaaatatcatgacatcaatagatacttagatagattgatgcctttatttttatctttgttttgaactactatgattactggtacttttcttctggcagttgttacttaaaacttttgttgtctttggaaaaagggaaacaaaaaaaaggtaaaagggtggtgctatgtaggatttggttttgtgttcctatgtttactaaaaatgatgaggtggttttgctgccttattaatgggaaaatcgtactatagattctgttgcataggcgttgtctgtggcggttgtcgtacaaacgtggccgcggttggggaagaaactaaaacacggtttaattaaatgaattattcgtttttttttttgtgattctctttagcttgtgatgtctgttttttcttgagattttaaagttctgtttgtttatcatggattggtagctattaattaaggaatttcactcttcgtctctctcatagtcacttttctggtatcagaaaggttggaacagtggcaattgcatgatctactttgctacccttttatgtctttttttgcttcttgctcctgctacccttttattcttattttgttttctctttttccttacaaaatttcttcagttattaattttttaagtgaatgtgtttggcttgcaatcttcaatgcattttaagattgattaagctttaattcatctttttttttttctgtttttcctgacagcagttttctgtataggagt

SEQ ID NO: 24333 - DNA, 931 bp, Glycine max
  Intron number 3 from transcript Glyma10g09540.1 (locus Gly ma10g09540) derived from phytozome v7.0 (chr-ID Gm10; pos 8710820 to 8711750)
agggacttagtggagataatcttctcctattcattgtaagtattcaatagcttcagctaatttcttaacacactattacaagtggatttctacttgcgtggagacatacttgtattctatcacatgtatgactaggtggattacatttgatgtatcaattttgtaaacttgtttagcttttgattttttttttcctggagtttcagttcagtatatttctaccatctattgtcaagtctcagattatctaagctaggtacaaatttaggcagaatagcatagttgttatgtaaaagtgtatcatcaagctcatgattagttatatgtaagccgcaagaacaaaaattgtttctcctaatgttctaggactataggttcttcctacaagtttctcttttaaataaagatgatatcatgatagattatgcatgttattgtgatcatgtgtgtaaatcttgtgtgggtttgaacaatgagcatatcatttctaggtttgagaatatgtatggtagatgaaaaatgtcaaagaaaataaatagtaatttactttggatgatgcagagatatgaacttatatatgtgtgtgtaaaacgtatcatatgaggatgacaatcttaagtgagaatgaaaatggttaatctcaatcattagattaaaatcaaaggccaaaatcaaaacattttaaattaaaatcttatttgaccataaaatctctataatatttactaaacaaaaaatcaaatatcttaaagatttaatttataccctttatcgaagaaaaaaagatttaatttatgtcaaaattgtcgtcaccacaacaacctccactatgatcgccgtcatgaccaccatcgtcgccatcaacatgattgttgctgttgccatgccaacactatcgccgatggtggtggcagtgacaacaacagtgatc

SEQ ID NO: 24334 - DNA, 831 bp, Glycine max
  Intron number 1 from transcript Glyma10g29240.1 (locus Gly ma10g29240) derived from phytozome v7.0 (chr-ID Gm10; pos 38130436 to 38131266)
cttgtctaccaagatcttcttacaggtataatagttttcatcttcagaacttgtccttcttttgtgtagttttggatctcgtaggattgattgttgtttacttatgaatgaatttcgtgttatgttttcatgcacatgtgttaactttcatgtgactactcactttggttataattcctcttctttagactaataatagtattttgcaagcagataagctatttgtccaggtaagatttttcttgtttctgctctgccacaagaatgatttaaaataatggagtttggaggtttttgattgtctgtttctccaggttaaatgcttctagttcagtggtctaaccttagctttgaagttttatccaaatttagaatagaagcttttggttttgctttggagaaattattttggtagtagtgaaccatcgtgtgtccacgatctacatgtatttaaatttttaatttactaaaaaaaataatactaaattatatttatatgttatatggagattagtgagaccatcaggtccgaaacacttaataatttctctaatttgtgacagaagtgcataaaattttctgattttgtcaagaattgctgcactttatgtattcatccctaaggatgactggcctaaagcctaatgactttaacttggttgtgattttcagttggtgtggtttctacttagggattaagatttttgcttgtgttgctagaggattgatctcatggtaattttcaaatgcttgaacagctgaacttataaacttcgttttattgatgattttttaggtgacgagcttctctctgactcattcccgtacaag

SEQ ID NO: 24335 - DNA, 960 bp, Glycine max
  Intron number 1 from transcript Glyma09g02570.1 (locus Gly ma09g02570) derived from phytozome v7.0 (chr-ID Gm09; pos 1754099 to 1755058)
aagacatcaaggagtgtaacatgtaagtgtatctgtctatatatatgtgtgtgttcgttcttatttaggttgtgataattgatactcaagttttttcggtttttgaattttgattgtgtgtgattgaatactgtgtatttgagttgcttcttgtttggtggtgagttttggtgtaaatggttttttactcttaagttgtttggtttaaaaacttcttttgtgtgtactatacactaggaaagtttgattagctgagtcgagttgaatgatatgttgatatatgtttttagactgatttgatggagtattggaaagtggtgaatgtgctaagagatcaaatgttatgtacttttgttcttctttctttgattgaacattttaacttttagtttgtacttcaattattcattgcattctaactgctggaccgtttggcatgatgactttggcttgtcttctgagcggtgggttgactggcccataattgttgaaggggctttgtgatttcatttcaggggctgtgagggaagaaagatgggtgagattccgtggagttgtgtaagtgtttgtgataatttggactttggtgtatttcactggagggaaatgagttttttcaaagaagtttccaccttatttgttatgcattactaattacttcttggcatcattgtgatgttctgataagttttacatggaaggatttatttgtttgttgtgcttggattatgtgggcagtcctctctattttggctttcagtgttgtctgggaggatttgctattctttggttgtttcatttgtgttattaacccccctcttttatcaaagaaaatgttttaattctgattatttgtattgtgtctgactttaacttatttactcatgataagattgtcaaattgtatgcttattttttaaaacttttgcatctgcaggtacaagttggggttttgtccta

SEQ ID NO: 24336 - DNA, 809 bp, Glycine max
  Intron number 1 from transcript Glyma09g28230.1 (locus Gly ma09g28230) derived from phytozome v7.0 (chr-ID Gm09; pos 35234119 to 35234927)
caccgtgtgaggtaaaactacagagtatactattctattgaggattaaactcgaaaattccagaagcactgcgcgaacgttctggaagaagataaaatcgccaaagtataaataagcctgcaaggtgtttgtaaaaatgctacagcgaggaaaatagttagtttccaaatgttgttctctgattagtggaattcctggtatatgccatgtattagttcttaatagaagttagtagtgtgaaggtgagaatcatattcatatagaacccaagaatttcatatagaccataaaagaaaatgcgaacctccaattattcgaatggttgttggcaccttaagattagcttaaatttgcctctcctatacacaactagtagcctattgaaggtgggcagaatttctgttctggactatgtattttctaagtggaaatataactaactaaatctcttacaaatatgatctatatcttgtaaaacaagcttttattttaggaaaacataggctacaaggaagaaactaggagatattatagtataaatggatcaaatacttgtgtaaatatgttgctcaatgtttaaaaagaaacagagaattagcactaatcagtttttgtgctcagacaaaatttcaaaaccctagctctcatcttctctgtcaccatgagttgctccactaaaactaaatctatattcttcttccctcttttcctcttgtgttgattcattgctgccaatacagcattgtttgattccggtgcctctcttgttcttttttgcagtgagctacaggaacatagaacaaacatac

SEQ ID NO: 24337 - DNA, 613 bp, Glycine max
  Intron number 1 from transcript Glyma10g35890.1 (locus Gly ma10g35890) derived from phytozome v7.0 (chr-ID Gm10; pos 44098205 to 44098817 reverse strand)
ggacactctcttcccccgtcgccgtcctccttcaggttctctccccgttttacatctcagctaccgtttatttccctttcgtcttctcagatctgtctctttttctgtgcaacgatcaattgcgctcattcctgcgtcgcagctgaatttaactttcatgcgtgatttgtttttttctctcgccttttttgtcttgtttgatttgcgtgataatggtgattttcccccttggatcttgatctgttgcttgttttcctttaatgcgccatttatcatttggttattgtgttcgattggattgtcggagtcgaaggtgatgtttcgtgttgccgaaaatgtgctgagatgtatttattttattttattttccactcttctcctggagcgtaatattttcgaaaggttacgtatataatagtttataatcattttgactgtgactcgtgattgtgctttgcgtttctgattcagtcattggttttatgctcttttattagttattttttctgattttttttaatacatgtttgtttctgttttgcatttgaccttggctcatattgttgttttgtctgtagatagtatctatttttgatataatcgttccgttatt

SEQ ID NO: 24338 - DNA, 618 bp, Glycine max
  Intron number 2 from transcript Glyma10g10220.1 (locus Gly ma10g10220) derived from phytozome v7.0 (chr-ID Gm10; pos 9850648 to 9851265 reverse strand)
gctctgtaagtcttgtttactaataatcagtgattttcagatgagtgattcaatgtgcattgaaaatgaaatagtctagattgcgatggagggcgcgagctctttcatttttctatctattctagactactctgcatctatttattatgggattggatttggttcctttgaaatgaaggtaaaatgcagaattgtaacctttgattggaaacacatgtatttggagctggacacaacctaaaaattaaaagtttgttgtaagttatttggagttctaatttggatttgttttgtcatctatgtcatcattgtcatgttggatggtaacttactgatctatggtagacggtgaagatggaggtggaaatagggaccagagttataaattggtgcataatcaaggattggttatgaaatagttatatcaaaattcagttttccttgtcttattaccatttatctaggagataatatgtcttctttttaccattttgggtcttgatctggaaatatcatataaaaagccataattcaattgtttactgttctgtacgggtgagcagaactcattttgatggtaatagctgcgataatgaacaggaaattggaggtagaatt

SEQ ID NO: 24339 - DNA, 857 bp, Glycine max
  Intron number 2 from transcript Glyma10g40930.1 (locus Gly ma10g40930) derived from phytozome v7.0 (chr-ID Gm10; pos 48159194 to 48160050)
aactcgagcatcattcatcgctggttccccactgtgtaagacttctagttcctgtgctgtggttactccttatcatatttgaaaatttcattcaattatgccagtgtcactgcattccattcacaataattactacctttaacttcaaaattgaatgctcggatgatttagcgatctggggttcttcttaatttctcaaatatgttaattaacagaaaaagaaaaaataatcgcatgttagttacgattctgaaataaagtagaactcgtgaactgaaactttttgtagagtagactatcttagaattttgcagctggagattactacaggccacagcttcttctgttaatgtttagtacatcttttagatcctagacttaattttagccacaattaaatctattgcaaaataagctggtgagtcacagctttgtttcattctattgcaaaatctggtttttctatctaggaaaaaactgctttctatcctgtgtcttattttcgatagaaggatcacacaagttaagcctgtgaactagctaattttaagcaactaaaaatgatagcatgaatgagaagtggtatctgaaaatattgccgctaatttttttcacataaacttgcaatatcgccgcattgtttgtggataatcactttttattttgtttcaccactatcttctcgtcagttcttgatataatcctaaaagtcaatctgttaaagtatttacagttgggatttgtagctttatccattagactataacgtttatgatgttttttcttgaatggttggggaaagggggtggaactaaagaattgtttgaattgtctctctctagtgattcgaagaaatc

SEQ ID NO: 24340 - DNA, 419 bp, Glycine max
  Intron number 1 from transcript Glyma11g33590.1 (locus Gly ma11g33590) derived from phytozome v7.0 (chr-ID Gm11; pos 35424355 to 35424773)
caacgttatagaaaaggtcgtcgccaagttgtggggttcgtctcttccttatcctctcttcttctttaattttgggataatgggttttcatataaattctgttctcatccgtgtttctaattctatctttgttttaagtgaaaaaaaaaaactgtttttcacgatggggttttggttttggtgatttcggaaaccattttttattccctaaggctttgttcttgtatgggcaagttgtgttaaggttatgagtttgtgggtactaagaattagaaaatgagtttctaatgagggaattgaaaataaactagttggtgaattcgggattgcattgtttctctacggagttttatgttatacttttatttttgtttttttgtttttttactaattttgtgtttgcaatcatgttcatgcag

SEQ ID NO: 24341 - DNA, 962 bp, Glycine max
  Intron number 2 from transcript Glyma12g35520.2 (locus Gly ma12g35520) derived from phytozome v7.0 (chr-ID Gm12; pos 38639369 to 38640330 reverse strand)
attttaaagttcatctgttctcttcatcatccgaggtgagatttttaagcctctccttttgtatatatcatcttagtttctccaagtaacaccaaaaattaatagattattagagttaaattgttcgcaatttgtgcgtgtgaaagaaaccaaagtttattatttcacaattggaattgcaagccagataagtgagaaagagaggaggagccaagatttttctgaatttgcttttcaattcacaatgatttgcataatgattgaacatgctttggatgattgagaatgaagagagagagagagagctaaaaatatatttggatactgcctactttttggcttggcatcattaatttcataaacgttttgtattatccactaagctttgcaattttcattggggttgcattgttcagttgcttgaaaagcttcatgaaaaatggagttcagtggagaaaccaccatacccagctatgtattctagtatttatggaggtatcatacttgatccagcaatgatggtaatccccattgatgatcacatggttcacagagggcatggtgtgtttgatacagctattgttctagatgggtaggtaatgctaattttttattttctctatacaactcaatactttgatatgcatgtatgtaacaaagcattgggttttactttgaagagaaatgctagcaatgcactctggaacacacacccttttaacattttctctttattggttgaaatttattagaaatcgcaagcttttgtaggtctcactttatttcatgaatctctctcatgatattgtaatttttgataaatttaaactaacaagacagatgtgaaaaagagtatgtttctaacagtcttgttactttgaattttcagatttttttgcatatgaaacccatttgtctcttattttggtgtttatatttgtttgtcctctccagatacctct

SEQ ID NO: 24342 - DNA, 768 bp, Glycine max
  Intron number 1 from transcript Glyma09g38180.1 (locus Gly ma09g38180) derived from phytozome v7.0 (chr-ID Gm09; pos 43606816 to 43607583 reverse strand)
tgttttggacaggtaaataaaaagtgtgtatattgaaactgaattctgatttgggtgtgactgaggtggaaaaaggaaaggctaaacgtcttattttgtttgtttcacttttgtccttaaaaagtgtctctgatagactgaattttgcactgtttgtgttaattttggctcacaacatgtcaacatgacatttcttactgacatgtcactaagttgaataagttagtctgataaaccgagtagaaccgccctaacttggtctaactagatggaaattttgattcatggaaaggcaaactaagtaaaagaaaaaaataaatcaaatgatgaaattttgtttttggagtttagaacacaagtggaaaaagtgtctgatcatttatatgattttctggattctttagtctggcttatgctggaatgacactcttgttttcctagaaaagtccctttaattttaagagttgctaagtggaagtaatggatatgcttttatgtgtatcctacaattggattatttgttttaactatggcagttcacctatgtgtttttcccttcacattttacattttacattttactaaagattgggaagaaatctgtatgtactttgtagtataactctaactaagatcaaaggagtcacatgtttaatgagagtaacaacatttctttaaatactatacaagtctgcagaattcctcacttgtttctcttttgtgtgtaaggtagttttgacagtaattctttgaaagttgctgagttac

SEQ ID NO: 24343 - DNA, 555 bp, Glycine max
  Intron number 1 from transcript Glyma09g05640.1 (locus Gly ma09g05640) derived from phytozome v7.0 (chr-ID Gm09; pos 4430682 to 4431236 reverse strand)
cccgttctctcgagcaagccaaaaaactgtaatttcataaccaccttttttgttttgttttttttttcctctctctacccatcttcgtgttcttcatttttcatttcaaaagaacacgcttttatggttctgagttcaaccccatcttttgttgctttctgggttggttggtgcatgttcatggactaaacttgacttccactatacttgtaaggaaaaataaaacatgggataaaaaattagttaatcatatttaattaattgtatcaatttcaattaaataataacttcttttttaatttatctttcattcaaaattggtaatgacaatgtatttttttcttatattcaagacaaaaaaaatatgtttttttcttcttcttatatttatatttaagacgagagggagtaactcccaatttggttaatttcccacttcaaaacgaggattagaattttttttttctatttttaaaaaagggaagttgttcatgcttttccattcctttggctttttcttaattgaaggtttccgaacacttatcttcttgttgg

SEQ ID NO: 24344 - DNA, 527 bp, Glycine max
  Intron number 2 from transcript Glyma12g30470.1 (locus Gly ma12g30470) derived from phytozome v7.0 (chr-ID Gm12; pos 34094740 to 34095266)
atttagctgccagtaaaacacacgcggaactcgtatatcaatgctggtttttggtttattgtgtttatttcagtttctttcttcatattatatagtagtttcatttcaaaacatcttctaagcaggtttgatgtactgtactgccacaatttgttttcatttcctacattcccttttctgttttcaagaattgcaactagtagtgaaaacaggaaatggaaaacttttcttacaccaaattggtcataagtctcaaacttccctcatgtcatctttgtaggaagacaaaagatgattatttgaatgttttctaaagcatgctttccaatgctgcccagcatcaaccaccaagctcctaatcgttaaaacgatccttgatactttctcttacgcagcagagacctaaacacatctattgtttgcctttcaaccattcagttgtgttattgctcataaatggaaatgaaatggttactcggcataatactgcaggtggagaatctcatacttgaagttcttttagctaa

SEQ ID NO: 24345 - DNA, 613 bp, Glycine max
  Intron number 3 from transcript Glyma10g40970.1 (locus Gly ma10g40970) derived from phytozome v7.0 (chr-ID Gm10; pos 48177959 to 48178571)
gtacgtgttctcttccgaacgttaaataccgacaggtaatgtctacaagttgagctagtattacaacgttttgtgaactctgggacttaaagttcaataaatttgaagaaacagcttggaaatataactagtggcattcttggacttttgtgtttgcctgaaatatgtttttgaagttcatgtaacattagatttccatgcgaaggaacttattgtttttatacacttcctcagtattttagtactagttttttttttaatgctttgtcaactatctgttgtctctatttccttcattttcatttctgtttgagtgagccatgagtgcagctatatatatttttatccattctgcttgtgtcaatggctatattctccttgaagatagactattaaagcaggtgagggtgttaagcaaaagaaatattaattatgattaacaagttcttatagctgctgtttccattgattttgattatatgcatatatgcttgatcaggtctttagattttgacattaatgtctaagctatggtatcattttcacaattttgaacttcatagcatttgaaaccaaatgttgaactaaaatttgttaaattattaggcggctt

SEQ ID NO: 24346 - DNA, 937 bp, Glycine max
  Intron number 2 from transcript Glyma09g39220.1 (locus Gly ma09g39220) derived from phytozome v7.0 (chr-ID Gm09; pos 44349955 to 44350891 reverse strand)
aagtcaaagaacaggtatgaaaagtgattttttcttgttttttggaaatgaattttaaggtttatatatatatatatagatagatttatgaaaagcaattatgtgatctcgtgagttttgtttatatgatgttgaataattctttctttcaaattgcgaatggtatagatgaaagtaatgtgtttttgtgtaaatacatgtaagtatgtaacgtagaaggaaaacacgatgccgtattttgttgaacagtgaaagccccaatgttgttgcctctctgttttctcagcccaaaacataattatgtgaatgaaaatgcattttgtggacaaaatgatgatgaacaatgcaacgttggattggtggacgcgatctttattatgcacattgacacatttgcataatttcttaatcgtgttcttaatatataaatttggatgcattccaggcagatatagtaatgtagcttccaggctcagtagtgttttccttttgtagctgtggttgtctatttgctacgaataaatataatcatgcccgtgtaaccctgattttttgttggctttggtatatcatagtttaaaatgttgaaagaaattccctagtctttcattcgagaaattattacttattccaaactaccatagtctcagttaatctgacacataatttagttttatttgctcttcttcgtaagctgaaaaactcatttgtgtcacgtgaaaattgaatggaccatagtttcaaagtggtctaagaccatataataatttctcttttgatttccttactgggatctttaattagccattggtgatgattaatttgttcttctttgtggctgtggagtatgaattcttgttcacactataccttcatttatgtatcttcaatcattgatcttgaggtaatcttatactgtgtgcttcagcttgaccta

SEQ ID NO: 24347 - DNA, 575 bp, Glycine max
  Intron number 1 from transcript Glyma09g39220.1 (locus Gly ma09g39220) derived from phytozome v7.0 (chr-ID Gm09; pos 44350974 to 44351548 reverse strand)
cagccaaggaagcaagattcacctcgtaatattccttccttccacgtttatctaaaatcacacaaactatgggtcttttcaaatgtcatggtgtgtgttttcagctttttaatccataagggctattattttatgtgaaataaggttttaaaaaatagtccatccatattccaatataattgtaacgttaaggttaatgcaattagaattgtgggcactttagttgtattttgtctgtgatttccgtaatatcaaagaatgcaacaaaattataagtgagacagtaatttaaaaccttgatatgaaatgaaactaagttattatttgatgtaatttaagtatgtttgacataagagttattaacatttgaccttttcgctagaagtttgtccttgacataatttaagaatgtttatgcatgcgttgttttttctggctaaagggtttggtgggtgttgaagatgtaaaactaatgttgagcatttatttattcacaagaggtggattctagcgagttttgacaaatggggtgttttttttcttttctggttcagtctttggagaccgaggcagtt

SEQ ID NO: 24348 - DNA, 986 bp, Glycine max
  Intron number 1 from transcript Glyma12g34090.1 (locus Gly ma12g34090) derived from phytozome v7.0 (chr-ID Gm12; pos 37253108 to 37254093)
tcctcaagcaaaatcaaatccgtcgatttttacaggttaggatctccctctcatcacgtgtttctatattttctttttccttccaaattcgagcatttcgcgtttcttgatcagctttttctattctatctatcaatgcgaacgcaccgaattgtatgttcgcgttcgaatcttcagttgcaatgccggtgcttccgtcaatttgatcacaaatgttttgtcagcgattgctaccgatgaaaataattattgtctctgttattcgcttagtcattcctatatcatggctttcgtagcctgtgactgtgtgttttgttttggtgtagctgcaattcaattcgctttgctgttgttatgcatttgatcaaggtttttaaaaatgatcgcagttacggtttttcctcgagttccttgatattgtgggaaattgcgaataattgcggctatattacggttggacactccagagaccttgaagttgcagctgaaaacactatcgtgggttgttttttaaaacattgcgattggtttaaatggttttgtatttatttttatgttctgtggagaatgatttgagagaaatgtgcagcataagagagcaatgatgcggtatttattatttaatcagtgtctatatgcaaaaatgaaggcaaaaacatacctctctcttaataataactttttatgtaaatttttggcaacaagaaataaagtgaaaacaaaatgatatttttgtaattatttgtgaaaacttaaaacaagaaatgaaagaaaaatgttttctgaaaccaaacaggcaagaatgggatatgttattctgagggagagtggaataagaaattaagtcactcaaatataaggactcaaaatatataggagtggatttgtgaatgcatgtgacgttatctttttgctaatagatatgggtttacctgtttcttccgtctacagaaaaatcccaagagatttaactgaggcatcattat

SEQ ID NO: 24349 - DNA, 947 bp, Glycine max
  Intron number 1 from transcript Glyma12g05510.1 (locus Gly ma12g05510) derived from phytozome v7.0 (chr-ID Gm12; pos 3673461 to 3674407)
tcgatcatctcggaaaccctctctcttccttcaaggttggaatctctgctgtttttggattccaattatgtggggggaaataaaaaccctctttttatttttcttctttgtggttggttggttcctttttcgggtctactaataaagtttgtcttgtctctgcgtctttcaatttcaagtgtatgatggggtcctgcttttggctgtccttggtctccctcgtgtgctgaaaaaatgactttgttgtgtttgacttggtccaagtatgaaacattgccctaattaaaagtatacttgacttgttggagataggttgtgtttgaacatccaatgccgtgtggaatggaatggatagagatgggatgggatgggatagaatgaaattattgtgcctttgtttagatattttctggtggaatagagtgaagtctcaatttcattatttgggaagtgaatagaattgtgagaattatgattttattccgatggtttcgtctcgtaacccttattttgggggctatataaattgagagtattggatggactgggggtggagtagactccatcatgttccattgcatgctttccatttatttaagaaatctaaacaatgatatatgataatatgatgatgttccatttgatttccctcttctttttttcccatccaatccagttgtagatttagtgtactttactagttgctagcatgttttcttggcactacttatgaaactaacttctggctcttcagtatgctggctgatgaacatgctaaatttattgttataatgtggcatcttttttttttctttttctttttcattgaggatgtgatggatgtcctgttgcaaaagactgttgatgatagacaccttgcgtatgctaaagtacaaataatgcttttggtacagctagaaatcagactctctctgtattatgcagga

SEQ ID NO: 24350 - DNA, 1023 bp, Glycine max
  Intron number 1 from transcript Glyma10g04630.1 (locus Gly ma10g04630) derived from phytozome v7.0 (chr-ID Gm10; pos 3560188 to 3561210)
caggtaacataacactcttcaaaattatcttctctaacattattttttttttctatttttctatgaaatgtgcaaagacttagtctgagatgattttactagtttacaagggtgatgagattaagttggacaatgtatgttctcctattgaatttgatcatatttgcgttaagttaggaaaaaaaatgttcatttttcttctcttaggcattcttggggactcaacttaaatggttcatctaaagttctacacctgaaattccataattgcattcgaattaattttttttgtgttgttaaggtccttgaatcattttcaattcaatatggtttgcctctgttacgagacactttgcattcaaggaggccaaataagaaaataggataaactaaatgaggtggcattgttttcttttcctttgtttttgccctctttttttttcttgacaacataaaattattgatatggtgcttcatttttcattatatgccatactcattacattaaagtttagattttaagtgttcaaacttccatcaatttgatacaatttccaacttgaacataaaaacattgatggaccaaaaatgtgtcatgttcttgaagacatgcaaagaggtgatatgttgctttgatggtatgttttgattgatgacatcccatgttgtagagaaaagtgactggacaaccgagaatctacaattttcttaaaagaatatacaattttctaatgttgtcaagtatatgaagtaatcttagaagcccctttagttccaagctacattgcgccattctatatgtgtagagcagtttgttgtatcatcttctttgacccttacccttgatccaaaagtgtagaagttctttgaactttggatatatatgcatattttgtttctttgatgatatttatcactagcaaaatatgaaataatgcttatgagttatatgttcatggtgaacataacagcctctttgtttatgcagtcccatcttcaattgttcatcaaagtacaaactct

SEQ ID NO: 24351 - DNA, 609 bp, Glycine max
  Intron number 1 from transcript Glyma10g33350.1 (locus Gly ma10g33350) derived from phytozome v7.0 (chr-ID Gm10; pos 41734395 to 41735003)
acttagaaaattctctaccaaaaccatgtaagtcttcatcgttttaaaaaacttcttggagtccattatctcaaaattaggtaaaaaaatttaagcttaaccacgaatgagaggaatgaaaacagaaaatgctataggattatactaattttgtgcagattctaataaatactttctgtcatttgttttctgtatttatttattttcctagatcaaaatgatcaggccatgagtactttttgtcaatctttagttcatattatttgattatcagtatatatatgtttttgtctaatattctgttcatgagttctctccctttatgttgcaaaagttcctcatcgatttgtataagtattgttttgttttaagttttaacttacaagtaaatctcttccatgctcttgacagtcctgttaaatcagataatttaaggagacagtcattttgaatgaaataaaacatacaaagcatagacagtacttttcactaaatgggttgtttaaaaaatttggatttaaatttcttctgatatgagtaacaactatatttatttcatgtgacgcattctcagacttgccaagagcattgaaagctcctgatacgggt

SEQ ID NO: 24352 - DNA, 774 bp, Glycine max
  Intron number 1 from transcript Glyma10g33370.1 (locus Gly ma10g33370) derived from phytozome v7.0 (chr-ID Gm10; pos 41746775 to 41747548 reverse strand)
gtgttcttggcccttcccggatccagcttcatctggtaattaattttattattattattattattatattttcttctttttgttcgcctttattgaatttgtttatttgttagtggagaactttccgggcttctgtttgcttctatttgttactggtgattttgtttgttattatttgcttctgtttttatggatttagtttcagtttatctctgtcaagacattatttgacttagttttttggcaattaaggttgtaagatgaggtaagattgaaccttgctcttttcttcttctttacttattttgaaggctttttttttttctttctaatattgaatactattagataatgcaagtgtatttgttttgctataaccgagtgaattttggttaacttaaatcatggaattgttcgttctttgagtttcattatgcaatgaatttactgaaataattaatatgtaagcattttgttctgcaaattcttattctgtcaattgtcatgaacatatccatatgtatatggatttctggtttcttcgcttgcatatctcgttttatggatttctatgtttaaaagttgtttgtcatgatatattgtatagaacactgacaatttttggttttcattgggctcacataggttgactctataaggaaagagctacttttagcttcaatatttttgcaaataattttgcttttggtaagttatctttttttggtgtatttttcaggttattgttggtataattcttagtttttagtctaa

SEQ ID NO: 24353 - DNA, 708 bp, Glycine max
  Intron number 1 from transcript Glyma12g01590.1 (locus Gly ma12g01590) derived from phytozome v7.0 (chr-ID Gm12; pos 950958 to 951665)
ggatttctcctttttctcttttttcctgtgcagaggcaatttttcttcattgcacttttcaactctgtgtccttgttttttaatttctggggtgcgtttttttttggtgtttggaaatccattcattccatgttggagtaaccgttgagaggataatagttgggttgtttgtctcgacttttttgttttccgaggtggcttaaattttatgaagaaaatctttgctgtagattttcttaggattttatttcagattcactttggatgttgtcgatactctatattgcaccccccttcccactgttattaatttatcactcattttaaaaaaatattttgttgagtcaaatcaaatggaactctatttttccgaccttacttcttgcttttgacgattatgctttgtggagaacataagaaaaaatatatggtttctcttaaaatttttttacctggaattaagaaaaatatcgtctctataaactgttttgagatcgtgggggattgggacctttctattttgtatgggatatagattattttatgtgttacttgataaagtttttgtgattcatatcaatttcttactgtgcaatcggtgccaaatctattgttcggtgaagaaacggtagcatagtcagtcttgcttatttattcatttcattttttgcagttatattctatataaggggaagctcaagttcttcc

SEQ ID NO: 24354 - DNA, 467 bp, Glycine max
  Intron number 2 from transcript Glyma11g07030.1 (locus Gly ma11g07030) derived from phytozome v7.0 (chr-ID Gm11; pos 4950043 to 4950509 reverse strand)
catcaacagcttgtattgttgctcttactgacaaggtaatttaatcatcatacatgtttcatgcctactgaatattaaatggtttgttttcttcttatatgcataaacatgaaagtttttctacattttcacctatgtctggtataatgcatcctccaacacttattgtgtttcataattcattttatttgaagtaattgtgtgcaaataccaaatggggttgaagattacatcattacaattattatcatattaagcatgttttccaccaagctattttaaagtcaaaagttaaattaagcttagaaatggatttaaagcacgccgggagctctaccggcttctgcttcgtctacaatattggcatgtgatcatgcaaatacttattcttaagtattgtctaaccagttcataagtctcgagttcttatgtataatgtctgattagtttcttggtccagggactac

SEQ ID NO: 24355 - DNA, 563 bp, Glycine max
  Intron number 1 from transcript Glyma10g07950.1 (locus Gly ma10g07950) derived from phytozome v7.0 (chr-ID Gm10; pos 6758397 to 6758959 reverse strand)
ataggctctctctctagggtttgatcagactcaaggtatgttttttccttttttcattctgctccaatttttctgggtttgcttactgtttgatttgatttcccttttttcctttctgccgtttggaacataatgggaaaaaagggcatagctttgttcagcaagattcttcgttttctatcaaacctgcaacaaaaaattattgaaaattcgatgtaaaccgttgttttctcctcaagttttcatgttgcgggtgcaacggagattgaaagtttaacacttttacttcaaattgtttgttaaccgaaagttataacaaaaaaaccacaattaattttatcgcttagatttgttaatttgtatgtttcacattggtttggtcttttaaaacacatgaaaaaaggattgcttgcttgagtgaattgctggagatgtttgattgttttgatgggatgtgactgtggcttgttttatgatgcatatattttcaatttgtggaacaaggaggagttttcatttcactgcgttgttttattttttatatgaaaaacagggtttaagcc

SEQ ID NO: 24356 - DNA, 977 bp, Glycine max
  Intron number 1 from transcript Glyma12g32020.1 (locus Gly ma12g32020) derived from phytozome v7.0 (chr-ID Gm12; pos 35604576 to 35605552)
cctttctgggatcaattggaggtgccaaccctcaacctcatcacttttttgttgttattgttgttgtgagaattgcaaaatattaatataaatccctgcccttttgccgtttctgagtttaagcttgaattctgttagtttctgatgttattgacttgttacttctttaattctcagctaatcccaattttgtttttaagtttgattgttttcttatgcatattacttttaatcatccttggtaataggcttattattatgatacagcatcgttttctatgatgattcatgttttggatttctagcgacagcttatcgtattccgagtttacagtacatgttgtttcctcgttttgatgcactggtttattaaaacttgaacttaactttataaactgttcatgcttgagaacacactcactgagaattctaaagtcagttaaaatctcaataagcctcagcaagcctttttatggagtgtattctctaaccgtcttctaatggttcccacctttttcaagggatggtgtgtatggtgcctttcttacattcgaggggtagtgatgcttattgcacctcagtcacgtgtgagacaacactagaatctagaatctcttttggtctaggcctatgggtttgagacttacaggactttctggccccgtgataattgtatagtagaataagatagctgcagtgttcagcccgcggtgtcggctggtctagggcggtgaacttggcctgagtattgtactcgttaaagatttacttgactgcattcttagggttgggtccgctgaaggacctacatagctgacctttatctcggtcagacagtccacaaacattgtccattggatcattttgatgtaaaatttgcaaatttaaacttgggggtacttgtaatttacattatctgaattaaatattctcattatacagcttttcaggtacttgagaaaggggttgcagccata

SEQ ID NO: 24357 - DNA, 402 bp, Glycine max
  Intron number 1 from transcript Glyma08g44780.1 (locus Gly ma08g44780) derived from phytozome v7.0 (chr-ID Gm08; pos 44290879 to 44291280)
aaatcagatcctttcaagatcggaaactggaattggtatttttctctctccatacctatctatctgtctgttaacaagaaaaagaaagtgaccatgtttcctttggatttaagatacactctaaggtaggaaacagaaaactcacaagtggggttgtgttgtgtactttgtttgatcatataaattatgaaacaccccacgtggataaattggtttggatgtgtgataaagtgtttggcacctcagaaagtttggttttttgcactgtaatttgaagacccattttcagattttgagttgttgaattttggtgtcaaattggaacagagagtgtgattattattattattatttttttttaatgaaggcatttgtcggtggagaaaaacagggttttgtttg

SEQ ID NO: 24358 - DNA, 653 bp, Glycine max
  Intron number 2 from transcript Glyma08g44780.1 (locus Gly ma08g44780) derived from phytozome v7.0 (chr-ID Gm08; pos 44291357 to 44292009)
ttctgttggaggtcgccaggccatcacacatccaggtctcagtttctttttactttttcacttttccttaaatatatttttattcataataaatatttgatttttactttctagtaaatttttgttttgagttaagtttctaataaaataataattttatatttttttttagtttaggataaacctgtgaattttgtatttgtttttttataaaaaaaaatatttgtaaattaatttatcagagaagaaatacaaaatttactagtttattaggaattaaaataaaatatgaaagaccaaaaataaaattattattttattagagataaaaatatatttaaattttttacatttttctttttctggtttcttttactttttcctgtggagagagaataatcaataatattagattctggcgtgtaatttgcatgatgttgttgtacatggcagtacagtgataattgcaaatagaagatagcatggctgatgctatgccactttgtttgcatcttcaaaatttctcaaagctgttttactgtgaagttcagcatgttttgtttcaagagtttttcccatgttttctgagtatatatatacttttttgatatgatgcagaaataaaggacaaagtgttaaagaacaacgaggat

SEQ ID NO: 24359 - DNA, 1064 bp, Glycine max
  Intron number 2 from transcript Glyma08g48350.1 (locus Gly ma08g48350) derived from phytozome v7.0 (chr-ID Gm08; pos 46963161 to 46964224 reverse strand)
cggagaaaacaattgattgcttagattggactgaggtttgcttaatttcccaatctttaactttattgaccatggagagctttttacacaaatttcattcttcaccttcattctcatgaagattatgtttaattgtttgatgttggtacttattttaactggaaccactgcagttatggcatttggagaattatttaatattagcaatttttatgttgttgaatttcctacatgtttcctgaattcagtaactccaccttttctggattgagacttgagagttatttcagtgcatttaatattgtcagttattgaattccatagagtcatcagaacagaatgtccttgaaatattttgtgaagtactgaaaaattacaattttttggtggatggttccactttaagaaacagtttgtagatgttctgctatctgggtcataaagagataccggcctaaggtggaatgttggtaaacaaaacgcacattagggtgataattagaaatcatttttctgagtgtagtttttatatcagtctcaaattttaagcccttgtttcatgctttatgctgtctctccatcattctcaagaaatatggctagtgtgatcaatttatcctgctaccatcatcatcatattcatcttcttagtcctaggttttgctccttatcttatcatcttagaaaattttatctcaatgtttggctgtttcttgtccctgccccattttgctgtttttgctttgcctgcccagacctttcttgttgcccttgcatcctttggtatgtttgtctagttcttagacttgcagcatctagctgatgttgggtaaaatgtactttttattttttttagtttgttgaaaatgttattttcgatttgtactcattatgtttttctgtttagtaatcagactagagtaaatcatatctgctttattttactgatttagtaattctttactggacttgtttattcagttgctgctgatttctgcatttctcttttgaggtattggttaaatgcagggggaaattaatatccaccaactttttactggcta

SEQ ID NO: 24360 - DNA, 1018 bp, Glycine max
  Intron number 1 from transcript Glyma09g01670.1 (locus Gly ma09g01670) derived from phytozome v7.0 (chr-ID Gm09; pos 1065897 to 1066914)
caccgccccaacccccagaagctccgccctatcaggtccgtccccgccgcccccattgcccaccctcctccgccccctctctcgcacgatccgattccctccgggtcgggtcacgccccatgccacgaatccaggtcagtccatttcttttctaccataccctcctttttttttatctaattagttatttattattaaaaagtttgttcttttttttctctcactcccgttaatttttaattgaatttgaatttgtaattgtatggctttatcttttatctttatgtatttatttaccttgtctttgcggaatgggggcggaacaaccaataaagttgtatcctttttggttaaatagaaagaaaaaaaaagattgtgatttgtggtggtgattaggcgttaaggacgatttttgtgcttagaatatgttgcagtgcaggacaattgttgcccatttgatgcttctcattatgataggctttatatgtgagagagagagcccacaactgggtactactttgcatcatccttttctgattcgagaatgctttggtttacggtattgtgtttgtgttggttaaaaaacaaatcgtacgatgttttattattttaatagttgggcaactggcatgttttagttgcacacaagtgtttgtagcatatagaatgttctgtcatctgtgtcacaattgtgaaagagaaacaaaccttgggggtaaagtcttgtggaatggaaccattttcacaatgattcagcaacccaactactgtaaaagaattaattacaatttatttacaaataggagttgagtacagtgaaagaaattaatctattagaatgtgacaaatcaaggctcaaatctttactgaaagaggtgtcacatttaggatctaattgtgtttcgaacaagattgtctctaacacaaatttgggacccaaatagtttatcatgacagttttaatatgggtttgggctgttcttttgattagttcttccttgtttcagctcgtctttag

SEQ ID NO: 24361 - DNA, 644 bp, Glycine max
  Intron number 1 from transcript Glyma10g00950.1 (locus Gly ma10g00950) derived from phytozome v7.0 (chr-ID Gm10; pos 669920 to 670563 reverse strand)
ctatattccttcagtgtggtttgacaagcaggtttgggctctctctctgtctctctcagcttggttatttggaaaattctgttgtgctttttggttatgtatgaacctaaaagagagttccaatctcagtgtgagactgggaggcaccactgttttagatatatcagagagcagcacatagtactctctggttatagtaatagtaacaaacttaaaatcattccaccattgaattctggggttattttcagcaatctgaggatgccattttcatgaattttcttttccatgcattcaccacaacacattgttctggtctctagactttgcatcagtgatcatgttacactattttgcctgcctgctactagtatatatagttctccttgaagtgaaataaatgtattcaaacaatcaaacaaaagaaatggtctctagttactttatctttttgtctataatttcatttcatttctgtgtttcctttctctaatttcttcaccagttcagcacaaagtgatttcatcattagggtgttggttttcatgaagcttaatatgttatgatcattggcatggtaggtgtatatatagtcaaatgttgttaaacttatcttttgtatttgtgcaggaatttggtaagta

SEQ ID NO: 24362 - DNA, 930 bp, Glycine max
  Intron number 1 from transcript Glyma10g05100.1 (locus Gly ma10g05100) derived from phytozome v7.0 (chr-ID Gm10; pos 3960831 to 3961760 reverse strand)
tgcaaattttgcagctggaaacgccgtcgtttaaggtatataggctttgaatttcatgaaaataactttgcatatgtgaagatatgtttgtagttaatggaataatacttatgcttattgctgttatatttgctgctttatgtatccagaatattctgagtaactcttctatgcttaatattttaaaattcctatagaatagtatattataaaatcatttatccatttagttaattaaggatgtaatttaatggttaacaaagaattatgtaatgtaatgttaaaattatgtatgagaaatattacttgacataatttttagtttaaaattaagatcattaaattagtagtttaaatatcaaataggcgggtgaagattttagcagagaagtttttggccgtttgaattggataaaaaatgtgtttcttttttcggaaacatggaatcttcttagcgtttacctagtaatttagttctaatttcatggtaatcttgaagattgccaatacatagcacttagtcatgataccaacctaagctgaaaaacattacatgtatcctgtgggactcatgttagttttatgtggaagtctcaaaatgcaattcgtcacccattatcaatatagccttcgagatgcttctatttaattttaatttcactacaagtgctacagctacttcattaccatgattttgattaatcccattttgtagcattttgatttcttcctaatcatgatcataatttatcttatctaatgttgaaatatgcgtggaatagtttacttgtcaatgcttgcgcatgaatgatcttttttttttcatataatattgatttcctcctaatcatgagcataatattttttttttattattcatcaaatattttgttttgtctggttgttgcttgtagtgcctttatacaattg

SEQ ID NO: 24363 - DNA, 352 bp, Glycine max
  Intron number 2 from transcript Glyma09g33840.1 (locus Gly ma09g33840) derived from phytozome v7.0 (chr-ID Gm09; pos 40321335 to 40321686)
ctgctgataggtaatggttctgaattgaatgattaatgagaatattgttaattgtttgtagagaatgcggttattctgtatatgtcatttgatttgaaatttgaaatgattctatggattcaatagaaaggtaaaacctgttcgttttgggcttggagaaatcattacgttgtttttatttctttatttcatatcaaggagagctgtaaacactcctttcatgtatttttattttgcaaagtggtcttaagtgacttgtagtaagtctgataagaatacaagcttttttccgtgtaaaggatacattttcttgtgtttctaattgacaagtattgtgatttttgcagtgttc

SEQ ID NO: 24364 - DNA, 717 bp, Glycine max
  Intron number 1 from transcript Glyma08g45080.1 (locus Gly ma08g45080) derived from phytozome v7.0 (chr-ID Gm08; pos 44534860 to 44535576 reverse strand)
acgagaaggtgaattcaaatgttcaattgtttgcaaccgtttttttataactttttaatgtttggtttatcggaaaattgactcatgctgtgatcggtgctattgattcatgatttgttaggttttcttcgtcgtaatgcaatgaaactaaaaattataactctaactgttacgatttttgtttcgtttcaaaatagttaatcgctctgccaagtgcttctttggaattcaattaccttttctggagtttaattatggttttgttaatatgatttatgcttctcagttcttgttcactgctataaatgttggaaaattttatgtatttatttatttatttttcctcctactgaattgtaaagaaggatgtagtctttgaattattcagtgttttttgtttagtgacgagttattgatgtattctatcttgtctgtggttagaatgcttattggtgtttggtatactagttactcgtgtggtcatgtcactgagaagaatttttacatttctttctcagtgattgagacttaggattagggaaatgtggcgtggtaatggaaaaggagcaaaaactgaagcagtagagtaatggcactatggcagtactttgttggaaagatataaataagaaatgttgacttcattagttcgttatttattatttttctcctttttaatgctatttaattgcctgttctctctttatcaggttgtgg

SEQ ID NO: 24365 - DNA, 700 bp, Glycine max
  Intron number 1 from transcript Glyma10g03210.1 (locus Gly ma10g03210) derived from phytozome v7.0 (chr-ID Gm10; pos 2319723 to 2320422 reverse strand)
tcactctttctcttcgcgattgcattctccttcaggtactcaatcccttccctcctttctctctgttcactgtttcttctggataattttttttttcattttaactttctctttctttccgcctgttgcttctgtctgtttggtttacttgtaaattttaagaaaaataaaacaatgctccgtttcatggatttctcccccgaacttgatctttctaatttcatttactgatctttatcctgatgaagtaacagtaatttatcatgaatgctcacctgagatgtcatagatgttcggaaatgctggatctgtaaatttttaggttcgtgctatctcgtggatttcatgtagtttgttccttttgtttttaaatgcaaaaggtcgatgtagtttatgtgatatattttttggattttataccgtagttgttgactttggcaaatgaatgattttcaactttttaggtttttttgtggcaattaataaccgaatttaactacagtgtatcacaatattcatattaggattctttgattttgattttatatggtagttattattattattagtgtttcaaattcaaggttttccttgagcagtttctgtcttctattctattgttttctgggtgtagtgaattgtatggttttgtcagaaaactgtaaaattgctgttatacttgtttgcaggttgctttgta

SEQ ID NO: 24366 - DNA, 657 bp, Glycine max
  Intron number 1 from transcript Glyma10g29540.1 (locus Gly ma10g29540) derived from phytozome v7.0 (chr-ID Gm10; pos 38387630 to 38388286)
acaggtattgtactactttacaatttgaactttgtaaattatgttgcttttttccccaatttatgagttgtaagtctcatacaacagtggatagatattgccatattcaccatgcttgttccgtttgaactatataaagcaccgattctgacacggacaccgacacaacatgaatacctacactttgacacaattaatgtctaaaatataagacacaagaactttacataaaacacaaacagatagatagagattctaatgaaatgaaatatgagtaaaataacaaaatatctaaattgatagtatttatctttttaaactattcttctatgttttttcaagtatattagttgtgtaaaggtaataactaaagtgttcaagccaacaaaatataatttttaaatcaaacatctaataaaaagtatcgaacaagtgatagtgtccggaagacacgacaacactgaacaagagaggtgtctgtgcttcataatatttgagtatgtccatcaattttgagtcacaccatatttcattagggaataggaagttggtagattgatgaagttagatatacattccaatgggtatcaaaaagttgttttctttttgctttctgtttcagttgcttgccttcagacttggagggtgcagtgcggc

SEQ ID NO: 24367 - DNA, 1018 bp, Glycine max
  Intron number 2 from transcript Glyma11g18900.1 (locus Gly ma11g18900) derived from phytozome v7.0 (chr-ID Gm11; pos 15497791 to 15498808 reverse strand)
gagcccgaagtctccacaaggcctcccagtgctaggtacgtgcgctactgctgactcatcacataatgctactatgttttttctttccgggttacctaatatcggtaatgaatatctattgactttgtttgttgatgagtaatttttgttcggaaatctcacagaccagttttagtgcagttttcgagttttgttaatgagtcttggtggtgtgtgtatatcattattatctttgccgttttttgaaattagcatatatggatttggtcacttgtagtattttttattttatatttgcatgtgtgtattagatcgtgtttggataaatttttccataaacacttgtagcacagagaggaaaaaaataaggaggtgtaataaatttcgtgtttattccttaagttaaaaataaatatatggaattaactttataaaagttctctcgtctgacttcttcaaaagttgagagatataaaagttgaatttaacttgggataaactctatgtgtttggatgaactttaacaaaattgattttgaatataattgattttggttagaattgattttgaagtaaaattcagtataaatattttgatccaacgcagaagttacttaaagttgttttagcttaaaatcaattctacactagaatcaattttgacttcttctccaatgtgaaacgaaacatgtgaaaaattatcttaaattaattctagactccagattctgtaacgtggaaccaaacacgcactaaattctttttactttttttatttatggaaaacgggaaaagtgtttctaaataggaccttaatatattatcattggatgtcactcctttgattaagattatttattgggtaggatatatcatgaagtttgaaacgaattgcagctaattttatcttccttgttctgtaacctttgcacttagtgggataagacttctgttattgtttgtttgttctataacctttgcagtgtaagctgtaggccctcactaggccatttgccta

SEQ ID NO: 24368 - DNA, 885 bp, Glycine max
  Intron number 1 from transcript Glyma11g18900.1 (locus Gly ma11g18900) derived from phytozome v7.0 (chr-ID Gm11; pos 15499154 to 15500038 reverse strand)
tctaaacaactagtggagcataagttggttaaaaggtgagcccaaaactagtacagctagatttttttttttttgataaagcaacgatcttttttttaatattttaaaaacgttcgagcattaatcaaggtttatatatgatattgttattacataaatttttatgatgattttatttcataaaacatgtagtaagatatttttatgttaatttaaaattttatctgatatttttatgtttagtataaaataaattatatatttacacattcatctcatcataattcattataaaaaaaattcattatttattttccaccatacatatccctaattaaaatctaaacgtgacatttgcaagattcacacatgacacatcctaattagtaattagaatccaattgcaatatctccaagactcacatcaaaagaatctactaaatagaaaagaaattgcagaccagattttacatgtgtggctcgagctttggatacttgtgaaatgtaagttggataaatgacacagaagctctctccaccaaacactattattgctcttaactactgttgcgctgtaaaataaaatttccacactcttctcttctcttcacttcaattctttcccaccactttctccccacaccatcatcttcttcttcacttcttcaacataacaaaaaacaacaactcagctaatgactctcacgttccacattgttgggcacccttttcgtagatccaactccaaaaaaataacaactttccttcttttcagttgaaaaaaactacttcatttttcttatttctttttttatattccaagaaaaggtctttcttttttggtttttgttttttgttttttgttttagtttttcagtggcagca

SEQ ID NO: 24369 - DNA, 380 bp, Glycine max
  Intron number 2 from transcript Glyma10g31070.1 (locus Gly ma10g31070) derived from phytozome v7.0 (chr-ID Gm10; pos 39627052 to 39627431)
gctcggtccgcttcagctgatattatgtgtgttggaccaaagtctgttcgagaaaaatttactggcatcattaggtttgctattcttatactactaccttctaagttatcatttgtggatttagtttgactttagcgattacatgggaaataaaaagaggaagcaaaggattggaggaattgtagttattgattctagatcttgtatgcttagagtttcttcgtcttttgattgaactaatttagtttatatatgcatggtaatctctatatcatgcatttcattttgtttgacttttggggttctgacaagagttttatgtctacaaatgttctagtatatataacttaataatttttattttgatgacaggcagcaag

SEQ ID NO: 24370 - DNA, 451 bp, Glycine max
  Intron number 1 from transcript Glyma10g08360.1 (locus Gly ma10g08360) derived from phytozome v7.0 (chr-ID Gm10; pos 7200837 to 7201287 reverse strand)
tgctgcaaggaaaagtgtactcaggttttttttttatcagcaaattaatattaattgttaattatcagtatctcattttccatatcttttaatgttttaattttctattttttgcccaaaaataattaatgttttaagattttaaagtccaattaatacatttttcttagaaatacccttattcaatactcattactaatggtataactaccaaatatcaaggtattgaataagaattttaattcaaatataatcatttttagtttcattaaatattttcgaatgtatatgtaataatcttaaacattaagtatatactagttttttatgttagtggggacaattcgtagtgaggatctcttccttctttctttgtttttggctactaaatcaatcttacaatctcgtgtactcaggttttgttgattccaacaatagggtgtttgctaga

SEQ ID NO: 24371 - DNA, 946 bp, Glycine max
  Intron number 1 from transcript Glyma10g35670.1 (locus Gly ma10g35670) derived from phytozome v7.0 (chr-ID Gm10; pos 43937294 to 43938239)
aactccatcttctgttgcctgcagttcctcacctggtatgttgcgacactgttttttaaataatctgtggtgaaagagctataaaagcaaaattgcaatttgtagaaaggtttagtactgggaattaataatatctgttttatcacacacacacacacatatatatatataggattatagtgaataatactgtgatactatgaagtttatcttggtattgtatacagagttgtggtggaatagtagtcatatctggcaaaatttatgtttctattttgtttactacatactttttgtagttgctattgcaaaactcaattttgtagctttgcttccctgatttttcttttttcgttttactctgggatgatctcttacccttctaagtcttgtctctttgtagtcatcttcctttattaaaaaagctttgcttcattgatgttaatgagtcaaaactatagggactgaagttttccttaaacataaaacaaaagctctttttgaaatctttctttgatttatgaatgtaggtaagaatcaacatttcaacagttgtattgctgccctttgttttcaactaatgttgagatgctgtttcttgaacatttatttgtattctagcttctgttttcaaacataacttggattggagcatgagatgtaggagagttacagtggacataatatattatgagatcaatatccaatagaatggttagtcgagtcagcatattaaatccttaattggataggagcatatcttatatttttctactttgtttttttgatatcatagtttctgagcttagatgaaaaatgctaacttgaattttcactcaaatttcctgtaattgtattgtaactgttgtatttttatatgtgtgtgtttgttttccttttatgtgttatttatgtgctaaaacctaacctcaaccttttagcaggt

SEQ ID NO: 24372 - DNA, 562 bp, Glycine max
  Intron number 1 from transcript Glyma09g28200.1 (locus Gly ma09g28200) derived from phytozome v7.0 (chr-ID Gm09; pos 35215442 to 35216003 reverse strand)
gtacttcaaccatctagaaaagaccttgtggcttgtgcggtggcaccaaattcaaatgtggagctgcaatggttgcggaagatatacaaactttgtgtatttctaaattattcgtttgtgaagtttggtggcccatatgtatgacttgttgaaattcttctttcacaacacaaatccacatccactcatagtatggtcccaaaagaaaacaattttttttcactcttacagtaactcatgtgagtgctactacaaatatgcggtagccattacttgtactgaaaatggttgatggaaaaaagtccaagaggttggaggataaaacatgttatccaaaagcaagcaatcttccagctcatgagataccatcatcatagagtaaccaatcaaatccttgcattggattacaaaattctcacgtagaccaatcaaagtccatgttgatgaatctgacgtggcacgtccacatccaccagaaccatgcatatagtaatctccattctcttactcctccatccttcgtccagctagcaccacattcacctgaggcttccaaagcaat

SEQ ID NO: 24373 - DNA, 617 bp, Glycine max
  Intron number 1 from transcript Glyma08g42960.1 (locus Gly ma08g42960) derived from phytozome v7.0 (chr-ID Gm08; pos 42886107 to 42886723 reverse strand)
gctgctttggtatgcatttccagaaagcaatttttttaatgaatatatagtatctacaaatatatctaaattaatcaaaaactcgagatacaataaaaaaaattatgaattatttattgacatgttatgttaaaggtttaacatgtttgttagtgcctgggaacctggtgaaatttaaaattagtctttcagaagaagaaaaaactttgttaattttgattctggtaatttaatcgtcatttactaataatgtgacatatatttagatatgtcatgttaaagtgatggctggtgtaacatgtttaatgttagacatgtcatattaaagtgatggctggtaataacatgttcaaatattagacctgtcatattaaagtgatccttaatgtaacatgattaaatatactctttcatttacctaacatgttatggtcaaattatgtttctgtttctttcatttggtttaacatctgttgagaaaaaatatatgcatataagttgaaaatttgaaacacatcaagttaaaagttagcatgcgaaatcatatttgaatttagattttgaactgtggtttgttttgttgttgtttgtgacatagttgcctgggagaacagaca

SEQ ID NO: 24374 - DNA, 1021 bp, Glycine max
  Intron number 1 from transcript Glyma11g06520.1 (locus Gly ma11g06520) derived from phytozome v7.0 (chr-ID Gm11; pos 4586277 to 4587297)
ttggacgttggtttctactcctacactgctttctggtacttcacttctaattttgattcatacttgttgattttattgcctttcctttccctccctcgaaacatgcaaaaagtaaattatgtttcccatcttttatgagttgtaaacatttgatagatagaaagtagaattacatattgatgtgttgttttcaaaatatgtcaactgctacctgaaatcaaaagaatcaatgattcctataagtttgtgggaattaaaagatttgattcattatgctactaaaaaatacaatttgcaaaggtgaatgaatgttggtatgttgcagattccttctttatgctttctagagaataggagcagcagtatattctcaagaaattgcaattaggagccttgaaattgcttttctgcaacgttaggagggttcttagaaacattatgtgctatttgtccaaagaaagtttatgtacgccaattgaggagaaattgcattgaagtggtgtactaacaaactacgaggcctaatctccataagtaagttgaattttggaaattagtaggatttagcaaaggagatagaatgaactgagttctattactttttaactaatgtttaacctttcattaggtgaggttaatgtaaaattgtacttgccaacatcttttacattccccacttcagaatcaaagtggaattgttggtataatgccaaaggagaagaggcgtttcaaattttaaaatttgtctgcaccactaaaatcatataatagtatctgacacgatttggctgtgataaaagagtgcaataccttgtactatgtttgtccatgtagcaatttcgtaatttaatacagaaggaaaaagatttaggtatacggatgcccttatatcttaagaacttatattggcgtgtcttgcagtttattctatcaagtttatcgtatatgcatgtgcctcacctggggattcttaactttttgtcttcatatcatgctattccacagctatttggtaacagtc

SEQ ID NO: 24375 - DNA, 802 bp, Glycine max
  Intron number 1 from transcript Glyma09g18450.2 (locus Gly ma09g18450) derived from phytozome v7.0 (chr-ID Gm09; pos 22823814 to 22824615)
tctatattccgttacaccaagcgagcctcgtgcaggtgagtgagtccctcgctctctttcttctttccttttaattacagttccattggtcgagttgttcttgtagatacaagcaatgttctatctaaccttttacaattccaaacaaattgatcgggatcttataattttcaaaaacctcaatttgtctttgtaaaatgtaaactaataatcaattcggacactgctttcctgttatcaaaggtgtggaaaatgatcaaacggttcacatttgtgatcaaaattgcagaatcagtttaccaagacactgtagggggccaaataagtaatttaatcccctctgttatttttctccgtgcttcaagttactgatctgagaattttgggtttctttctagctacaagtgattcttcgagcactcagttcaattttgtgttctctgttaaaatgttcactgtgaattttgtggctgaagtactcaaatatgcttgtgtgatatgtagttgtatgaaaaaataaaattgtgtaatgagatcctacggttaatctggcaatgccaatgatattatattataaatatcattcaggcatgagtaaggggcacagtattatctaaaagactgaaactaatagaattgaaattagggaattacactcagattgaaattgtattcatctcgtccaggaacactgtgaaaatgaactaagttgtactttttttactggcattgtgtttctttaatatttttggtgttttgattttcaattagcattgctaattttgtcatttgcagcagaaaa

SEQ ID NO: 24376 - DNA, 595 bp, Glycine max
  Intron number 1 from transcript Glyma10g42220.1 (locus Gly ma10g42220) derived from phytozome v7.0 (chr-ID Gm10; pos 49227970 to 49228564 reverse strand)
ttcgatctgataatcaaaattcggtatgttacgattgaatttgtttgtttatttatttgatttaatttaaattttgtggattgctacacgtgacatctgtttggttgcggagaaagtagaggccgttgaaatggatttgaaagaaatttttgctttcgtaattgtgttgttttggttgcgatttttgtatcagtattttaggtgtttcagtgtatctcacttcctcttggtgaccaagcagagcactgtgattctttgttttcggacggtataatgagttttttttttatccttgagagctttggtatagtaccctgtcagtgtttcatagatatgtaagaacctggttgcactacacgaacatgagtgaattgcaaaagaagtctctctaggcgtttcagtgaagactggtggcttacagttaatttgtaagagctggttatgagttttgtaaatttatttttgctcatggactgatttaatgcactgtttaattcatttagcatcacctcaagcactgtgattctctgcatctgcactcaatttcttctttgtgttggacaggaacccctcactaaaatttcagaaactagaa

SEQ ID NO: 24377 - DNA, 955 bp, Glycine max
  Intron number 1 from transcript Glyma09g03310.1 (locus Gly ma09g03310) derived from phytozome v7.0 (chr-ID Gm09; pos 2334593 to 2335547 reverse strand)
ttttggcaggtattgcaattactgatgatgctgagaattaattagcattgaaatttgaaagttaaaataacagtgatggtaaacatctttacatattttggtgagcataattaaaataacatctctcctactaattatgtgaacatggaagttttttgtttagattattagtgttggtgccttttagttatgggcatgtgcactgagctcctactcttacgtccttgtaacctcaatttatgtatagtatgcagttgtaaatacaatcaatcaaataaaataaaataaatctagataattatttccatctttatctttctgctctcatcatcatcattgttattagtttttgataagctggccaataggtacaaactacaaagccattgttttgctttccttattctcttctacttctctctttccttcatcctctttagctttaaatagtcgtgttcattgtatatgtcacgacaaccagctatcatcaaggcttagactgttaggtgaagacacatgaatgattttatgttacatttctaacatgctccctgacatgagccctttgggcttgatgtgtggataatgcatagccctagctcccttgtgctgaaattctttttcttattactatagtgggggaaacaagtatcaaactctagaccatttggtcatagagtctttgataccatgtcatgaactaactatcccaaaagcttaaattgtttgatgaagacatatgaacggctttatattatgtctctaacagaataattaaattatgctggaagcctagaagatatttttttcatattatcttaaatcttaacatatgttttctgtccgttgccaaatttgtttttatgtacacattatatttttctgattttatgacaattacatctttcccataatatccttttatttcaggaagcaaatactgaaaagatctttt

SEQ ID NO: 24378 - DNA, 1033 bp, Glycine max; identical to SEQ ID NO: 17935
  Intron number 1 from transcript Glyma10g06880.1 (locus Gly ma10g06880) derived from phytozome v7.0 (chr-ID Gm10; pos 5624860 to 5625892)

SEQ ID NO: 24379 - DNA, 691 bp, Glycine max
  Intron number 3 from transcript Glyma10g11480.1 (locus Gly ma10g11480) derived from phytozome v7.0 (chr-ID Gm10; pos 11668621 to 11669311 reverse strand)
ggtgggagaactcttgcaaaaggaataaaaaccttgtaagttattcaatttgactataattgactcaaattcctgttccaatcacattggtgtttacattatttctgataaccacgcaattgtagtctttggctttccatgtgctataagctttcgtcaattgagcctagatttttcttaataattcataatgtgttataatttgagtcacatccattacatttatattctcatctaaacataaatcgatgaataatacttctctctccatccttaagtataagacaattgattaatttatgtttattatgaaagttaattagtttagttattagcattaattataatatatttttttaaaatttatccttaaatttatgggaacatagtcatctccttcggtctccattgaagagagaaaaatacaactaaagaatattttagtaaaaaaataattaatatacaaaagacaaaaagattgattgataatgtcttataaattagaaccgaataaatatatatttgaataaccattgattattattattactattcaatttagtggtttgaattttactaaatcaatatttaattattctatatctacatttttgttctcattttaatttattccaacttttgattttcgatactgaccataatttctttactctccttttgttttacagcc

SEQ ID NO: 24380 - DNA, 425 bp, Glycine max
  Intron number 1 from transcript Glyma11g35890.1 (locus Gly ma11g35890) derived from phytozome v7.0 (chr-ID Gm11; pos 37471428 to 37471852)
gaaggcttgcgcttttcttgttggtgagcatattaagtttctaaccatatattaattataattaatatttactcactgtttaagcttttcttagatctgcatgcactgtttgatctcaactatctccaaccttagaagatttgttaattctctggagaaaagaatgaaggacaaaaaatttgtagacccttaattgcatcatgctgatatatagattgttatgcaagcagcatattttcctcttagtagtatattattcccaaaaataagtccttacactgtttctgaatatatagtacttgttaatggttatttctctggagttatattatatagcatgatataataacaaaacatatgatatgatgttatataattcttaagtttgatttgtgatatggcataccataatatttgtgcaggct

SEQ ID NO: 24381 - DNA, 984 bp, Glycine max
  Intron number 2 from transcript Glyma11g35890.1 (locus Gly ma11g35890) derived from phytozome v7.0 (chr-ID Gm11; pos 37472063 to 37473046)
tcttggtaagctataagatctatcgttgatatatagaatcaagaatccaattttctatattttctccatgatgaattgcgtctacattcatcatctttttattccaagtagaggaatcattaatttttatattaattttttaaaaacatttttaatataatttccaattaaattcctctctctcttttatttttaacaccagtttgggtttagctactcccagccaaagatttcaattccattatttgcactcgtgggacgatatatgattgctaactgtcataaatagtacaagacaagtatttatgattcatataaccccaccatgaagctatggtctcacctcaaccttgaatttatataaatgtatataagagaggggaatattacatgatattttgtacgagatgattattctctcgtttaatttttaatgtgatttttaaaaggcgtagatcgaaataggaaatattttatataaaatgctacacacaaaaagtgagtttttttcaatatacagtaatatgtttgatctcttttttgaaattaatattctaattaatacacttctttcaacagtgaaacttgtagaatcttttggactttcaataaatttgacctaatatagtatagagaatacgtttaaaagtgtataattaacatttctctaatattcattccaaagcatgtgcacatgtcagtttataatattgaaaatggataagaaattacattggaatgctgaattaccatgtgatgtacgtacacgacaaatttctctattgagttttgtggcataaggatcatgtacatatgcatgcaggatgaaacttaattgaaaccatatgcttatcatcccaaaagagtagtgcaccttaatttctttcatttatttgtttttaataactttgtgatgtacatttgtttaagctagaaaaccaattcatgcactcactatagttccactaattgacatcacaggga

SEQ ID NO: 24382 - DNA, 483 bp, Glycine max; identical to SEQ ID NO: 23488
  Intron number 1 from transcript Glyma11g01350.2 (locus Gly ma11g01350) derived from phytozome v7.0 (chr-ID Gm11; pos 793913 to 794395)

SEQ ID NO: 24383 - DNA, 380 bp, Glycine max
  Intron number 2 from transcript Glyma12g16960.1 (locus Gly ma12g16960) derived from phytozome v7.0 (chr-ID Gm12; pos 16599231 to 16599610 reverse strand)
tgctgactacttcagtcgcacattctcgtcggtgagtgcagcttaattcccgtggctgaagacgttcaaagagtccacagttgcgaagattgttgatgtgagttgtttctgttcttttttttattttaatttggattatgatttggaaaacaaagttgaacgattttgtgatgcgtgtgacatatgtagtatgctatagaattttgaattgcatgagtgagttctgatctgattgttattttatactgttcatgaaaaaatgttgctgaattatgtgccttctgtaattatttttctaatgcaaaatgctctttttgtgctcattgttgatggtttggatgctagctagtggtccttgctcagtgattattgttagtgtt

SEQ ID NO: 24384 - DNA, 217 bp, Glycine max
  Intron number 1 from transcript Glyma11g06940.1 (locus Gly ma11g06940) derived from phytozome v7.0 (chr-ID Gm11; pos 4900380 to 4900596)
catacactcaaattatttctcaacaaggttagcaattagaatacctagctacatgctcaaactcaaaaacgttactcttgtgttgtattcatcaaagttttctttataaaataaattggaagagcttcagctagctatatacctttgtttttaactttttcatgtgtatcattatttttcaggagagactaataagaagccaagacgccgtcgtaac

SEQ ID NO: 24385 - DNA, 943 bp, Glycine max
  Intron number 1 from transcript Glyma12g36430.1 (locus Gly ma12g36430) derived from phytozome v7.0 (chr-ID Gm12; pos 39499039 to 39499981)
cacaagagcttcctcactccaagagttcaagctcggtatgtatcctcattgttacttaattattcttttcattaattataacacttttagtcactatttatattagagacatcatatcattacaagttgtaaagtattttttttttgaatatttaatgcacttatatctaagtttttaatttaaaattattaattaactttaataatcttaattaccccaattggtggacatgtttctactaattttctttcatctatatatcaacactaggggcgtttgtgtttgatttttctaaaaagtgaagtctttgattttcccaattatttatcatgcaattagtgtgattcaaaacttaaatatgatttctctaaaagaaacttaaaaatgatgtaatccaatctaaagtttcaaatttagtttacctcaacattttttttctattcaataaaaaaatacttttgtttagttttatatttattcagtttcggtgtcttaggttttaaaatttttcacaagttaagaaatttaatactgcgtcatgtatattaaatgtttttttaacatcgtataatatgatttatattttatatttctaataaatgattacaacatttaaaaatagctaaagaagatataattaaaagatagtgttatcatcaatttttaatatgaaatgaattatctggttaacatatttgattaacttataaagtaattaatttattaaattcaaatgtttcgacaaaaaaatttatttctctaacttatagttatttagatataagagccttaaaaaatgcacacgatttgctttactatgttcttttctagtctaaacgccacaattgcattatacatacacaaaatagaatttaacagtatgtagcttaaatgatgtatatatcttactcggttttggttcaattgatatatagtctgagg

SEQ ID NO: 24386 - DNA, 538 bp, Glycine max
  Intron number 1 from transcript Glyma09g32740.1 (locus Gly ma09g32740) derived from phytozome v7.0 (chr-ID Gm09; pos 39273785 to 39274322 reverse strand)
atagtgatagctccaattttgcaccaccgtgagtatcatcctttcttttggatatattaaaaatttgatttccccccctttgaaatgatgatgggcattttagttttagaaaactttatttatttggcttaaatctagtatatttactttttcaattatagtgtattacagtctcatgtcataatcttctcaggtagattgtaaagtatctttgatgtaaaaagttatgttttggattcgaatcacagagaaattttacttgttaacctgtaaattttattttccttccttaatacattctacaacattcaaataatacttttaaagttataactcacactttcttgaaactttatatcaaactctgggaagtttaacctcttggcagacatttatccactttcattgtatgcattcaaaacattatgcatgaacactgttcctattgacaatgatcaattgcaacatggtttcttgcctttcccccttgaactgagtggctaattttatgtcaagcaagagaatttgctgttttccc

SEQ ID NO: 24387 - DNA, 679 bp, Glycine max
  Intron number 5 from transcript Glyma13g00960.1 (locus Gly ma13g00960) derived from phytozome v7.0 (chr-ID Gm13; pos 689752 to 690430 reverse strand)
aagcagaggctatcttgtatgctatattgcatttcctgcatagatttccattttttatttaggctagtttgaataattttctcaataaatactcataggaaaagaaattaagaaggtaaaatgaactaagcttcttgcttaagttaaaattagctcatgcataagttaatgtattgaagttcttttatttaacttttccaaaaacaaattttaatgcacacacaagttaattttaacttataaaagaagctaaattcattttactttcttattttattctcttataggtgtttattgaaaagtttattcagacagaaccttaatactatatttacttgactaataaaggttttaatccctttccctgttttttcaaccgattcttcttctaaatactatatgtttttatttgattaattcagaaaggaaatgaattgttttgaaatgcatgttactgttgaaataatttttttctcataaaataaaaagatacatacatatatatgatcattttatttatttttctgcaggaaaataagcagatacacacccaacttatcattttgctcatgttttgtagtgttgttgtttgttgccacatctgtattttcttctttttttcagacaatttatttcatatactatgtactaatattctagtttcattattagggaagga

SEQ ID NO: 24388 - DNA, 482 bp, Glycine max
  Intron number 1 from transcript Glyma13g00960.1 (locus Gly ma13g00960) derived from phytozome v7.0 (chr-ID Gm13; pos 691130 to 691611 reverse strand)
tttctcgttttcgcaatctcgatcttttctctctggtttgtctatactccttcctagggtttggttcttagggtttgattcttttgtgtttgtgttatatccttttctgtttatgcactgaattgttagttctgtgttggactgcttggtgtattgatttgttgggtgattgtgtgattgagtatttgcccttcaaagtgatttgctccggagatcagaggattagaagaaaattaggaaaaaagtgtatcttgtatttgggcacatatataggtatcattgagtatatttgattcctgaatacgcaaatctcacaattaacttggctgcaaaactaaaatttaatgacgtactcttaaaagattgggaaattacaataagaaagggttttgtttgtatatctatgtttcaattacagtaagcgcaccaaattgtgaaattaaaaatttgtgtatgcattttgattctgcaagtgaagaaac

SEQ ID NO: 24389 - DNA, 1024 bp, Glycine max
  Intron number 1 from transcript Glyma10g37390.1 (locus Gly ma10g37390) derived from phytozome v7.0 (chr-ID Gm10; pos 45389717 to 45390740)
caagacaccctctccgccttccgtctcctcccagagtatgttatgcttttcatcctctatttatttgtttcgttaatcaaaatatttagtcaaattcacgacatataatttttaatcataatctgataattttggaattgtgatatcttctgtcttgtatggttattattgttcgttccaccagcaattatttgaacaccacggtcagttactgtagcaattggaaagtgtagcaatgttgttacaaccgatatgtgtgaatggtttcgaccgtcttacaacttattgccgtttgttttgctgctgaaagtgtcaatagctagtgccatattttctgtgagctgaaagctttttgatttttgaatggtcacaagcctcgatgcagatcactgaactacttcttatagaagtttaaaaaaaaaacttgtttaatccttcttaagtattgcgatgcaaatcaactatgttttaaacctaatatgaaaacactacgtgaaactaaaatggaggttagggaggatgcttctttgtgtgggggaaactaaaatgaattagtggataaggtagtttcccccgacattaaccaatgcaatgaaattgctgtttattacacattgtgggaagtataagctggctggtaaactgtaaaagtatcaaattgttaattacaaccatatatcctgcttttcacttgaattttagaatcagaatagaaagctatattggggaattttcatttataggagaagaaatgtgaaagtaaaatgaattgagcttctcccataagctaaaattaacttatgcacatcaacttttggaaaatgctatagataaaaccgagaagtatggtctttatcttttctaggggtagcaagtggctatgactaattttaatccatttttactttatattaaattattaactaagcatctacctgctgtcttcaggatcagcctgcctaattattttttctatgctctaattttagaatacagactcagagtgctgtttcagcagtccact

SEQ ID NO: 24390 - DNA, 543 bp, Glycine max
  Intron number 2 from transcript Glyma09g04250.1 (locus Gly ma09g04250) derived from phytozome v7.0 (chr-ID Gm09; pos 3118982 to 3119524 reverse strand)
tgtgtcccgtgaggcttatttcacagccattgaaggtgcaatactcctccacttcctgttatttcaagtttatttttgcaaatgaccattattcattattatataaataacatgcagaactggtatataattagatttaagatttgattggaattgttcttatgtatgtaatataattctctggtgtcttgataaatctattttcattaatctctgttttgaaataaattatgactttctctctctcacagaaatgttggtccaatttgaatgaaagatgatttttagacaccaaaaaacttaattgacacctagtcagataaaagatagaaaaagaataaatatgatagatgattagatgtgataggaagagaaatatatagaaataatgagtgttaattagatgtttgaaaaaattgggtgttcagaaatcattgctcaaataaaaccaatgagtattatgtagtgatgacgcattgcagcgcatgatgtgtatgcataatcgtaggtaccgggactgacaatagtggaggtttgccacca

SEQ ID NO: 24391 - DNA, 950 bp, Glycine max
  Intron number 1 from transcript Glyma10g35940.1 (locus Gly ma10g35940) derived from phytozome v7.0 (chr-ID Gm10; pos 44158033 to 44158982 reverse strand)
gcattcaggttccgttgggctttcaatctgtggctgtaagttctttattctttggatttctgctgctacttttatgtccagggtttggtcagaaagcatgcatcttttctctgcacctttttttttgggggggggggggggggttggaatttttatattggtaaatcgaatcttttgatggggtttttctgaattgactctcttttgtggtgtcaaaatctgaattggtgttttgttgcaacagattttggtatttttgaaatagggatagttaatgattggaagaacaagatgtgagagtgagtgaatgtagagatttttgagtgcttcctttaagagatttggtgattgattatctacaaatggggtattggaatatgcagcttcttataaaagaactgaagggtgatgggtgagggcttgtttatttatttgtttgtttttttcctgattgtacgatgacttaaatataaatattaaataaaaggggaaaattttgaatatggatttttggatctgaagagaaagatagctagcttgatcttgagagttgtgggtaattgtattgactaaattgaaggcttagcttttacactctaattggccatattaccataaatagtttattgattttctagagtggttttgagttcatgaatctgatgccaattgtctatcttatggtatgtgatatttgtatatttgcatggaaacgtatgttgaatggtatatttcttctaatggggatcatatgtatattttcccacttcatcttattacttcagatccttttagtgatcgcatctaggctagttggatctttaagcaaacatctaataccatatggctttattttactgttaattgtttataaaatatttgatgtaaatcacctgttctttacactgatacctttgattgacagggattttgatttctctgcgtttaaa

SEQ ID NO: 24392 - DNA, 1029 bp, Glycine max
  Intron number 1 from transcript Glyma12g34840.1 (locus Gly ma12g34840) derived from phytozome v7.0 (chr-ID Gm12; pos 37968693 to 37969721 reverse strand)
acgtttccaaagagctcaacgccaagcacaagaaggtttctctctccgcgctttttctttttctttttatttcaatttcgatttgcgaatcctgcattcgctgattagttaattgcctcggatcattgatcggaacttgttcttggatttgaatccatcactgtccgatatatgcatatcgcgaagttttgaaagtgagaaagtttcgattcttttttttttttaatgcgaatgtgtgtggcgtaattacgattttgcaggcaaatgactgagtgagtgaatgctaggttagttttgatctgattgctatgatgttcagttactgatggctgctaggttcatcgatctttcgatatttttggggattaatcaatctgaatattgtggtttggtagtttggatccttttttctgatgcttgcttagttttggatatttcttttgaggtgtcttggtgctatttacatgctcaatgagagagtatgaagctattagaagctttgctgatgtgattcttcaaaatctatgtctttattttaaagaatagtgcaacttgttcttttaggtgtttttagttgtttgtttgagcaattgtagatttttaattttaaggaggatttaatctgtgatgactaaagaggtggatttgagtcatgaaaagacacttgggttttttaaaaatttatggtgtttattcagcttatattttgagtgaaaaaagaacaaacttaatttgtatctcaaatgttgaaaaagtttcatagttggtttttcccaatgtgaagatggatcatgttcagttgattagggaggagttttcccttcagtcacaagtgtgatatttgtttgtgagtaatatttgtttgagatccttaatgttttttcaacatatgaactttaatttgggttttcatctttattgaatgtgcttgtgtttaagatttgtctcattttctgctttccttctcattacattctttactctaaatgtgcagatactggaagggcttcttaaattaccagagaatag

SEQ ID NO: 24393 - DNA, 500 bp, Glycine max
  Intron number 1 from transcript Glyma11g36070.1 (locus Gly ma11g36070) derived from phytozome v7.0 (chr-ID Gm11; pos 37606908 to 37607407)
gggtcactattcactggttacttctccctgtctaactctcttttaagtttttatcattttgcttcttccttcatttggtgtttgtgcacaggtagtcaatcaattcaataattataggataaatttacattgacacataattaagttaaattaggttcaccaacaatatttgacacaattaatagatacttgtgtcgatctcttgagcatattatcaggatttgattcctaattatgtgcataaaaaaaagtagagaaataatacccacatctttatcctttataggaattaatctccaattgccaattgcaaatccaaaaaaattatgttcaatattcttccctttcttacctcatatagatacccttaatttctatattaattaataacagaacacctatctgatgaaatattgcttaagttgagggtgtgaatgtaatttgatcataattatatgcatcaaaataggaagttgaaaagttgaaacacttttacaggc

SEQ ID NO: 24394 - DNA, 816 bp, Glycine max
  Intron number 1 from transcript Glyma11g29700.1 (locus Gly ma11g29700) derived from phytozome v7.0 (chr-ID Gm11; pos 30459453 to 30460268 reverse strand)
cttgtcatcaaacctttcttatttcacagattgtggtaagttattttttttcctttcatcacaattaacaattactatttgttggtcgattgatttgaattgtagccatcaattagtaaccaaagggatttaagaacaagatcaacctttcaatacaaagatatcattcattttatattcggcgttgtattatatagggatgccatagttaataaaagtttaaaaacgttcattgatatgaagtttagcttaagcatttgaaataattatactaagttgtgtttgtgaattcgttttccataatcttcttttttttaagtactccttgaaagctaataaaataaagagtttaataaatatgcatggttagtacattgtactatctagagagaccatagttgctaaaagtttaaaatcattcatggtcatgaaaatgcattttaacttaagcatttgaaataattattctaaagccatgttttggaatgaatttgtttttaagttctcccacaaagttcataaataaaaagtttaataggcacacaatattaatgtaagagtttttacattgtaaattaatataaactatttttttatgacttttaccataattattataaaagttaacaaatttaccatacatgatggtttgtcattggaagaccgtgaatgcatgtattatttattctaaaatgaacaatcttttctttgacatgagtattctatgggatttgatctaatggtttatcatcttgtgttccttcttcaatggtctcatcaggctggaatcatactgggccctttatttctaggtca

SEQ ID NO: 24395 - DNA, 562 bp, Glycine max
  Intron number 2 from transcript Glyma09g06980.1 (locus Gly ma09g06980) derived from phytozome v7.0 (chr-ID Gm09; pos 5817830 to 5818391)
ggtcaaaaaccgatcaagggctcaccttaccctcggtattattctattccttcttctatcttcatgctgaatcggtcaaagtcaaatgcagatctcaaagttctttcttttttcagaaaaaaattaactatgattaaggtctatgataaaagatcgaactttgttcgggtttcccaataaatttatatgttgttttgaatgttcgatatattgaaaatttatttttgggttctcatcattaaatcaacgaaaaaaattattgagactcagagtattcgatcatttctcacagactttaaacatattttagtctctaattaatgtattgaaacttcacttcacttcaatagtttacatgcctaatgttaaattaaattgaaacctttctttgattattccaattttatttaatgaacaatactataaaaaggagcatataaggaattgaatatagtagtataagttttatgcttaatttaatttgagtaataattaataattaactaaattggtttttgaattggcagagggtactacaagtgcagcaccgtgagagggtgtc

SEQ ID NO: 24396 - DNA, 518 bp, Glycine max
  Intron number 1 from transcript Glyma12g06990.1 (locus Gly ma12g06990) derived from phytozome v7.0 (chr-ID Gm12; pos 4766726 to 4767243)
cagttcccgattttgcttaaccttcaattccaatcgtacgtatttgcttccgtagatatacggttttatttttctttgcatgttctgtttgttgtgattttgatttcgatcactctcgtcgttgcttaggtgctttcattttacgttcttcaacattccgtgagttttaaggcttctttttttgtttttctgataattaaatctgtaaatgttttcatttattttcatttttctaaatttggcatttgatggaagaatcttctgtgttttggatctatgtaatttggtgtatttggattagaagagtgggtaggttttttttttggtttggattgggttggtcctgttctcttactctgtttctccccagttggcccttttatttgatagatttgatggcatttggtttggtttatgaaaattttgttattctgttaatattatccaatccgttgtgagaacaaaatggttaacctctttgaaattggtgcaggaattgaacgtcagaggtccttgca

SEQ ID NO: 24397 - DNA, 715 bp, Glycine max
  Intron number 2 from transcript Glyma12g06990.1 (locus Gly ma12g06990) derived from phytozome v7.0 (chr-ID Gm12; pos 4767290 to 4768004)
tgccatctcccttgcgtttctccaaattctttcaggtgtactgtcttttatttatttattattattaacaattttcttgccacattgttgttctcgtctgttatctggatcgcacaattaaaatttattgttaattggctcgatagatagaatttattttctttatacaacggtgttcttttcgatttttctatcctatgtaccaggtgcataggataagaatatggtttatgtattgtttacactatttattaaataatatgatcaaaataaatataatggatgaactttgttgttgtgtttaagtttgttcttaagctctgcaaatcagtacagtttactatttacatagaatgcaatcacaaatcaaaccttaagagcttactctgcaaaatatgactaacaggccagagttatatccagggagggaggagagtgataacagaaaaaagggttcaaagttatccctcttactattactgatgagtgaaactgagttttttcttctttcatttatctattattctattttattgtgtacccatggttcagaattttgtgtatgaaaacatgcatcctacaactgttgattgaaatttgtcgtgtgattataaacagggattttgtctgaaagaatcccgtagtctgcataacataactttttctggatgccttgtttaaccaacatttctttcattcttgaccatagtctaac

SEQ ID NO: 24398 - DNA, 651 bp, Glycine max
  Intron number 1 from transcript Glyma10g29060.1 (locus Gly ma10g29060) derived from phytozome v7.0 (chr-ID Gm10; pos 37986601 to 37987251)
ctgaatcttccatctccatttttcacctgtgagtccaccctcttttccaatttcatcttctttttcactctttgtttctttcaaatgcaccatcctagttagctggctatgcattttctcagatacccaattgtgagacaactgtataagatttattttttccttaaaacaatcatgggttgggcctgttattgtaatcgttaatttgttgggaatttgatttctaatgtactcatttcacagagtcattttgttgtgatattgttaaatgcgaagaaattttggtctatttggcttttctgaagtaaggctttgccattttattgaaaaatgcaaattatctattatctgttctagacttctagattttttgctccatgtacatactcaataggggatattcaaattaaaggcatcttactttgaaagtaaacagtgtcatgttatggtatattgagtttgatgtctctatggtcacctcttatgtgttgaattgtgctgctaataattttgacaccctaaacatgtagatctgcttgaggcagtggagagtcttttggatttctattcattattgaacatgaatcttattaaggcttttatttttgttttcgaatttgttattaggatttctttgacagggttccagag

SEQ ID NO: 24399 - DNA, 587 bp, Glycine max
  Intron number 2 from transcript Glyma10g08750.1 (locus Gly ma10g08750) derived from phytozome v7.0 (chr-ID Gm10; pos 7664041 to 7664627)
caggaccaagacttttcctcattatccttgacaccgtaagctctctaatatgtagtactttttcttttttcacccggtaaggctggttatgggatacaaaactagaacaaaagataaattatgtttgacaagaatttattaaataagtattcaattattgagcccaataaagtaataatattttttatgagtaaatatttattttagtttttaaaacttaagtatcgatttaatctttgctataacaaaatctttactataatatttaattattttagttcttttgaatataaattaactgtattttttatttataaaatccaaatctagaataaataagaactaaagtaacaaacgccttataacattaagaaaatataaataaaagtctattttacattctacaatacatcaagctttgatgtaatatttatgtcctagacctaaaccttatatgagaataaaataaaagtgcatataattaatgatttttggtgtaaaatacaaattaacattactcacacattttaatatttgtgttggtgattaaaggtgttcctgactatagcaacctctagtgctgccgc

SEQ ID NO: 24400 - DNA, 320 bp, Glycine max
  Intron number 1 from transcript Glyma11g36140.1 (locus Gly ma11g36140) derived from phytozome v7.0 (chr-ID Gm11; pos 37682549 to 37682868 reverse strand)
catccgtaagaacattcctatttcatttttcttttgagagctttcagcctttgatttgaacgtgttcgctagttatggtgtgaaagtgagtgtcactcactcttcgcaattactattgcaattcgcaagcattgattaagtatgaattgaactgttttgcttagttgtgtttagtgaatgattgaattgcaaaactctcggttgagttttttggttcctatttataaatatgcagtcagaacaagttggtttgcagtaatatatgtccttctgatgaacttaaacaagtttgttcatacttttgcagtcttctgttgacg

SEQ ID NO: 24401 - DNA, 573 bp, Glycine max
  Intron number 1 from transcript Glyma08g46750.1 (locus Gly ma08g46750) derived from phytozome v7.0 (chr-ID Gm08; pos 45754539 to 45755111 reverse strand)
ctgaggtaaatgaatttgtcatagaagtttcttttctatttgtgtgctttttctcttttaactgctcaatgttattgctttagaggtgttaaataaatggaatattatggtctatgttgttcatatcctgcacttaaggtaaaatagaaactgctcaatgttattgctttagaggtttctattttaccttaattgaggaatattaatcatgcaaagtgcatctaaaacattgtctggagtggcattttgtagcgtcttcctcaataatttacatgatttttctttctttgaagtattctttatcttttcaatagagatcccgatatttgattattattgatgttcattacagagattcagtaaatgcgctattaaaggattgttcgtctaaattgccattctttgatgtttgaaacctttttttcctacaacttctggcgaaaattaaaatatgtatttttctagacatgttgttgtacaaaagaaatatttttagacttgcagtatattaaaggctggtgatgttttcatgctgcaggtttctgaaagccagaaagttcgacattgataaaa

SEQ ID NO: 24402 - DNA, 417 bp, Glycine max
  Intron number 1 from transcript Glyma12g36690.1 (locus Gly ma12g36690) derived from phytozome v7.0 (chr-ID Gm12; pos 39749730 to 39750146 reverse strand)
agaccccacccaggtactagaagacatcccatgtatgttaaataattattttgaatattgttattgtttcctttaaatcttgaggtgtaggttttttgtgtgtgaatatctaactatgagtaatcttaattaaaatacactcagattctagcttttcacataattgaaattagagagaaaaaatgttgtattaaagtaagtttaaccctaatttatattagtcatttaagatgaaattatttaaccctaattttacttggaatcacttagacaaatctattttaatcaataaaaagcagtatattaaaataagtttgtcatagagtgtcttgctaactttttcacttatgtttagcaatttgattcataaaaccaaaataatatttactttttaaaataatgtaggacacaagaaag

SEQ ID NO: 24403 - DNA, 756 bp, Glycine max
  Intron number 1 from transcript Glyma09g33090.1 (locus Gly ma09g33090) derived from phytozome v7.0 (chr-ID Gm09; pos 39616462 to 39617217)
tacggtccccgagggtatgtcgacgcaccttcatctttctcctttattccttttttcccttcaattttttcttttcccttttcgtaattttctggggtttggtttctgtgtggtgatgcttatgattagaaatcgtgtgtccgtctaaattcgtttgagattaacatttaattagggttgcgtgtaacaaatcggggttgattattgtatgaatttatgtttatttttttttaagtttgtgtatttgaataatttgttttgctgagaaaacatggggtatctgtgagcatgcctaattttctttcaaccttgtgactagggtctgtactgtgttgttacgcacacccataagcttttgctttattttttattctttaattaattaatcttttgagttatgttagtgaagcattaggtatattgctccactatttaatcttgagctgcatcttttttaatttgtatggcttttttcgttttctctatttgatttgtttatatatgttcggcttaatggattgtgtcttggatagaattttatatggttgtggttcatctgtcatactctctgttgttataggcggtctggttgatattttttttatatgttgtttggttgtgggagttgtgatgaatatgatagatttatgagaataggaattaaaattaagtgtcagggaaaacagggttgggtttggctttattaacgtatgttgagtgggggatttttttttgggtatggaaatttgaagggca

SEQ ID NO: 24404 - DNA, 969 bp, Glycine max
  Intron number 2 from transcript Glyma08g47790.2 (locus Gly ma08g47790) derived from phytozome v7.0 (chr-ID Gm08; pos 46594065 to 46595033 reverse strand)
cgacccgagtataggaaagttggtagctgctacaagttgagttttacggaagagtgaaaatggaatgtgttatgcttttcttttctttttttccctaaaattttcatttcgaaaatttgcatgaggttcatttttatccgtaagcttgttagaataatgcttcactgcagaatttttctttacagtttttgtgcgagttgtgttactataactcgggattgcatgcagcggatctaggaccctaagtcagggcacaatctatttaaaaataaaaataattattatcataaaagaagtaaaaaaaattaaggactgagggttcaaatatataaaattaggtggtgcaaaatatacacattcaagatattatttatatgtaatttttttaaaagtgaggggtgcaagtgcaccccctcattcatatgtgatccgccactggttgcatgctaactaactatgatgcacagatagtgtgtatctgatacgataccttattattctaaaaatatataggacatgatacgaggaagatacatgtctagataagtaaaaaaaatcataaaacatattaactatataattgcaattttgcaaattcatattaagaaaatacttattggacattactaaaagcaataaaaattatatattcattatcatcaaaattcactttctattgtctacaaataggaagagtgtcattctgattcctttcctgaaattatccgtaactaggacaaatttcatttttggttcatcaagggcaatgcttctatgtttctatattatgcatgcttctatgtctcatgtaagcttcaaagagcttgtaagagtcataataagcctatataagcttcctataagctcttcaagtgacaattagtttgaaggtgtagtattgtttcttatcttaaactgctcatgtaggaggcatatatttgatgcttgattgtcttcattcaggatcaa

SEQ ID NO: 24405 - DNA, 911 bp, Glycine max
  Intron number 1 from transcript Glyma11g26500.1 (locus Gly ma11g26500) derived from phytozome v7.0 (chr-ID Gm11; pos 25484683 to 25485593)
gcctttgacactgccacagaaatcaccttgcaaaggtaccactaaatttttgctgtgttcacataatttcaatttttttccttatttttatttaaatttttttattagaagtttcatcatatatgacaataaccataatatcttgtgagcatgagaggtcagtgttatagaatgataataattattttaattttaaccactcatttaataaattgtactattaaaattatttcctctcatcttatttgttgggaaacgtatcacctgaaaaacataagaatataaaatactaatctcaattgtataatttgaataaatagttaagatcaaaatattctttttaatatgtgtgtataattataagttcaaaattaaacaaattcatgccgctattatatttatattatcttatttgattctattttatgtactctaagtgtaaggacatacagtaagaaaagagagttattatgaaactttgaaaaggcaagctagatgttaattgtttcttttataccaataattaaatgaatttagacacaacaaaaagaaagcttcttaataagaatataaatcatcataggatttctcataataatttctactagcacaaattaataaaaaaaattgtagagatatgatgaaatgggaatacccttattggatatttgttattttgttatcattataaattaaattcttcaaagttatacatactaaaattttatatatttttagtttaatatctgtttacctgacaatttttgtaatattaacgataaaatatttaaaataattattataaaaattcactaatgataattttccgttgatataatgtgaaaattcttctttttttttttacattttttttatacatctatgattaggcttctgtaccctggcataat

SEQ ID NO: 24406 - DNA, 728 bp, Glycine max
  Intron number 4 from transcript Glyma11g00740.1 (locus Gly ma11g00740) derived from phytozome v7.0 (chr-ID Gm11; pos 386502 to 387229 reverse strand)
ggcataaacaagggtagcaactgcggttatcacatgtatgtaacatcttttccttccacatgtcctcaccaaatcctatatcttactaacttttcaacttctgaactgcaaatgaatcctttacaaatttaaaatgaatgcatgtttgcctagaaccagtgacagggggaggcacttaggcagtatttgaagccctcttcctttgctaggagtaagctagttgtttagtcaggtcaaaattggagttgtctgtttgacaattatattcatcaatcttttcttagtcgaaaactttatttatgatcaagtgatctatatcaatttgatcttaaaatctatatattatgatctaaccatgaaagttgttttcccattggaaatattgtaatttccccaaacaattaattttcatgctgcttaaaatcctggacctgatagcaacaaatgtaaaagaagggcatttaattgaagtatatgctttgaaaagttttccatggacttcaaatggcaattgccattatcattctaagcattgaaaagataatgatgattgcagttccttgaattctgagatgcagctcctaattatgatttccatgataggagtatttctttgcactgtagttgcttctgtagttattacttcatgaagaaacttttgcccatggcttaactgagtaggtccctttgcagtgtttactctggcactgtagctggagctcgagagg

SEQ ID NO: 24407 - DNA, 959 bp, Glycine max
  Intron number 1 from transcript Glyma11g02340.1 (locus Gly ma11g02340) derived from phytozome v7.0 (chr-ID Gm11; pos 1486852 to 1487810 reverse strand)
tgatcgcttcattgaagcaggttaggtcactaaacgtcctcgtttcttgtttaggtttcaatgcagtgacacttagcaattaatcagattttggtctgttagatagtagctactgaagtctgaaattcatttagaatgtgtttggatgagaaattttaaattctaagaatttcaaatatttcaattgaaattttttattttaaaatttttgtgttttgataaaataaaattgtgagggtgaaaagaaatgaatgtaaagagaagagaatatatagttgatgggcttccaaagagaaaaatggtaaaaaaatggtgatgcagcatagggagtgacgggagaccgtgacacgacggcgtataccaccatactcgatcacaacattcagttaacgacacaagacatggcccggccccagcgagcacctctgtcgcgtgatgggcagccacacctgctcccttactagcgggtgcagttttatgtgttcccctacactcgcatccgattgacccttcccgagctcagaggtgtttcttaaagaagaaaatcatcggcatgagagaagggtcgtgagttcgaaaacgagatttcgggaactttcagctgtaagagaagatgaaggttataaaggaaatacatgaaagttttggaaggttcttctatcaagaagaaaatttcaatttctcaccttttagaaggaaattaaaattcaacatttttagttatttaaaattctgttttaaaatttcaaaaatttaaatttttcataaaaaaaatccaaataatgaattttagattaaagaaatttaaattatctgataaattactttcctcggttaaaattctctatccaaacatactcttatgtattgtatggcttaatgaaaaattatgcttctcgtgctttcttgaatttcatttaccagaggaatcaagtggccttactagcaccttatcatca

SEQ ID NO: 24408 - DNA, 888 bp, Glycine max
  Intron number 1 from transcript Glyma10g39570.1 (locus Gly ma10g39570) derived from phytozome v7.0 (chr-ID Gm10; pos 47222513 to 47223400 reverse strand)
cgacacggttttggatattccggaccacccattcggttagtcccagactagtaatgtttttgtccttttcattgccctccctcactcttgtgttcaaacttaatgcctttctttttgttcatttggtgtttttttttttttttaataaagttcatgtcaagtttttttctttcttttctcctcggtatgaaagtaaagcaaccttatccggctcgaacaagattgcctgcagtgaaaaataaaaagagtaaataaacctttaagagagagaatttttaatcagcatgtcataggttacaacttataagatagttgaagaagcttatggattaaattcagagcagaaatgagtgttttttttttcatatgaatttaattagaatgtaatgaaaatgtaagggtgtattataatgtaatccaattacaaatcatatgtatattacttttgaaatcacattaaagatgatttttggtttatgttgtaaaaatctttgcctttacactgaacatgatattaagagaaattatatggtaacttgataaatctaggagttttggtatagttagtttttggaccaacagctacatgagttcttatttaatgaagtcatgccattttgttttgtcagacttcattaaatgagaactcatgcaactgtttgtccaaaaactaattataccaaaattcctaaatttatcacgttatcatagcaactctcattaattaaactcttttcacgtataagttatcacgaatgatgcattggattttccgagtttgctttttactatgaaatcatttccttattgttctttttttgttgtttccctagtctctgatgttgaatatgtgatgtttttttttcttcttttgggtcaggtaccctg

SEQ ID NO: 24409 - DNA, 871 bp, Glycine max
  Intron number 1 from transcript Glyma10g44340.1 (locus Gly ma10g44340) derived from phytozome v7.0 (chr-ID Gm10; pos 50755234 to 50756104)
cactggtttcacctcttctctattggctaaaaaaggtttctttgcctgcatcttcaaaattctacagccttccatgctaattgcttgaattattgtaaatgtgccttttgcttactaaatttcatgatcacatcttcttttcttttcttccttcttttacccgactctcttcttctgttcgttttatgcagatttttttttttatgtccttttattatcttgttacaggaattaatgcaccaacttctcagtcgtttctaaactatgtgttcttggcaattgtctatgggattattgttctatacagaagggaagcactcaaggttatagactgaagctttgattttttcgcagtacattacatgaagcagtgccttagacaattaatatttttaatttttgtttattttgagtgacattgaaggaggaatatccgaaacatgtttaattagattagacgacaggaagctattggtggtggtatgtttataattatcaatcctttcattttaaatgataaacatctggtgaaacaaggtttgatattggtggtatgtttataattttccctttctttttgttactttgataataaaaaaagggatattggtttatgaacaacacttgaaggggacagaaagaaaaaatgaatttgcagagccatttggttgctttggaatttgcatagagaagtgttgatgtagcactgtatagaatatagatccaataaatactaatatacttgtatgctctttttactctgttttcctttaaaagatatatttatatgctctttatactctgttttcctttaagcgttaaacatttaaagataatttcacaaaattcatatggttttggtgcaggcaaa

SEQ ID NO: 24410 - DNA, 251 bp, Glycine max
  Intron number 2 from transcript Glyma10g03870.1 (locus Gly ma10g03870) derived from phytozome v7.0 (chr-ID Gm10; pos 2899578 to 2899828 reverse strand)
gttcaaggtgctaataatttaattttttttatcaataaatattaattcttaattattaatttttttaataaaaaaatcaaattcagaacagttttctcttttctttcttcttttaccactaaattaatcttataaaacaaacaaagagcatggcatagcccttagtgatataattgattagtttatgactatgtaccattatttttcccataacaggttccagtttacataatagcacagacagtaggttc

SEQ ID NO: 24411 - DNA, 690 bp, Glycine max
  Intron number 1 from transcript Glyma10g03870.1 (locus Gly ma10g03870) derived from phytozome v7.0 (chr-ID Gm10; pos 2900012 to 2900701 reverse strand)
tacccatcaaaattgacctgaattgtgctcgcgtaagagtactatatatacgcaacctttctaagagtactacataaacttctctataaaaacttacggaaaagcttttctcctaagtaaaatgaattgaacttttttcataagttaaaatcaacccgcacacctatttttggagaagttaaatggaagagcttttataaaagtgcataagctgatgggataattttttttttcttatttttttccctataagtacttacagaaaagtttatccaaatgcaaccatcccttgattattttgtcacaagattttggattggatttttcagaaaacattttaatcaagcaagctatgcttaatgtattgtacaatataattctagacatataaggatggcaaaaatgtggagtgaattaactttgtatggattatggagtacgaggtaggtagcaatttggaccattactaatgagagaagggtgagtgttattatcaatttgtttggtaaaatcctgttggagctgtaaaaagaatttaaacatgatccaaacagaaaccaaaaattgtgcctattatttttcccttggaagtaaatcttataatgtttgatttgatatttatgagaagtacaagtaattttgatgtgtaatgtaggtgacggcagagttggtgggtacttttattttgat

SEQ ID NO: 24412 - DNA, 918 bp, Glycine max
  Intron number 1 from transcript Glyma11g37340.1 (locus Gly ma11g37340) derived from phytozome v7.0 (chr-ID Gm11; pos 38488156 to 38489073 reverse strand)
ggctggtacatgcattctttaatatcacctatcttttgagaaattattatatacttcgaatccatgtagtcgtaggtcccaatcaatctataaccaatcatgaatcttatgaattatattttttgaaaaaataaaatttgtttaattgacattaagaatctttagacaagtttttaagaaatttgaaatttatgtatatttttattgaatattttgattatttatcatattatataatttaataaagaataacattatgtttttattgtagtaaataaaaaattaagctcaagaaaataagattctcacctcttgagaaaattttggagaaaaatgattaaaaatatttttggaaaatattattttcctaaaaatgttatttttttaaaaccatattaaacatgggaaactaagtttcgcaacctataattttgggaaatcaaaaactcaaagtgaagaaattattaagtccacaaccattgccttattcataatctcaaccaataatcacgtgacatggagagagttaaagatatatgatacacttaataattatctaacaaaaattaagtatgttattcttgattgaaggtatctttttcaatttaaaatattatgttaatgaatagtatgtggtgctattggggcacataagaatttctccctcaagtcacattttttaaaactgagtaatatgctccaatcaatctctacgtgattcttttttttcataaattttaaaaaaaatacaattatatgtcacctaaagatttattaggatcacatggttcggatcatgaattactttttcttaaaccttcttccatttgattttaattgaacatacttgtgtttctaatcattattatcatcatttaaaaataataggggtgccggttccaccgtgcttatcttgtc

SEQ ID NO: 24413 - DNA, 900 bp, Glycine max
  Intron number 1 from transcript Glyma11g29450.1 (locus Gly ma11g29450) derived from phytozome v7.0 (chr-ID Gm11; pos 30118666 to 30119565)
ctgcaggtatatgtctctaactttcatacgcttctttctcattttctttttggttatcattgtatcgtaagacctttagcttcttggtagaatctgatcacgggtttattatggaactaatccctctttccttttaatctttgcaatgaattttctacatacatatgtgtattgcaagaaattatttaaatataaacagttgaaatgcatgtgtatcaagttgttatacattagtctccaaaatttaattgaaaatcatgatcaatcccgtaatcctgttaattttttgtctaattaaaaagtagcacctaatttgaaaataacattctcttatctgatagtttatttttactcatgtatcactttttaatttgggaaattggaacagaagcatgacatatgaggacatgtaattaatttgaatctgatttcgtctaaatatatataatctcttcccacgaactgtacattgatttgaatctataatgagtaatggggacaagtaatttgattccatcttaacaatatattcacgtaataatatctttatgtaacctttgtagtttatttgattgctagcatccttctattgttcttggttcactacaagaaatttgacttctagtcatggacaaactctgtcactagaagtcaataatctataggtaaaccataaatgcataatggactataataagagttttacttacactaaacattcattggtagaagttttcttaagttttacctacactaaatcatgtttgtaggtaacaatgtccataagtgtataagtcctacttcttgcatgtagtggttatgtaataggataaactaaatgtgtcaattaatcttatttatatatgcatgtgcaggagcttccaattcatcaaagagcag

SEQ ID NO: 24414 - DNA, 965 bp, Glycine max
  Intron number 1 from transcript Glyma09g02340.1 (locus Gly ma09g02340) derived from phytozome v7.0 (chr-ID Gm09; pos 1566239 to 1567203 reverse strand)
atcaggttggcatttcagtgttggatgttaacatttgtttgttttattatgatatggttatgtcctttacatgaattgatgaagacctagacaagcactttgaagctataattaatcacttatatgaaatttgtagctaattagagtgtgtctgttaaaatattggctatattcttttctttccaattgttcaggcatgttatgcttttttgttcatgtttcctttttttgtggatcgacactgagataagcattgttgtgtatgctaatgggcgttgagtctagcagaaatagctactagctagccccccacaacttgatgaaccaaggtttgaatctccgctatgagaggtgtctatatttagtgtatgaccatgcctcaaataggattgcttccaaaagaggatatctgttgtggaaatataaaagagaacaaaacttcaagccttgtgctattgctgtgtttgcgcaaacatcatatggtgtttcatttcttaatatctattttcataatgtacctaacatggctgttatttacatctcaatatctttgtttgtttggatgttctttttctttttgtttctttagtttgtatatataaaagtgttagaggtttgctttatagcaggcacactgattcaatttgacagaaaattgcttttttctataacaggcgacaactgatataactttgctatttttcatgcatgtgtaagactttttcttgaatgtagttggggaagctttgtggactaggaggattgtgtttaccatttaaatatcaacggatagcctacattcaaatttctgttttaaaaatacattattgacattgctttgacatgtgccactaacctctaatagttctttaatgtgtatttgttggtatttccctggtcactttaactatcctttcatttgaacgtgattattttgacagataacatttgggaaaaaattggag

SEQ ID NO: 24415 - DNA, 511 bp, Glycine max
  Intron number 1 from transcript Glyma09g05050.1 (locus Gly ma09g05050) derived from phytozome v7.0 (chr-ID Gm09; pos 3832055 to 3832565 reverse strand)
gaggaaagtaaagaaagttctgaagagcattgacggtaccgtatataccacacagtttgaacagaaaatttccctttctttgtctagcagtactctacaaatatttgctagaaaaataaaacaaaaaactagcttcatatttcattatttcaactattttttcgtacacttgtttttcccatgcacgagtaaattacactattattcccacatagcattctgaaccagaagacagaaacagtgctttgggtagcatacacacaaaagaaaatgttatagatcctgactaatgacaagaacaaaataatgtcttttttatcagcaaatattaatttattagcttttgttagaaatgtcaccaaaggtgtatataagccaagacaactcttataccatacatgagttaagttttgtaattgaattaggttcaattcaaaccccaattctaaaaataaatgttacactactttttgtaggtgttttcactgcaacaatagaccaacagcagcag

SEQ ID NO: 24416 - DNA, 632 bp, Glycine max
  Intron number 2 from transcript Glyma08g43260.1 (locus Gly ma08g43260) derived from phytozome v7.0 (chr-ID Gm08; pos 43095073 to 43095704)
gtgtatcagttcgtgcaagaacagattcatctgttagtataaaataagtattggcttggtagtaaaagagaaggctagctaggaggaaaaagttatggattttatgtttgtactgacaaaaaaattaatcattaataaataatatttgccgataaaaaaagtatgaaatgaaataagttacatatataattgagttcttaaattttaacttatttcaacaattatagttataataatgaggaaacttacaaaataaactctaagatgtcgtgtgagttaccagattttctcaccatattacacacatgtgtactagattctcttcaaataaacgaaaatccttacaatataacgtaaaaatgatgaatcatttatttatatatacgaactgcatatatattcctatccgtaccatgttcttggtaactaaaatgtaataaattcttattggaataaatgcttaattgatttaattgtttattgaagctagctagcatggcattcgctaacaaatctagagcatttttttgtatgtgaagttgcattctttgagttaaaaatttctggtcgatatatcttatacctgctactagatattaattttcttttcatcaattcatgacagatatcag

SEQ ID NO: 24417 - DNA, 311 bp, Glycine max
  Intron number 1 from transcript Glyma10g04040.1 (locus Gly ma10g04040) derived from phytozome v7.0 (chr-ID Gm10; pos 3037991 to 3038301)
gttgtgtctcccatattttcgccttgcaacaacaggtaggaacggttataaattaagacttctgaaggtttaaattaatcactggtggttctgtgaactgtttgtgaatttttaattaggtatttaaactaaaacaaattataattgggtctttaagagattaaaatcgctacaaaatatcgttttccctgtcatcgtattattttcttgtataagcagtcattattaattgatcgtggattctcttctcttacacgattagtttttgtcatttggttttgatgtaggtagcatgcttgcaggcacaagta

SEQ ID NO: 24418 - DNA, 448 bp, Glycine max
  Intron number 3 from transcript Glyma11g10630.1 (locus Gly ma11g10630) derived from phytozome v7.0 (chr-ID Gm11; pos 7573198 to 7573645 reverse strand)
gaagctgacattaaccgcttattcctttatacaaggttggtctttttctatatctgagtttaacaattagtagtaagggtgcattagttttaattgtgaagattcatccatttgctttattatccatttctcacttgtcctttttcttttttgggcaccctcttttctttatatcatgttaatgggacttttttaagtctatactttgtttcatgcatgagaaataacttttataaactcaagctcagaattccaaggcttataaaaaaacaataaaagaaacacaaagaagcatggaagaaaatgcagaatgattgagttaattttaacattgagatgttagatattcaattgtaagatttcattgtgatgctttttctttttaacatttttacatatttcactcatgcaaagacttaaatatccagctacaatctgttgggaaaga

SEQ ID NO: 24419 - DNA, 638 bp, Glycine max
  Intron number 2 from transcript Glyma08g44230.1 (locus Gly ma08g44230) derived from phytozome v7.0 (chr-ID Gm08; pos 43939407 to 43940044 reverse strand)
tgcttagatcttcacttttacattggaagcaacaggtgaatattctgatccagagcctaaaatggtactttgttgcatttagttctcatctgaaaaagtttagccaatttgtcaatgcctatttccacttctaatcgttggccactttctttatttaggtacaacaagtagttcacatggtagtttgatatcatttgtttgacttgagagtacctctttatgagtcaaaagttgaagctaatatagttcttctaagtagggattctctatggattctgttgaccacacaccttaaaaccaaccattaaataatacaaatatgaagtcaactgataaatgtgctgcatacacgcttcaactcaagatgaatgtttttatcccagaaaaaaaatcatacttttcaaagtcctcattaatgctacaagcacattatgaattttgtgaccttactcaacatttcaaacctttatctgtatgtttgtgtgtgtataatcctttatctgtaatataaatgtcagcattttttgcccgcataactatattatactgttcttgcctaaaattcattcagtcataaaatgaaaacctctgacctctagttagcctttattaactttagtatgcatttcagggaaaag

SEQ ID NO: 24420 - DNA, 931 bp, Glycine max
  Intron number 2 from transcript Glyma11g16270.1 (locus Gly ma11g16270) derived from phytozome v7.0 (chr-ID Gm11; pos 12047899 to 12048829 reverse strand)
tggatttttacatctctttcaagaacactggagcagttacaagtatcttttcctcaaattcctattattttccagcagctatattttccctattttgaatctcttactatcttgttttctcaatatgtttgattttgtgtgtgattttctcaatatgctttcttaaatgcttagcaattctcaatatgttaagttggatatatataggaagttctcaaatgcattagcagtaacagtgatctcctcagttgcttggataggatatgaggtaaggcttataattgtgtttgaataacatgtacttcttgtaatgaacaactgaaattgatgttttatccacacaaaaaaaacttatatccatatttcactgtttggatattgcattgttgcaaaacaagtgaagaaaaagaaaaaatttctggttttgattgtgtttgtcactttggcttccatttaattgttgtagaatttttttatcactatttaactttaaattgttatgaaatgttgttttttcatggaaatttgttgtcatattgcttttgcctttcaatttgttatctgggttgtaatcactgctaatttttcttttacaggtatacttcaaagctgcagatcctttcaatgagcgccagcagagtgcttggattttaaaaatgcatgctttcaccctctccttaatttttttcctcaaaaagtttcctttcttttgttttctctttctatttagttttttcttttctttttctttttttattctattactactaccttacttttattattattattattattattattattattattattattattattattattattattattattattattattattatttaggtttagaagtgtgttatgattatattcatctttagaatttcaattacatttttttacaggttgatccttc

SEQ ID NO: 24421 - DNA, 573 bp, Glycine max
  Intron number 1 from transcript Glyma11g29520.1 (locus Gly ma11g29520) derived from phytozome v7.0 (chr-ID Gm11; pos 30241010 to 30241582)
gaatatactgctctggcatttgctggggcttttaggtgagttaccaagagtaactaccatttattacaatggcttttctattgttttccctttcatttcttcattttcttttcatattttttccaacgtatcaagaaatcttctcaataaaagcataataagtaactatggcatatgtgccctttcattttttgccacaacacttctgtgtcgaatagtttagtaaccattaaggaaacctagtgaatagtgtgtgagtgaccaaccatgggttttatgaatgtgaatcattgactttaagatcttctgtttgcttcaaatctcattagtacattgcaataaattattgtttatagcctatgggaaaagaatccatcaataagaattaagtttagaactattctttgtcagcttgcagcaaatatgtaaatgaataattatctaacctctgtaattttgaacatgagttgtgtgactaaattgttctgtgagtggttttttttgaggttcaactttctcttaactgatatgccattgatcccatgtatttaatttgacttttaagctttgaag

SEQ ID NO: 24422 - DNA, 1039 bp, Glycine max
  Intron number 2 from transcript Glyma12g29160.1 (locus Gly ma12g29160) derived from phytozome v7.0 (chr-ID Gm12; pos 32541055 to 32542093 reverse strand)
ctagaagcaaaactgcaggctgctgaacagaagaggtgggttttcccaaggttttgaatactttggttttcccaaggctgtcttgtaatgttgtttttgtatgctcatgtacaattactgttgttgttgccaacggccagtgtgtttttattgtttcattcagtaaaaccacttggcttaaaaatttaattttcacgatcatttatgagctattaaaagcaacatttggagtaatttgctcttgtgaattttaagtttaaactgtgagaggtagcatttttctgtattttttaaaaaatttcaggatcttctctccctagtttctagaaaaagcactttaactgatttttttttggcttttcttttctaaaaaaaactcatccaaatatcctcttttggatatatattttaataaaaagacttgtttctatgaaaaatcttatacaaatggacctaatttcaatcacaaaatggttattttggtgtctttgttggaattggattgccagtcctagttgcttttgttgttttttatgaattagtttatttggaaatattaagtagttcatttacttatcaagcctgtatagctgtattatttatattatatccttatattggggaactttgtataatttataaatttgattataatatagttaaacatcttgatctttctttctgatattttgactgtttcatctgtcccatctccttctctacaatcttatttctggaatttaatggtcattttgattgataaataagaatctaattaaaaaatatttatcttgtgttcagaaaaagttaaatatttaacataatctcatctaacacctaattcttatgctttagctgttccattgatagttgaaagtttgtttcttaattctgaaagaaggcttccaccctttaactatttaacatgattttagcaactggcccctaatgatttcttttcaatttatttgacgtgctttattaactgtacataatttactgcctttctgacaggttgagcatcttgactaaggcccag

SEQ ID NO: 24423 - DNA, 822 bp, Glycine max
  Intron number 1 from transcript Glyma11g02510.1 (locus Gly ma11g02510) derived from phytozome v7.0 (chr-ID Gm11; pos 1641939 to 1642760)
agaatcgccttgatcaaccccatcctcacgtccaggtctaataattaataccattatcacttctatcaattttattttttttaagcttcagacctgtcgcttctctgttttcccccctaactctgtttttctttgtcaattttttattatgcacttcatttttgttgaatgttgctctgtttgtttaagtggctataatcaatctcttgtacaaaaaggatggtcttttttttttttaaaaaaaaatctttttaggttgaacaaatgaatttaacaaacattactttttgaaaaagatatatgaagtttatgaagagttaagtagaactccacttcataatatttgatatcatataacgaagagataatacgtttatttatcaccgcttagttatttatttattttctgagtatactgaacttttcattattcaactaacgataatctggtctttgaagacagctaccactgcaaaactgtttccagccaatgccatatgaattagactctcacctttgcaatgaatataaacttttagcctgaattagactccacatactttttatgtcttttgggtacatattcaatttccaaaacggttatgtctagttacaggctaatagtatgtatcctctgatctggaccctctctcatgtatggcacattcattgacttcttactttcttcatcctgcaagcaatcataaactcttgtttttccattgtgtatatgtttctcattcaatctgtgagttggagaacataactcaatgtttgttacttgcagaagaaaagctggggaaactggttaagcatatattg

SEQ ID NO: 24424 - DNA, 611 bp, Glycine max
  Intron number 1 from transcript Glyma12g31980.1 (locus Gly ma12g31980) derived from phytozome v7.0 (chr-ID Gm12; pos 35542104 to 35542714 reverse strand)
cctcagttcaatctctgtcaatttttgttaacacttccaagtcctggtccatttttcaccattgatgttcgcaaatctattagccagtttatttgaatagtagttttcacggttgaaaaaaatactgttttatcttagttactgcgttgctcacatcataccgtgtcatatcattctcactaatcaatggtgaagaagacctctgacatgtaataattgattgacactcttagtctttcccacggtagttgcaactgaagcacttatttttatatttacaagttgttgaaacgttgcatgatggatcttttattttgggatctgccttgtttctatacattgatggtccaacgtatttgggattgctttagttttttttattgcatctttttttttttgtctttgctcatcatattaaaaacatgatggatccatgaaagtgtggttactaaagaaatgtaattcaacgttcatagtttctctaacaacttgacatatttatttgttctttgattctgatttgactatcatgtatcatgtttatgtacctacagtggtgtactttgttacagttattgtggtccttatgagaaatttaaatgtgtaacagg

SEQ ID NO: 24425 - DNA, 777 bp, Glycine max
  Intron number 2 from transcript Glyma12g11830.1 (locus Gly ma12g11830) derived from phytozome v7.0 (chr-ID Gm12; pos 9896127 to 9896903)
accagcatatcagcctccatcaccaaaccaaccaagtccaccatcccaccccctttagattcagaggttcccatagaaaaacaaaactgtcacaaggtttaaaatttctatcgtttttattttctttattcaaacattataatttatttatcatctttttcattcacttttgtaacttccgttatttttttgtttaaaatgtattaatctttcaaaatcttaaaaatccataaagtactttgaaatcttaaaaatctgtgttagaaatccattaaaatcttaggttaagaatcctgattgtaaaaagtcttttaaaaaaaatcttttaaaatcccacaaaatcaatacaatcccacataatcttttaaaatcttcaagattgtttttgtcaaaatattctctcaaaatcccaatccaatacaccccccttagatttgtttattaccttattaaaaaaatgctttgtgtgtgatttcctttaaaattaaaaaactttcatcaaaagaatttttaagaaattttattaaaagaataaatattttatttattaaaatttttaagcattatatgaaagtgatattatggtataagattttttaaaaaataataattcgtgtgtcatattttaaagagaaaaaggaaatttatgtgaaaataaacaaaattttaaaaatgagaacttaaggtgttgtaaataacaatccttaacttaagaatgataattcacaaaacattttaaaaagttaaaaacgattaaatttagtcaatttgttccag

SEQ ID NO: 24426 - DNA, 889 bp, Glycine max
  Intron number 1 from transcript Glyma09g01800.1 (locus Gly ma09g01800) derived from phytozome v7.0 (chr-ID Gm09; pos 1163218 to 1164106 reverse strand)
aagcaacgaagctgtgttctgatccttcaaattaggtactcttttgttctcttcgtactttcccctcttccaattcttctcttccccaacttctgtttcctccataaccccttcaagtttaactctttttccatcttggtctctctctctcccttcggatctgcttcagattccactccaaaccacctttcctcatcaagatctattttttattctattctctcaggatcactctcttgcgcctgatgcttctggtaatttcccccccacccctcaatacccttttgtctctaaaaaaatctccattttttgctggtaattttgacttatactttactcttctcttggtcttccaagtccaacccttaatgagtttttgtgtttttgggttgattcttgtcttgttggtgttccagcactgttgagctttactaatctgatcatgctctgcatgtaactttgccagggatataaatatatgctttttatttgcttcatgggtcttaggtttttatccacttcctgttcatgaatattatggcatgtggcggagtctgaggtgttggttggttggttaattatcttgtttgtgttttggttatttgatgatggacttttgttgttatgtatcagttggagggactgttttggttttacttatcgatggatctatttgtctgttgttaaatgtgagccaattttgttgtgatgttatttattgatgtttgaagtgtttgcttaattgattggttgatgaatttctgtcaacattttattgttaaactgagaatattatttttattttttttcattctgtggggagatggctgactacttgtttgtgatgttgctgcctttgataggttgtttgttatttttggagacttaa

SEQ ID NO: 24427 - DNA, 537 bp, Glycine max
  Intron number 2 from transcript Glyma11g12850.1 (locus Gly ma11g12850) derived from phytozome v7.0 (chr-ID Gm11; pos 9181563 to 9182099)
ttgtgtcctcttctgttgattggtagggtttttcaattttttattttagcatcaaccattcttttgattttaattatgctttagttgttgttccgagtggtattgaaccgtttctgttaagcaaggtctcggatttgagtcttgtagatggaaaaaaacatgattaagagtggagaaccccactaaaggtggccagctatgttccccgacggagattagtcattggtaaagtcggtgggtactccgtaccaataacatggtttcaaaataaaaaataaaagtatgcttcagtttgcttggattccttgtttaaagtcttttttttatcagcaaatgttagttttagttttgttagaaatgtcagttggggaattcgaatccacgacctcccccctctcttcttctttcacccttccccgatcacttatccaaccttacatctcccttgtttaaagtctcttgatactgattttgtttcaattttgatgtgattcttgcactctttactgttgtgtagtaccttaaaacggtggagga

SEQ ID NO: 24428 - DNA, 468 bp, Glycine max
  Intron number 2 from transcript Glyma11g10700.1 (locus Gly ma11g10700) derived from phytozome v7.0 (chr-ID Gm11; pos 7617458 to 7617925 reverse strand)
cttccgtacactgctctcagcctcagggttagtataaatattcccttcttctttacttttgttattcatctttgaatgaacttttaaagtgaatcatataaattgttttagtgctaatttgtttctaagttatgtgcctgcaactataaaaaaataatttgttgaaaagaaaagaaaagaaaaaagtccatgtggccagatgcgccttgatcaatcagtagagctaacatagggttattccagcttaatcagtagtcttgagtttgaactttgagtttgtagctcatagtatttttacctgcttagcatgatcaggattgtctcatatagagaatatttgtggccttgtaccagaaaatgcccttagatccatctggagtaaggttatgtgtcttgacatcgattatatactattatgtcttcttttttgcaggaaaagaaacggaataatctgcgagactttctgaa

SEQ ID NO: 24429 - DNA, 778 bp, Glycine max
  Intron number 2 from transcript Glyma09g20990.1 (locus Gly ma09g20990) derived from phytozome v7.0 (chr-ID Gm09; pos 25820438 to 25821215)
aggtatgcactttcttttgagttacaatttagtttgttgtttgttattatgccataacttaataatgtttatcgtaaacatgcttataatacttttatgaaatgatggagtgtaatgtatgagacttggggtacctaatatttttgacagataaatacgcacctgggatgtatatcaaatatatatcagttgcatcaccttttttttatcaactatgtgcttctgaaaaatatggtttaatgttctccttttcatacccatgttaaattgaggaagaaaattcaatatttcatttgccgtgtactttaccctttgatatttctattatagcaatatagcctcttagacatagaaaaatattaatatttgctttttattttgtttgtttgttggcttgcttgcttgtttagctcttaaacacatttgtttgttggtcttgaactcttgattgatgctcctgagttattatgagttgaatcatggattgaccataaggaatattcgctattttagtttaagaagtatgtgttaggaaatggtgaacataacaggaggctgtcttttaccagaaagttttttagcagtagtcaaaacattagaatagaatatagtagaagcaactcttttcttttcaataactctcaagcacatgagtgtcaataactttgtctatcatgaatttgtgggaagtaaaagagaactactctttttgttttatatttttttgttgggatattcctatattttactgacattataaatgtaatcagaattcccc

SEQ ID NO: 24430 - DNA, 919 bp, Glycine max
  Intron number 1 from transcript Glyma09g38000.1 (locus Gly ma09g38000) derived from phytozome v7.0 (chr-ID Gm09; pos 43503553 to 43504471)
ccgttcttcttcatctcacctacaaccttaacctcgtatgtcaccttcttttaccttattttcttcgaattcctatttgacacaaagataataatatatttctttaatccgaagattcgttgttttcttcgttcaattgctttagcttctcgtctcggcctttgattgaatgccttgaaacccattcaattttggtctctgcaaaattcccttctgggttttgttccgtgtttttggcttggctttatacatttttctgctttcgaattcatgtggctgatgcatagtttcgtactgattatccaatatatttgaagccctgctgaaattacaacatgtgtgattgtatcattgattttgggcatcgatttctttttcgtatgatgtttttctctcatatttaagatggttatgtggatttggggcacttgacttttcatcaatttttcttaatattattttgattaggggattaaagatgtcatggctatatggggtgcttgatggagggtgccataggttattatttggtttcttttttgcttgctttcattcttttagccttttttttcctttctatcttcattgataggaatgcatttcttctttctcctgatgggaagaaaaattgatttggatcactttaaccagttgaacgaacctgtcttggcagtttcttcaatcatccatttgagtatttgtagaagtctaaaatgctgattatcatgtctttttgggctagctgtagaatttgttagcgttagaaagtttctttttttttttgttcttagatgtatctttcaccttttggattgtcagtgaataataatgaacatgtgttttgaagattttttatgtctttatttcattatttacctttttttacttgcagatattagcacaaaattagtttgcttct

SEQ ID NO: 24431 - DNA, 670 bp, Glycine max
  Intron number 2 from transcript Glyma10g38590.1 (locus Gly ma10g38590) derived from phytozome v7.0 (chr-ID Gm10; pos 46369792 to 46370461)
gacaaaagactggaaccagtgggcttcgaaagaaggtagctggcatgtggggttttcgtttcattgttgtttgtctagcaatggaacaccaattattggaaagcaatgaaattgaagcatctcattgctcattttctgtttatagtaacttttgtttgagtttcgtgtttgaaatggaccaaagtgatcaattagacccttctttgattgtctttattcgcaatttgtttatgcttgatcagaaagcctgcagtgtacggatattgttaagtgttgatatggattgaggtgaggttatgattgatgatatatttatgcttgaaaatgaaatgaagttgtaatgttgggtgtgtgtccttttttttgttaattatataattaggatgctgtattgccgtttctcttcactccatttatacataattagtaactcatgctaagctctttagtaaattgctataccggtttgatagctgtgtattcatattttttcttttcatcattgtttgaaagttaattactgactggacacatggaaagctatcagtcaaggaaaacagttataaggaagtattgacaggtgtagcaccatgttgggagtgtgagagtaggattttccttataattaaattaattatatgcatattttgttttgtaggtgaaagtgttt

SEQ ID NO: 24432 - DNA, 553 bp, Glycine max
  Intron number 2 from transcript Glyma08g43930.1 (locus Gly ma08g43930) derived from phytozome v7.0 (chr-ID Gm08; pos 43701822 to 43702374 reverse strand)
aaagtggaattaataagataagggtgtgtttgatttttattttgaaaaacgaattctagtttaaaagaaatagaaaatagacatttacaccaagtgcatgcctcaccacatgcatgcagtaccactctagatgcatgactcaattttgagctacgatcaccaaacaaaagaagttaatgagaaaacatttcctagctgtttctgttttttcaatttttaaaacacttgttttgggaacagttttcaaaacttaatcgacattggatgagaaattgattgctgaataacatgaaattattttaaaaaagagttttcaaaacaaaaaatgagaaggaaatcaaacaggccctaaatgtttaacactttcccctttatatcttgttttctgtttatgagatctatcatgaagagaaagatttcccacataattctagcagcatgcaggctgtctttttcttttaactatctctttggatatcattgcactatcttaatcttattgataaactatttttcaggacatttttggtgctggaggtgagacatcagcaac

SEQ ID NO: 24433 - DNA, 1027 bp, Glycine max
  Intron number 3 from transcript Glyma09g05950.1 (locus Gly ma09g05950) derived from phytozome v7.0 (chr-ID Gm09; pos 4729601 to 4730627 reverse strand)
taactctcctgatctttactttttacaggatacaagtacgtacggtaaaaaattatttattcttttaatttatcttttttttttgttaaaaacttctaaacttatttttcttttttcaataaaaaataatgttattaataaaataaattatcttttttctttatttataattaagataactagctccaaattaaaaataaaaaaattattattattattattctctttgcatacattattcgttaagtgtataaaataattgggtgaaaattatgaattgatgatgagtcccaacaatcttaaatgctattacttaataattaattatcgacatgatatgatttatagataacttattttatgtatgtgcataaggattcaataatcatgttgtgtgtgaaaaaacatcaattaagaaaaaataaccacttaaatgaatcttaattcacacaaaataaaaattaaccaatttttttaatttttttgaattagtttaaaaatatatatattctttttttatagacatgtgtattcttcattgtaaaaattatgtttaagccttatggataactttgggtgaataattttccttccaaaatatctaagatttaaattttataccattaagttagctaaaacaatcccgattgttttaaaagatatattttcttcattgctatatataagactagttatcaaattctttaaaattaaaaaaaaatgattagtttatttgataataataaatttatcttaaatttataatttttttaaaattatcattttcattaatattcctcaccactctaactattgcttctgaatatattttctctcttcctttaattatacaataagtatcataaattggttactataagaaaacaacaaacaccaattcatatttgggtcttatataagttgagggagtacttttacactaaaaaaaacaaatataaacgtattgaaagactttataggtgtcataaacattagatctgtttcaggtgaatcgttggacaaattt

SEQ ID NO: 24434 - DNA, 534 bp, Glycine max
  Intron number 3 from transcript Glyma10g02120.1 (locus Gly ma10g02120) derived from phytozome v7.0 (chr-ID Gm10; pos 1487140 to 1487673 reverse strand)
ttaatatactcaaaggttttatttcttatatatacaccaagataaagaaacaatagatagaaatattttctttttaattatcatgttagagttatatgaaaactaattattaaaatctattaaattatctaactaactgattatctttgatgtgatatttgattcctttcaaattatttttgtgatccaaaagacttcaacctaaaatttgtttaaaaaatttgaattcaatttccctaagaacaactacttgtaaaaaataataaagtatcatttagtaaaaaatataattagttaaaaatattaaagatggtatatttaaggaaaggtgattgcatgtacattaattttactcttaatgccccaaaaaactttacgagtgatacaaaaattattttgaataaacatgcttttgataaaaatgagttgatatttcaatggcaagtagtgataagtttaaaagtatgcatgcagtctttgaaattcgaaaaggtgaacaattccatcgtgacagacatctcttcgttgaacagc

SEQ ID NO: 24435 - DNA, 416 bp, Glycine max
  Intron number 2 from transcript Glyma11g19170.1 (locus Gly ma11g19170) derived from phytozome v7.0 (chr-ID Gm11; pos 15852750 to 15853165)
aggtgaatgtaccctttcgctttcttcagaaaatatataacaaagtttgaatcaaaagtcaaaattaaccatatattttttttatgtactaagaaaaacttcaataccgttgcctaattatattgattcttaaaattagcttaagaatatcattaaagaaaatgagttttcatagaaattttaatagaagttgcttacatgtataattacgtaactataactaagattgcttaaccatttaaaacaatattttaaaatcaaaacggggttcttgtgcattgctattatgtaaatcctgtaatatcattttcacatccattaacacatcatgtattgctattacttcttcactatgttaactaagtttgtggctgatacctgctgcatgcatgttattaatttttcatatgtagatt

SEQ ID NO: 24436 - DNA, 827 bp, Glycine max
  Intron number 1 from transcript Glyma09g11670.1 (locus Gly ma09g11670) derived from phytozome v7.0 (chr-ID Gm09; pos 11840331 to 11841157 reverse strand)
tgtgttgttctccttgtgtctattctgcaattcaggtaacttaattttttgttggaactttggccattaacccaaaacatggatacatatgtgtttgcatttaatatatattcctagtcatgtattgctaggcataacatagttgcaaagccttagaagctgaccataaatatagtagcaatgtttaatgtttaattagaaaaatacaattttcaagccatgaaaagctgtagacagaattcatcaatagccaaaatggttaaagttaatcttcaggaattaatcaagattttttccgttcaacaatcatagccatatgtacttttaaggtacaatagctatgaatttgagaaggttgaatttgtatgaacataacttatgctagctaccagtttggtcacttgagtaaatctcgaatttgactcttgcaaatgcaaaaaatagacatgaagagtgttttccgtcttaaaccagttcagtaggctcgaattgtaatgcgaatctaaacaaaacataaaaacttatggtagctgtgggaaggcatatataggtacattacatggctaatgaaacatgctctgctaccttgggagcaatcacagaaacacttatgagttaaattattcaggtttactagttcaatttcagctattacttttcatttgtcccgctgaagagttgaaagatccttggtttcttttgcaggcctaagtatagccacaacattcagagaagaagagcaccaagaaatctcatatgaatttggtaccaagttggatgcagttcctgtagtaaaccctacaactccaggcacagcaaattcattt

SEQ ID NO: 24437 - DNA, 714 bp, Glycine max
  Intron number 1 from transcript Glyma09g34680.1 (locus Gly ma09g34680) derived from phytozome v7.0 (chr-ID Gm09; pos 41006714 to 41007427)
ttctctcccctcacagtgcaaaatcgtctccactggttagttaattcatcttctaagcttagtttcattcaaattgcgatattattatttttttctttttggaatttcaacttggggaaaagtagaatcaagtagagggagttgattaagtgcttgatttggcaaatttaacttagttactttagctgctcacactgcttggttacttaattttcagttcaaaatggtcatattgaacaccaaattgtagttagaacctggaaatgctagtctgctttgcacaaaacattgctcgcgaaagatgtgtgtttattttgtaagaaaccctgaacaacgttaggtgttttgaattttctgttgcggtgaatgtttatacttttgatgtctccaaaccgcaagaatttgaaattttgatggcttcaaaaactctctattctggtctcactgaataatattaatagtccttgctaagtttgtccggtagaaaagcagttggtattgtttcttttatcatgatagcaaaaatgtatttgcatattaattttgaaaagaaaataaattatctatgctgctttcaagttacacttcatattgattgattccatgcatgtttttccattttgatctttgtttgattaataatagtcgtttatttcacactaaactgtatgttatcatttttattacaggtgttgatattaggtcatctaagat

SEQ ID NO: 24438 - DNA, 872 bp, Glycine max
  Intron number 2 from transcript Glyma09g34680.1 (locus Gly ma09g34680) derived from phytozome v7.0 (chr-ID Gm09; pos 41007508 to 41008379)
attactattgggcttcagtattcaaggttattatatcttgttgccatttttattactatcttttagtaaaagcagatattatactttgctagaagaattagaagcaagataagcttttctccctaacaatgactatgaaaaggaaaatggcattaacaaacaagttcattagtgcagtgaagctctccagttcctctgcatagcaacaagggtgattgccttaaagaagccatagtcagatcacctggtaaggacagagagaaacccctagaaattcaattgttcccctccatctgaatatgctaaagagctgtacaaattacttactgtcttaaacatttccctcatttgctcctcacaccctctctaaaattaatcaataataactgctccaaagtcaaaggatacatccaacattcatccataattcaggactatgtaaagaggattaggctgtatttctgagctagaactttagtggtaatcagtggtaagagttttatgtggtttgtgaacctgtggctaactgttagtattagtccttttaagtgtttaggtgttagttattaactaattatcactaagtaatatcatttctgatcttccttgccttgcatgctcatctcttttgtttgagaaaacatacacagtttcgtcttcttgtccaagtcgcatgtatctaaatacagaacatgttagcatatttgacgaccaattcattgtgcatgggtgtgcacacacctcatctatggtctatcctttaatggttatgatgactagagagttaggtaatttttttgggtagctataaataatttgtgtttacacttgtttcaggtggaatataaagatcacttttctggtcagacaca

SEQ ID NO: 24439 - DNA, 331 bp, Glycine max
  Intron number 1 from transcript Glyma11g34000.1 (locus Gly ma11g34000) derived from phytozome v7.0 (chr-ID Gm11; pos 35830703 to 35831033)
gaaagcaaaggagttgtgtgacactgatttctttggtatatattgcctcattttgttttcaaatgtgtttttaatttctttctacatgatgttcttgaaactaacatatatatatatgttgattccatgaaccctttaaccaaaccaaaaaaatattatgaaacaccaatatatgtactatggaccgggttctcctttgatttgcattcttcttcttctttgttctttttagcatgttcatgttcaagttattctgtcttaacctaactcatactttaacaattctaacaatatcattattatttgtctttctcttctgttaataggtagt

SEQ ID NO: 24440 - DNA, 754 bp, Glycine max
  Intron number 1 from transcript Glyma08g43470.1 (locus Gly ma08g43470) derived from phytozome v7.0 (chr-ID Gm08; pos 43291059 to 43291812 reverse strand)
tggggagagtggtggtattgttcttgttgtttcaggtgccatgctaatttgagtatgaggtggaggtacactgttcagctcttggttaatcccatttggaatttaagatagtgggaatgcttcagtgaaggtacaaaactagaatttcatgactcatgcttatactttatactatatcctttggtcttttttctgtggctgcagttgtagagttttgctgaattgtagtttacatggttgaatttaagtttcagaagatttgactctgttaaacaaataacaaatattttctgaagtaggttattttgtcataaacaaataataaattgatcagagatatatggttgacttgctggttaagaaagaaggaaaatatcataggttcgatatctctgctaacaaaaaaaactaacaaactaacgattaacatttgttgataaaaagtcctagactcctagggaatctataaagaagaatgttggaatggccttttgcatcatcttgcaattggaattgagtcaacttagtaaaacttggccaatttcaaacttatgtgtaacaagtgattcagggagccataacaataaagatcatgggacttgttagaaagtgttttgattgctgtgcactgtcgagttcaatttcaaacctcattatcttgttcatataagttgagtttattgtaagattgcaaatggtggaatgaagagtatctataatttttttcttgatctttgtaaatgttgtagctaaa

SEQ ID NO: 24441 - DNA, 878 bp, Glycine max
  Intron number 1 from transcript Glyma09g29600.1 (locus Gly ma09g29600) derived from phytozome v7.0 (chr-ID Gm09; pos 36436642 to 36437519 reverse strand)
ggcacgcttctctcccttgcgccgcctcacaaaaggttcgtttgttcgccaaattgaatcatcgcgcaattttccatcattcaatacccgatccgttcatttatttatatattttttgtttccttttgcttttttttttattgtttcggtcgcttgtgggttttcgcgcttttggtattcgtgttattatagtcttcatcgtttttgtgattattattattatatggtgatggactcagattactaattggatgtgctctgttttgtgatgctttagaggcacgcacgtgtgtatatatattaatattcatacgagctgttgcgcatctgcttttgtggtttgttcaattttaatataatcgttttttgtttgggtgttatggtgtgaattttttatttgcaacttgacatgagggaggagaaggtgaccatggagcagagtgagaaaaaaagttattattataataataatatttttattatattatgatgatttaaatatgtctgcatctcagaatcgtgtgtgttttatattagtttatgactaggttaaagtgtttataaaagcctgtttgaatcttaatatgatatgatgattctataaatacctttcggctaatgtgaaacaaatggaatcttgtgtttttttacgttgaattcttccggacctaacacaatcaaatcaaatcaaatttgatcaattttgttcgtttcggttttcacaatttttttaaacccaacctattcatgaacggtttgattcggtccaacgggttacccatttaaatttgattttattttcttaaaactactattttatattgtggcttatttgttgtgtttttttttcaaggttattggcctattattgtctgaag

SEQ ID NO: 24442 - DNA, 812 bp, Glycine max
  Intron number 1 from transcript Glyma12g36910.1 (locus Gly ma12g36910) derived from phytozome v7.0 (chr-ID Gm12; pos 39929081 to 39929892)
gactacgaaccctacgacagtagcggtaacccctctctccttttccagttccacttagggatagggtttctctctctctctctctttctttctttcttcaattccttaggtttttttttctctttcttccgaatcgaaactctttcggagaaattaacgaaaccacaacaacttactgccatggattcgttccacagttttgtttctttctttgtgttttctctgtgtgttcggttttcttcaataaatcgctactgagataagctcttattttggttcttgctcgtttgcctgctgtgacctaacattgggggggggggggctaattgaaaaaacgaaaggacactatgctttgagttttgacttctatgaattgaatgttttgtgctcacaagatcctcgcttgtctctttttcgcactgttcttttgaatggtttacagtgatattaaccaactttgaattcaagttcagaatgataccatgtgtgaatgcgttctttaatgggtcaactgcttgaattaatgcattggaataattcgtacatggtgagaagttggtggtttctgctattaagttttccccattagcaaaagcaaaagcaacatctatttgattgttttgctgtgttggttgtgttgtgttgtgctgttactactgcgactttgtatgcagagaagtattagttacaatgtgtttcctgggcatgagtttgatttttctccagtactgaaaaatataggtgttgttgaatggtgatatttgcttcacagattcaaggtttggacttggttgtaatgattgcaggaactg

SEQ ID NO: 24443 - DNA, 981 bp, Glycine max
  Intron number 1 from transcript Glyma10g31710.1 (locus Gly ma10g31710) derived from phytozome v7.0 (chr-ID Gm10; pos 40209486 to 40210466)
gctttgctccattgctgccactctatcagttcgtaagactcattagctgcatgtgattctcaattggagatcaggatggagggtgtttttttttttttttgaaacgataaattcagttgtagaaattgttcttcctcaaaagaagttattttctgggttggagattatatcatgttggaaaatcgatttaatttatgtattgggttgaattctgacaatttttttttttttgaggcggggtcaatccaaaatctgaaattcaagattttgtgtaatttttcattaacccaatggagcatttttctaattactttgaaaaagttttgaacttcaagcttcagtttccatttctggaactttttttctctctctcattaacgttttcctgatttatcggtggctttagtgacagtggtttgaagccgtgacaaggcacgtagtagtttcatcaattagtgcaagaaagagataaaaataataatgcaagtgttcctttgcgtttctgcaattgttgcttgtttggatttctttggaaaccctttactcacaagtcatcattctcattctttgctcaatttcacttgctatatcttcttcaatttcatgagccaaagccttttgcttgaagctactttgccttgaggaagttctcattctggttgatgtttgtgtttatgttttggtttgtgttgttggtgtaacggtgtgcacggggagtgttacctttttttttgtttggtattgggaatgttatgttaccttttagtttcactatcaccatgcatgcctgttgcaatcttttgaaaccttttccttgtcatcacaatgaagcgttgacacggaccacacttgtcatgtctcatgccgttcttgtgatctaattgcttttatgcctatattttttccccctcaatctcacgtttctccctgtgaatttttggctcagagaatagcagaacttttgacctgaccagtgaactg

SEQ ID NO: 24444 - DNA, 671 bp, Glycine max
  Intron number 1 from transcript Glyma11g34790.1 (locus Gly ma11g34790) derived from phytozome v7.0 (chr-ID Gm11; pos 36595114 to 36595784 reverse strand)
ttgtgtttcgtctcaccccaccgttccgttttcaggttttttcaaaactaactcattttgtatcttaactttgttccacttttattgtaaaaaaaaaatcatattttttcctcgttgcttttttttttggaagatctaggattccgcttcattctcaatcgtgagttttgtggcattggctgaatgttgttttgacttttgttacttgaacacgattcctctatttttttgtctgtcgcgtcttaaaatgtttgcacctgtttctgttaattgtttccacatcgtatgagattatttgtagattctattaaaactaggatttatttttgaattggaaatttggttttttgaatttttagtaggtgcagtacattcgtatttctttaaatttaattagaaatagtaatttaattatggtatttaatatgattgaatttgagttgctcattgtaaaattgtaacctgtgagtgacatattgtgatgtaccaccaaccttcagttcagggaaagtgatgaatcatgaaactctttggtaataagtctcttttaagctccctgaagatggaagcatactcttctgccctgtaactgtcaatgtctaagatgattgttttttatgggattagttatgtgatggccataggattggatttctttgcaatgcagggaa

SEQ ID NO: 24445 - DNA, 654 bp, Glycine max
  Intron number 2 from transcript Glyma09g40540.1 (locus Gly ma09g40540) derived from phytozome v7.0 (chr-ID Gm09; pos 45454044 to 45454697 reverse strand)
tcactaacctcacacattacactcctccttggtgaaatttccttctttatttttttatttattaaagttttaactttggtttatgatattatctgaatctgaattggctgcaaagcctgcaatttgttattgaatatatattgttgttgagtttaattttacactgaataacttttaaaataattattataaaaatcaataaaattattatctatataaaaaatatgattagatgataaagtaaaacttttgtatggtattaatacatgaattattttttgtccagaatttttcagattgtcataaatttgcattttgataaagtgtataattcactcaatttcaaaataactgactttttaacaccaatttggcaaaatgttgcttatggaacaatttaattaattatcacattttaaaaccattgaaagttcaattggtgttgccgtgttgggcgcattgagcccttaacttaggaaatgtattatctcatgttgaatttgcttttttttttttttttatttctcttcagctaagttccgagcattgagcctttaacttaggaaatgtattatcacatgttgggtatagattattaattaagagaacattgattattctacaggaactacaatcctgaaggtaggaaagatc

SEQ ID NO: 24446 - DNA, 922 bp, Glycine max
  Intron number 1 from transcript Glyma10g09250.1 (locus Gly ma10g09250) derived from phytozome v7.0 (chr-ID Gm10; pos 8241135 to 8242056 reverse strand)
taaatatcactactaaaaaaaggctttctacatcggtcaattaacatcggttattgcaaaaactgatgttaacgaaagcgcggtggcatttttgtaaataaatggagttacttaacatcggttttataaaaaccgatgttaactacttaatcttaacatcggttattcaaataaccgatgttacaatgatgttaagatgaatatgttaacatcagttttgtaaaaaccgattttaacttcatagtgttaacatcggttttgacaaaaccgatgttaaggagttgaactgaacatcgattttttgagaaaccgatgttaccttgttgaagttaacatcggtttttacaaaattgatgttaacagattcatcctaacatcggttatccttaaaaaaccgatgttgatgttgttatgttaatatgttaaaacgtgttgaaatttcacaactcacgcgctcgaaaaccctgctgcactctctcttctctttctcctcccacccgaaatctatcggaaaccgctcggttgacacccacattgccccacattcatttcaatactgtcggaaaccgctcactggaacccacagaacctcctatcaaagaaaagtcgaagaaaaccctacattgctgttggaactgtgggtcaaagaaaaccctacactgctcttggaacagtcatgggtgctcaaagctcaaagctttctacgctgccagttaacaaggtatgagctctaccttagtttgttgctcttcttattaagtttttaatcagtgcggtggcaatgtccgaaggttcttatcaaattattgggtcattttgtccacttggctaaccatataaaagtatcaataagaattgtaatgtggggtttcattttgttgtggtagttgattgtgctttacgtggttttcaagcttgacga

SEQ ID NO: 24447 - DNA, 1010 bp, Glycine max
  Intron number 1 from transcript Glyma12g18490.1 (locus Gly ma12g18490) derived from phytozome v7.0 (chr-ID Gm12; pos 19155050 to 19156059)
ggggcccagcctttcgcttcactcagcctgaggtattcatcgaaaatttcaaattcgtgtgtttctctcatgttttcttgctctttttctcgtgtgtttatctattgggcgtttctttttatgctaaagttttaatcttgtgctgaattaaatcatccaaggggctctcattcatatctccttcgttttggtgctctaaattttgtcactggattttgtggcattcgatttttctatgcatgtgtggtatttggtttctgactggtggatatttcgtttgtgttggtgtaataaaccaatgatggatgatgaaaatacatgcaccaagttagggttgtgacattgcacaatgaattagggtaaagggtagttgcatcacttttttagacccctgtatggtatccacatctttttgtgcaagtggtgggaaggggtgtgaaatttatgtgatgtgtaaacctcactaccctcaaataggttttgttccctgtcttaggatttgggtgtatttggggttaggctataaatgttgactctgtgctaccaaaacttttttatatttggtcaaatgccatatgccatattgtatttcttgttttgtgaagctttttcctcacaaatgtttgatttgtagtgttcaatgttataactttgaaattagaaattgacaaaacaaattaactgactcttatgaaacaaaatcttaaatcattagcaagtgtgtgaagcctttgtttcagaagaatgaaagcagagcatgggaattaaatagtgtttaatggtgctcctttacttcttttctttttcatttaagaagtagaacttatctgactttcagtttctttgatgaaaattggtggaagctaagaaaaaaaattataaatggttgaattgtatgattagttttggtgatatggaattcaaattgcaaattgtaaggttctatcaaacatagattttctgtaaagagtgctgtcaaaaactattgtttctctgtataggtagcagag

SEQ ID NO: 24448 - DNA, 811 bp, Glycine max
  Intron number 1 from transcript Glyma09g33580.1 (locus Gly ma09g33580) derived from phytozome v7.0 (chr-ID Gm09; pos 40012311 to 40013121 reverse strand)
ctgtggtgagtttccttttcttttctcttcttctttgactgatgatagtttcttaagtagtttatgtagaacaattaattttagtcctaaacaaatgaataaataaatatatgtatttaatatcttgagaattagtaggaagatagtgtagaagagtttaggagtggaatttaattagaatgcactcatagaatcacagtcatccaatcacatattggctatgccatacgataatgtaccctcccgatcccccagttgatccagagctcagacacaccttagcctcgttcgcctcttaagctcgagactagagggctgtgtaccctctgttattcaggctgaccttttgggccaaactgactctggacattggttaccatgtttggttcttgagccaccaggttgaggaccataaggggataaaacaatcatactggggtatcacccatgatggaatgactacccatcaagttagatatcaacctccacacatgctaggaagtgagacagcacacatttaaatggaccagacatagtcaatctttagaccatcctctgagagtcggagggtcttcttagattggaactataaggtgttgattttttataataactactttacaagtcatacttaaggatgattcttggttggttgatattgtaaaatctttacactgacaatgcatattgttattgttgtttttggattggtatggtgtgagtgagtttggttttggttgtttggcaattgtcgtcaattggttccatgtttgtaggtatcacaacaggatttggaagacacttatcagcc

SEQ ID NO: 24449 - DNA, 877 bp, Glycine max
  Intron number 3 from transcript Glyma12g32850.1 (locus Gly ma12g32850) derived from phytozome v7.0 (chr-ID Gm12; pos 36247288 to 36248164 reverse strand)
ctgtcatcaacaggtatgacttttgtattcatggtttatatctagatgatgatgatgactaggccttttatagaataaagattggtatagtactatagtagaaagtccagtaagttcattatttaagaagttgagtctgatatttgtaaaattgtttaatttttatatatttgaacctcaatttggagtttacttgggaagctattcgtctggcttgatttggaggatggaatgatgattataggtttccctattagtttgattgcctgaatgatggcattttgtattagctctatctgaccattctccttgtcttcctctgcattatttttgtagtttttgtcatacttagatattttgattgaatgtgttgttttttttttggaaagaagatttctttgcagaggatggttttagagcatgctagtttctgtgattgttttcttaatggtggttgtagtcagagaatgacatgatgattgtttgtttccctattggtttgatagcctatatgatggcacctgtgtattagctctatctgatcattctccttaattacttaaaatagaataatgtcatgtgatcaacaccacactattttgattgagcaatttgtttatggtggacataattcacaaaaaaatgtaataaaattttgtattgtttggaggtactgatactctgaacagtaaatgttggtatgttatattcattccaaataagcattaatttgctaccactgaactgtagcgaatgaatactatttgcagttcttgatgtgcatctatatgaattgaacactaaatttactttaaagtgtcagtaatttatcttactgttttgattgtgttttgtttattcagtggtcctcgtgaag

SEQ ID NO: 24450 - DNA, 533 bp, Glycine max
  Intron number 1 from transcript Glyma11g14770.1 (locus Gly ma11g14770) derived from phytozome v7.0 (chr-ID Gm11; pos 10533407 to 10533939 reverse strand)
ttcaccagcgctgtcaaccgatcggtcaacgggtacttcattttcacaatccctttcttaaatttacctcaaataatcaaaattctatgtgcccaattgtttcaactttcaactgtcgtttcatgattggattcctagtttgaaaatgttcccttttttatcatgtaattgcaatgcttacaccgaaacattgttgctttgcacaattgtgtgcatcatcctggataatactttactttcatagtttcattagatggggagaagacatggcatgttgcttaaaatttgatgttcctaatcaaaagaaatatcaactagtcaaacacatttcatagaaagaacaaaaacactatttggaggaataataaaataactaataaatctaagaatttcagtcaattctagcagcttccgaaatgcctgtcagtttccttactaagatttgcaatgatttggagaggaatttaagctaatgatatgtttttgttttgtttctaggcttagtgtagaagtcataaatccagagggaggta

SEQ ID NO: 24451 - DNA, 719 bp, Glycine max
  Intron number 1 from transcript Glyma10g31960.1 (locus Gly ma10g31960) derived from phytozome v7.0 (chr-ID Gm10; pos 40452018 to 40452736 reverse strand)
aagagaaaaaagagggtctcactcgcgctccggaggtgaaacaatccacaatttctagggttttcttttccaatttccacaactgtgtgttcctttgatcacacttttctcatttatctctgtctgttccgagtaatgttttccactcgtagtagtatgtagtatataacgtgaattgggtttcgcattcttctcattggcggaaacatttgtttccgttctccgaggttgggtatccgtatttctctgtgtatgctttacttgtattttaattattttcgagatctgttactgctattttctttttttagttttcactcatcgttaatggttattcttcactttttcatttgcttacttcatacgcttattataccgttgtatgtaacccaactttaactgtatgtatgcaactgcggtgtctaagaaccaattgaaaattttcaaattggtttttgtatttggttttatatactgttaatttgatttggcgctgactatattcagatgctgctgcatgatgcatcaattactgtctccctcatctctttgtcttcgtcttcctgttaggtttgaatgttgctgttgtgtgtttcaatgttggtgatgcatttgttgtacatgcttgtgataattgttgtggccttgtgtggtttcctaaactgtttttttggctggttgcagttattgagttttctataacaaaacaggctgtagag

SEQ ID NO: 24452 - DNA, 414 bp, Glycine max
  Intron number 2 from transcript Glyma10g00630.1 (locus Gly ma10g00630) derived from phytozome v7.0 (chr-ID Gm10; pos 387683 to 388096)
cataatgtgagttcaataattaactcctgccaactaactacctttcaaattgtggaatgatagtccaaattttacatggaaattttctgatttgatgtgtatatagaggatggtgaattatctaaggaatgaatgataagcatggatcttttcaaatatcagccaaaggtagaaagaaaatgataaattttcatttgaattaattggtgaagcattttgtcaatatgaactatgaagacacattccaaaatgaaaagatacatacttggcactattcaggagacaagacattttgttgaatctgaaaactaaaataacttactttggccaaacaaaaggaaaagaggggaaataacaataagttcttctattcattgatatagaatgtgtttttttttttttttcatctaggaa

SEQ ID NO: 24453 - DNA, 633 bp, Glycine max
  Intron number 1 from transcript Glyma09g40600.1 (locus Gly ma09g40600) derived from phytozome v7.0 (chr-ID Gm09; pos 45489276 to 45489908)
tctccttcgtggtgttgatcttgtttcattgtttggtaagcttcgattatgtttttgttttaaagagaagaaaaaaagaagtaataaaataataatattttatttttgttttgggtggagggtggggaggggaatgtgaatatgtgtttttggcatttgggttttgaatttgactttaaaaccaggaactttttaaaaacaaattagaggaagaagtgagataatttttaaaatttagcttgcttattatggatcatgggtttatatggtgtaggttggagaatactattttggtgatgattttggaaagtttgaattttcttaccaagtacgacaatagttttatcccactaagtgaggtacctcacacggattacaagaggacactaaattcggttaaaaatcaaattttcatgtatattattcttttttggcgagtaattgaataaaaatgtcttattttacctccgggggccttttctcttcagcatttcaaattaagaaatgcagttttactaaagaataaatcttcagaataattaaattttgagaccattcaggtatcatgtcttttagtatgtggactgaatgataatggttatttgatgtttcgttttgattatgcagttggtt

SEQ ID NO: 24454 - DNA, 980 bp, Glycine max
  Intron number 2 from transcript Glyma10g38220.2 (locus Gly ma10g38220) derived from phytozome v7.0 (chr-ID Gm10; pos 46038351 to 46039330)
ataaggtgcagaattcatcaccagcggaggagcaggtgagtttgtgtagttctaagtgtctgtttctgaagaataggaacaacctagtttgcactttgcatgagtttcttgccgttttcctccattctaatgcgggggaatttaatgcacgttttgtttgctctccctatttgttggcccttatcaatttcatttaattccactacttttacacaacgtagggtgatattttgctaatgtgggggcgcttttgtcttttcagttcctgtatatttggaaataaaatattttctctacgcaaaaataacatatttttttccctttataagagatgttttgtgttatatggtacggggaaaattaatacaattcgtgcagtactggaattgaagtccttaagcataaatgagacagctcatattttgatttcaacaaattaaatttgaaatacgaactcaaaatgtaactcatacattgtcatgcattttaatgaaattgtttattaatgaatccaattacacattgataatggtcccacgttgtttattttacaccgaaaaaatggcttaaaatgatgatttttttttacatattgattaattggactgattattctgtgggcatgatttgtcccttcacatttcatacgccttcataatatataattggtttaattatccaatagtttatattttaattttcaaaagatttacgtggttaaatttttttaatttcataagttaaatttttttaacgataaatacttttaaaaattaaaatataaactttataaattaaaaaattcatttattaattataagaattaaaagggataagtttaaagctgtataatttaaataaatgattttctgccgattaatccaaatatgactattaagttggcatatatagggagtaacgggtgatttacatatgtccccacaggacggctcaaaactagaaaagggaatagaaagtgc

SEQ ID NO: 24455 - DNA, 888 bp, Glycine max
  Intron number 1 from transcript Glyma11g38110.1 (locus Gly ma11g38110) derived from phytozome v7.0 (chr-ID Gm11; pos 39066824 to 39067711 reverse strand)
acaaattcgacactaactatcaggtctttattttaccgatctcctttttctttttcttttttatttttaatcattcgaagatttcgttgaacgattatcaatttcaatttgactaactccatttcaatcatgctcttatggttttggttttggttttgattttgtccgttgatcaattatttcatctcatgacgccattagatgaagcgttttcgttatacgttagatatgtttcgtttcgtgtgattttactttaggtagatcaacctgagccagaactagagagttgtttggccatttttgtgattgttctgttgtgaattgagaataaaggtggaaagttcatgttatagattggtgatttgttgtattttgtttcgtttgggaaataaacaccgtctgcgatgatctttgctgtgattttttcagatgtgtttattgcgaatgatcagctcttaattaggaggatcagaggagataggtatcatagtttgcattgcaatgatctctcagagatactttttctataccatcaggtttgaattagtgaagtgtgtaggaagaagagtttgtattagtgattgtgaaattattttcagggtttgaactattataactttttttagaataattgaatagagttttttggtaattatattttttgaaaattcggtcatcttgtgatgatacttttttgtatttgtagtcaatggttatcaacttatcatacaaagtaacttaacatgaaaaattatcttcttcgtaaatttgttttgcatttgaatctttacgatctcccttcccccttttcctgctagggtcttgacaaatttctagatcatcaaaatttcaggctactattggtattgacttcttgtcaaaaacaat

SEQ ID NO: 24456 - DNA, 861 bp, Glycine max
  Intron number 1 from transcript Glyma09g31590.1 (locus Gly ma09g31590) derived from phytozome v7.0 (chr-ID Gm09; pos 38271457 to 38272317)
gattttccaaatttgagatttttacgcacttagaggtaggtaggtcacttgggttttgttcggtcctgcttgttgggctcatctgtgtctaattcatttattttgtatgaatttgggatcatggtggccattgatgggtttctgcaagtggaattttaattgtgtgtttgtgtatgtgctgttttaaattgaaatagttaagctgcttaagcactctttttgtcgtgcaccccctttgatttgtttatcctcaatttgcatgtttgattttgctttgtgggttaatggcacattgccacttgtgcttagatcttagaatttgcacgactatggaaaagtttcataattcaacttatgttcttcaaattcttcaacttttataaaaactctctttttcgacttctccaaaagcttagatgattttttttaggaataaacaatcatttaagcaaaaaccagcataacccgccataaatcccaaccatcccaaatacaaattcctttcccaaaaacataatattaagaaaaccatcgctcctaagtctcgaattgcagcatatcagcacaaaattttcaaaagctgagttctataaattatttttatctgatggaagatgtttaattttatttttttttgtattctttcttccataactgcttattgacaagtttatttaccattgtaagaattgtttgtagcctattagttataggtctgatcaactgtaatatctatatgtcatgcagatgggattggataggttgagcctttttagctggtaattggtagtttgattctatagttttgaggattcaatttggtgtgacttattttgttgggaaacttttatgtttcagtaa

SEQ ID NO: 24457 - DNA, 512 bp, Glycine max
  Intron number 3 from transcript Glyma09g31590.1 (locus Gly ma09g31590) derived from phytozome v7.0 (chr-ID Gm09; pos 38272959 to 38273470)
agaccccggctgctgacagccaacctttaactaatgtatgattttcagagtgcaatgagattttcttggagtaatgtgttgagattgatttttaccaggaaacagttttggaatcatatatagaatcttgcataacctaatacctttttgttgttgggattggtgggcattattatacaataaaatgtggaatatggttgataaatagctagaactagaatatccttaaactaataatatatttctgattttctgtgtgttttaattttttctctttatatttatgggtgaaaacaaattatactcaaaatttcttctttcctactttctgaacttgatatgttgttagtttcctttgttatgtgcatatcaaataaatataaaatgtatgtcctcctaatgatctatattcttgcgtcttatatacatactatattataggtttgtttgtggtgtctttagtactctgatctttctgagtattgatgggcttcaatttttctaaaaggtcg

SEQ ID NO: 24458 - DNA, 861 bp, Glycine max
  Intron number 2 from transcript Glyma11g11230.1 (locus Gly ma11g11230) derived from phytozome v7.0 (chr-ID Gm11; pos 7994433 to 7995293)
tctgtgtcattacacagttgaattaccttaatagggtgagtgggtggtgaaactttgccagtttggcctgcatttgatgcatgatttatggtttcttattccagtgctgttccatggggcaggggcaaaccctcttggcttttgttattatagttgtttttaagaggaaaaccaatcaaagggttggtcttctagttttggtaaatagagcaatagagcgtagctttttgaattcgattaaactagaatcaatatagaactcatactctctataaggcaatggcttgcaagtgacaagcccttcatgcacaactataaacagctagtcatatagataacaaaacaaggccctacttgatctgttgattacatttgcagctatggtgagaagtaattgttattgctaaataatgcactgcagttgatacaattctaggaaagcattaatatagttgatagtcatggaccaagcatgctgaattctcatattgaaatacgtatgaactggaaaaaaatttaattatgaacttgatacagatcttcaaacatgatccattgaaagttatacagagaagtataaaacacaatgttgtgaacagccctgtcctctggatgtaattagacttagtctcgggaggttttctttccacatccttgatccaaacatttttttatacttgcaaatagaattccagtagtgttttctcaactgatacgtttctttgggttcccactggtatcaacttttcttatcatccgtctatgatgtatctgtaagactacaagtataactcccttttgcttttgacaaatcttgagcttattttactattaaactattgcaggctctggatacattca

SEQ ID NO: 24459 - DNA, 476 bp, Glycine max
  Intron number 1 from transcript Glyma11g15950.1 (locus Gly ma11g15950) derived from phytozome v7.0 (chr-ID Gm11; pos 11646876 to 11647351)
tgactgtggcacacttttctccaggttagcatttccacataaacatactatatactatataataattaatacaattcctttaattaatgtctcatcatcttataataattaatttgttcttttaattagttcatcttccatgattacatacagttgcaatttaatattcagttaattcattaaactagtacatgcttgtcaagaagtctagttcccgtgattgatcataagtgcataagttgttgttgtaaattttcaagtcctctctttgattctcacctataaaaaaaatatctaatgcatacgggatgatgaaggaaacaaatttcatacatgaaatgagtagtaattgagagaatatttgtttggaataatattaaatgagggttcttaattgatgtttatttattgtgtgtatatctatatgtgctaacaaatcaggaaggacagcttcataacgcatagagctttttgtg

SEQ ID NO: 24460 - DNA, 914 bp, Glycine max
  Intron number 1 from transcript Glyma10g03920.1 (locus Gly ma10g03920) derived from phytozome v7.0 (chr-ID Gm10; pos 2922841 to 2923754 reverse strand)
gaccgcttggcccaatctcctcctgacaaggttctctctctcacctctcttctatcgccacttttaacatacatacatacatacatagaaagaaagaaactttgggttttttaattaagggttcgttcgttggagatcccacatcgattagttatatggccaaattaaagtatttaagcagtggctaaatcgttgtgtgcggtactgcggtcgtggtgtggttgtgtggcattgatgaattatataaactctgcttcttatgactaaaccaaatctgggggacactgcactgaggagtggggtccagaatatccttcccacgacaagttcacttccatgggactgttaccagttaacttgtcattagtcattcattacatagatgctcctcctttatgctattactgtttcttcttgttctccaacaacatatggttgcaattgcgaacttgttatcttaattgtgattttgtattttttacccctaagaatttgcaagtctgcttcctgcatacttaagtatcacttgggtgtgtctagaagagcttatttacagcttattcggacttatcttatggcataagtacttgtgtaagtgtttgggagaatttctgaaaataacatacgatatgtcctttagctgtttttagcttgtttgagttagttcttcaggatagcttatatgaaaacaattcatacatagttacatacatgatagttacttattcaataaacacttagttgtttacccaaatagactcttaataatggacaattaagttgtcattcttgcattttccctcccttttctgtactgttcatttcatatttatttgctccaaatggttgtatttccttagatgatcctatggtttttggtgtagaaatattgggaagcaggtggaaactgcaat

SEQ ID NO: 24461 - DNA, 766 bp, Glycine max
  Intron number 1 from transcript Glyma12g23890.1 (locus Gly ma12g23890) derived from phytozome v7.0 (chr-ID Gm12; pos 26510354 to 26511119)
cttccatccccgttccgttcaattctactttcaaggtccgattcctcttccccctcttttattttgcatttgaacccactcctttttagagttcagattcatttcgctatcatttggataccattgctgcctttaggttaaacttcaactcttatcaacacttcatgccacttaaccctaggtcttacgattcgtggaaataatgtaaataatcgtttcttaattttcttgattctcggactatcgagtgcgtagtgcttgttgatgaatttcatttagtcgatttattggatattgttgttttgaattgttgatttcgagtttgatgagctagtttttatgaatagtgaaatttgtggtggttgaggagttggtgatgattttcttgatttaaataatggagtagtttctttttatgaactaggtatttagatgttgatatattgagattggataatggaacaaacggcaaaacattactttgttttggatttagaaggtgtgaaaataccgagctgaaagatgtgtgtacttttggtggtgcaatcaatcgatgcattatggagtatgtcttgtttaggttgtaacatctcatgcgagtaaacatgagcatatgtttctgaatgtatgagatatgtcttgaagttctgtgttttcccagattttagttgaaaattgcccgaggcttattatggtgaaaacagcaatttaatattatctttgaatgatttgaatttgttttgtttggctgcaggttgtgtattac

SEQ ID NO: 24462 - DNA, 543 bp, Glycine max
  Intron number 1 from transcript Glyma10g22860.2 (locus Gly ma10g22860) derived from phytozome v7.0 (chr-ID Gm10; pos 28905305 to 28905847)
taggagagtcaggtaattctcttggcttggcatttattcaaatcagtccatgtaacatactgtgtaaacatagaaacttcttggcattgattctatagttgctttgtattgttccttatactagaaaaaagaatgcaggagatacctttacaagattggcttagataattccaaataaatatctaagctatagcctcctggaaatattcaaatatgcgttttaagattgacttagataattccaaataaatatcaaagtaatagtctcctggaaattttcacacattttatgcagagttgcagacattaatgaggaacaaatgtatgttagttttgtttgcatccatttagggattttagtgacttgttattaggtatgaaactatgaaattggattataatttttattctattaaatttctgaaatgaactgtcaaatgtctccattattattctttatttacacaaacatctgtaatatgagattgacgtaaatacttctgggcaggttgccaaagattgaacagacttgaaaataactct

SEQ ID NO: 24463 - DNA, 746 bp, Glycine max
  Intron number 4 from transcript Glyma12g36950.1 (locus Gly ma12g36950) derived from phytozome v7.0 (chr-ID Gm12; pos 39949412 to 39950157)
gcaaacccatccgtgtcaataaggtatgaaattgttcttgttcctgtgtttgcttcccttctgaattcaatttttattttcttcctttttaatattttttgcatgtgtcatccaaagtattaatcaaaacaaacagccatttaccgattcatgattgccgtgaatctccatgaccacttcttcttgagggatgttagttctcttgtatctcagtactcgatgcttatgcatagccttagaatgggattatctttctccttccacttaagggatgcatgcaagaatgacaatgcgtgccatgcaattttgttacataaccattatagtgccaccataacactataatgtggcatttttcgacacctctgccgtaggcaatttgtgaagggaggctcgctatggcgtgcttatgtgacagaattctggcattctgcctttgataaccttggtgctaggtagtattgaacttttattttaccaacccatatcgtatgcaattcccagataatcattctttataattgaatctctcttattttttgcatagtgattattcttttcatatctgtattttgtttgtacaaactatgtagtactctgttcaatttctgctatatttcttccttgtagtaatgtagttgtatcaacacccttgtcacttgattaacaaaacatttagttttcatgctgtttgatggattttatgattttttggttctaggcatcccaagataaaaagagcctgg

SEQ ID NO: 24464 - DNA, 938 bp, Glycine max
  Intron number 2 from transcript Glyma09g36470.1 (locus Gly ma09g36470) derived from phytozome v7.0 (chr-ID Gm09; pos 42210875 to 42211812 reverse strand)
tattttctaattgtaaagcaaactggagtaagagcttagttatactgagccatagattttgatccttactttagttatcgttaagcagacaatcagtgcttttcctgttattcttgtaacatgctaatgactgattgattattggactgacttttattttgctagttactgttgtttcagcaaatttctgtttctgttgattttcttttttgtttactaacatttgttcataaatattggaacattggaacaccagaccaagggttatattcttttttgctcatttaaatgattcatttgttactttcttgaatcttgatgaattgaaggttgttcagatgaaccagacatgtaatccaatcacagaaagtgaatgttgtggaaaatagagaaaacaactactacactaaaaataaaaatcaatttggatatagatgttttcttcatgtctagaatttctaagggactgtttggttagagaaaatgttttttgttttttattttcactttgtttttggttttttgaagtttgtacaggaaaaagtgaaaacaaaagacaataaaaagttgttttcattgtttgctatactaacttttgaaaacatgagtgaaaacagaagccgttttcataaaccaaacagccctgatattagtactattgaaatttgatttgaatttttgctcacacacacacacagatatgtatttgataaaaaagtccaaataaaaaacctttaaaaatgtttaatattacttatgataatgctgtaatggattaactcacttataagcttacgctattaggtggagattcaaaatatgttttgtatttctaagttctaacagatacatccatgtaaatgtaaatatgcaactgattcagagttaaatgaccattttcaggaaaaatcaatcatatttgctttgtcacagtctgc

SEQ ID NO: 24465 - DNA, 489 bp, Glycine max
  Intron number 2 from transcript Glyma09g01000.1 (locus Gly ma09g01000) derived from phytozome v7.0 (chr-ID Gm09; pos 545362 to 545850 reverse strand)
accgtctcttggcagcttacgtcaattgtcagaaggttagaaaagcaaaagaagaaaaagcttaattttaactcctcttgtgtgatgtgtatatgcacacccccaacaccccgtctttgtgtaaaaaaaggtagacaggtttttactcagtggttgaaaacgatcgatgcttaattaattagtttctgcacactccctttctttggcaagttcggatctgagttgtatggcatgtgtactgtggacttgttttttgtttctttctactaaaatataatcactatgttgataagttatatatgttccatagtaagaaagagagttttggcaaagaagtcaaaaaccctttaaagcagaagtgataaagactgttatttgcttcatggtaatattaattatatcatgtgtttttttggtgatacatggttttcagttttcacacgttcctttgcaggttggggccccgcctgaagtggtggcaaggttaga

SEQ ID NO: 24466 - DNA, 419 bp, Glycine max
  Intron number 3 from transcript Glyma11g37220.1 (locus Gly ma11g37220) derived from phytozome v7.0 (chr-ID Gm11; pos 38404292 to 38404710)
tggaagatattgttcctcaatctattggttgtcaggtgcggaatttcaacaatatggatgtacaccacttttttcaagtttgatttccccccatttgattctaggttcatgatcctacattcctgctctattatttaaacacttttactcagtcttgctaattgctttttgaatatctagcaagggagagcctattttataagtttcatgtattctttacataataattcatagccatgttatttgcaatattttgaattcagctttcttagcactttgacacttttatgtaaatgctcatgcacagtgatactttttttatgtcatcattgtcaatacttaatttgttcataatttgattttttttaaacggcatctgttcagattgaggaaattgtgaaagaacttgcaagtacggt

SEQ ID NO: 24467 - DNA, 740 bp, Glycine max
  Intron number 1 from transcript Glyma11g09220.1 (locus Gly ma11g09220) derived from phytozome v7.0 (chr-ID Gm11; pos 6517996 to 6518735 reverse strand)
gccattgcatcagctcttcttggtctgctgaaacggttagtatatatatcatgaaattgaaatcctatgtttttgttcatgtggattggatgtcatcaagattcaataatagctttgcattctttgatggctgtgaaaaaaaaatttggtacaattctaggatttaggaaagcttggaacatattgtttcctcatttattgttttgatattatcctaggactcttattaattgttgtattacaaaagaggcttgtagcgtgtttggttccacgtcctagatgtggttttttcttgtttattgagaagctagagtagttatagcttccgcatcctaaacttgattttttttttatttcccaacgagttttcaaacatgcacttggatcttaccgaatctgcagctaattgtaaaatggtcaataaactttctggtgatttatttattgatgatttagacaaaagctgcaacctttggatacttttccttgaaagttggtaaaatgacattttagtattaaacttttgagtaacttcctgcgtttcttggtttgtgtccttgttatagccagtttgtttcgagtgtctgtctctgtccatgaatgcatagaaagagaaatgcagtttgagttccatggaaaaaaaatggattgcttatttgttcaagttggggcaacccatgtattttgatatagccttagctagtaattatgacctttcttcttttgtctaggaatcaaat

SEQ ID NO: 24468 - DNA, 913 bp, Glycine max
  Intron number 1 from transcript Glyma10g38000.1 (locus Gly ma10g38000) derived from phytozome v7.0 (chr-ID Gm10; pos 45903771 to 45904683)
gtacgttctctaaaattatgcactgtaactatgcttcttgatgtaacaagatgcacagggcagctcaaaattgaatatgaaaatggcaggttacatagagcaatatgcaaatcacatcaaacatattttttattcttcatggagcagtattcatttctacgttatagtagatatttgagattgctgtcgcctacatattatatagaatggcaacattttgataaaatgcattatatagtggcagaaatgatgtggtttccatgcctattatgactccattggttgcaatttgtattgcatctactttaattatgaaatttgctaaatctgcttagcgattttttctgattctgaggcttcgtttctataaaatattggaaagcacattgattcattggattaattggtgcagaacttgaaagtttaggcataccaagaattttttatattacactttagaactttttaaactttggggggaaattcaactagtttggaccatcctagccaagctttgctcaactgagatatgagagatcacctttatcttttcgacttggtgcttggagagttgtggaccgtcctgattgagtaaacataccacattcagagagtggacctaggtggttcatatttataatgaaagtggctcaattcttccccattaatcacttacttgtgttatagggcaccctttttcccatcagttattaaaagagtgtatttaaataagcctaaggtgaaagattcaaggcaagcaacttattcctaggcatagaactcatcctccatacatactcaaaagacttataaagtctggttattatcatcaaatttgcatatgaactcatacatactaatgtattttctttcgttttccaataacctattttaggccaacgcggcatctgga

SEQ ID NO: 24469 - DNA, 838 bp, Glycine max
  Intron number 4 from transcript Glyma10g32210.1 (locus Gly ma10g32210) derived from phytozome v7.0 (chr-ID Gm10; pos 40650393 to 40651230 reverse strand)
gagagtattatcatttcttgtaatcattgagtagggtactcgggtttgtagagtgatagactatttggaataaattataattttgtaatcatttttgtaataatgaaatactttttgagatgattctgtggacgtgggtaaaagatgttgaaccacgttaaattcttgtgtttgttattatttttcctacaatataatctttgttgtgttctcataatcctttatggatgtgagtaattttgacatttttctaaacacgcttctaagagaaaatataagagaaaaagaaaataagtttattgtttctctaaaagataagaacatctacaaattaattaatgagaaacttattttaacttatggagaaactttttttttttctataaaagtatttatacatagcaaaccatttaacttcattgtttaaagttaatgttatgagttctcttgcatggattcggagtttggaaatataagtcatgctcgtgggaagattaatgtaaatttttgcatttaaactgttactagttttagtgatatttataatagaatagtggatagctgatgctaacttgggctttataagatggactatgactaaatctaagtcttataaaacaaattaaaatattaatcttcattcatgaatcatgattgctagcatcttttatgataactaagtcttagacttcattatcattagtcaaataacaaaaaaaaaaaaaaaaactagtctcactcttcatgatagcatgttagcatcttttacaaaatggctcatgttatatgattatgttgttcagtattgaatactggcctgacccacagcgtggcatta

SEQ ID NO: 24470 - DNA, 484 bp, Glycine max
  Intron number 3 from transcript Glyma10g32210.1 (locus Gly ma10g32210) derived from phytozome v7.0 (chr-ID Gm10; pos 40651162 to 40651645 reverse strand)
ccgatcatatatttctgctggaaggtagcatgtggtgacaatttctttcttttaaagaattttgttactgcaattaagatttggttgtgttagtgagttagaggtgtagggttccaagtcaaaagataaggtacatttaatgcatagtgggaaatgaatttttaccactaatgtttaaataatttaaatgcaaagtgaaatattgcattttattatataaaatttatttgaatgaatgcattaaaaattatttttgttttaattttcaagagaacttattaattataattagtaacaatcttcactataaatagagaagagaattagtgaagaaacaacacacatgtagagagagattgtgataagagaaattgtgaaataaagtcactttgttgagagaaaaatatctttgtgtgagagtattatcatttcttgtaatcattgagtagggtactcgggtttgtagagtgatagactatttgga

SEQ ID NO: 24471 - DNA, 625 bp, Glycine max
  Intron number 2 from transcript Glyma09g29550.1 (locus Gly ma09g29550) derived from phytozome v7.0 (chr-ID Gm09; pos 36397081 to 36397705)
tgcagactgcaggaccaagtatatgcctttttcagaacccatttgtttgatgttaagcatagatattaatgttttcggcaaattacgctcatacttcatgtggtttcttgaaattttacacaatactccagcctttatagggatacataatgtaatgtgtttcttggataataaggatacatagtctaatgtgtttcaaacaattgagaggagttaccttattaagccttaaaaaggtggtggacttaagtatcgtgtaaaatttcaagaaactataaggggtatcaatgtaatttgtcatagtgttttttattgtgaagcttcaactccgaataggccctttcttttcttttctttctttctttggggaggatgggaagtattaaacaattttgagtacttgtgttatattcacatggatattcgttgtgcatcagctatttaaaagttttcttttttcccttttatacttacttttaacttttccttttcattcactttcctgttcaatatcctttgatttcggggatcaacttgggttttagcattgatggttaacttgggaatgttgaggttttttcatggtttataagcacatacatttttaatatttcagggcaccacg

SEQ ID NO: 24472 - DNA, 1009 bp, Glycine max
  Intron number 2 from transcript Glyma09g04420.1 (locus Gly ma09g04420) derived from phytozome v7.0 (chr-ID Gm09; pos 3264806 to 3265814)
gcaggcagggtttttcttcattacaacttggtaagaaaaaaaaaactgtttttttttattgctgttatgttctttattagtattattacagaaaaatacattcatgtttgcctttgaatttcataaaccttatccaaattagaattgaaagattttgctagtgctaactggaccatagatgtgctttgaggattcaccctcaacaacattgttcaatggggcagtggacctaattgatttaagatttgatagaaaaaaattgagatggagtagaagaagaaagggctaatataaactcttggggtggggaagagagaaaaaagaaaaggagggaaggagagaggtgtgaggacatctaagagaagaacaaacatagactgatttcatggtcccatcacgaatcaattatttgaaattttaatttcatacataattctcttttaatagagaaacttcagccctatattattaggaaaggaacattatctttacacccaatccttaatttaaattaagcaaaacctaattcaatatggttttctgcatatgttactcatgtacaatagtagaagtcctcctaacaacaacctaacaattctgattataatactcttgtctagcaataatacatatctatatgttcaattgtttaatatttatgcagtgtaacaaaatttataccctaaactaaatcattagggtatgatttataacataaatattataaaagtcaataaaattatcttatattttgatttgtaatcaaatgaaagtgtaaactattcactggatgttcaaatattataacccaaaatcttatatttaaaaaaaaaaaaaaccaaactactagtctttgttgtattgcttccaattaatatctgaataattcatcactaaaattttcctcccttaccaattaacttaaccactagcaaaaacatgtgattgtgaatctaactcgatgtgtattgtaggatttgtttcggaattgcggagattttgttgctgg

SEQ ID NO: 24473 - DNA, 1002 bp, Glycine max
  Intron number 2 from transcript Glyma11g08180.1 (locus Gly ma11g08180) derived from phytozome v7.0 (chr-ID Gm11; pos 5787500 to 5788501)
atcgtgtcgccgttaagagactcgagaagagcaaggtattcaaagttgtgtcttttgttcttccgtggatacgcagtttagattttgtgatcgttgtgcggtgatggaagtaaatttctgttgtttttctcgtcttctccaattatggttttgttttggtcaatgggtaggaagaattatgattttttttattttttttggggttcccggttctggaggtactactaattttggtgctggagattggtaaattaatttgtttggagtatcggataatgatgatttttttttaattttgtttcgttgattggaaaaggggtttttggaatgtctgctgattcccctactgcatctactattattttgttcgatgtttacctcaactagctcaaatttccggtttcgaggttgaagtttttgtatacccgatttttattagacataacaaggttgataaattatgcctttctctgcaatctgtatataaagccacttggttgtgtgtgtgtgtgttttcctttcgctcttgcttgtagaaaacagtacgagttgttgacaattccgttttgcatatcactttagctcaccattatgtcgcggcatcctcctaggaaggtcgtgatagagataattaatgctatatggaattgtgtgaattcgattgtgtttggtaacgtgttctacttctacaaccaacaaatcatgatcttgacgtgaaaaacgtaaaagctaaaactagtagtgtccattgtgatgtgaaaaaccacgcccccgatctgtttccaaacacccacttcacataaagagtggcggggtaataatgaatctggctagctatgttgatgcctgcaatgattttgaattaatgtgaaatacggattttgtgtagaggttttacacaagctcgttttcagggttttcttattatttatgttccgatttgttttcatatgaagtttcgtgcattcttgaatcaattcttgaatttggtggcactggcag

SEQ ID NO: 24474 - DNA, 867 bp, Glycine max
  Intron number 1 from transcript Glyma09g41810.1 (locus Gly ma09g41810) derived from phytozome v7.0 (chr-ID Gm09; pos 46494208 to 46495074 reverse strand)
cttccggggttgcaggattcacggctgcatattgggtaagcaataagatttttgtatgctttgattaattcgtccaatatatttttaggctaggcttaattaattccttttactatgattaatatttagtttattgtgtcttttctttgtcacaatcttcacctatttaaccttttgtttgttcttagaatgcatgtacaacacaaataaagttaaaaccaaagttggaaacactaacgttgcaaaacactccattgagactcaaagtttttctctattttttttccttaggtcatatcacttaacatatttacactacttctatatatattttctatttgtttctctctctctgagtgtttattactagcatatggatgttcaagaatcacttttcttaaaaaataattgcacattctttcacttaatttttcttctatctcactttcatcccatttttcttcttgattatcttttcatcacttgctacattcatcacttttctctctctgttttttttttcttactatatattttttccctcccccataccttcgcatagcgaagagctctggacaatgggtacgaagttttttatattttttccctccatctcaaaataggggtagtcatcatttacaatttttcaaaataaaattcatggacacccatcactagatgatatctagagagagaaagagaaaaaatatatggtgtgtacagtattatacataagtgtctatatatgatgactctaagcatgcaccaagcaatcaaagtaacatagaaaaagaataacgatgagtgcatacacatgtaaatgatttgacaggttgggccacggctaaacaaggacagggaaaggtt

SEQ ID NO: 24475 - DNA, 629 bp, Glycine max
  Intron number 1 from transcript Glyma11g03190.1 (locus Gly ma11g03190) derived from phytozome v7.0 (chr-ID Gm11; pos 2107855 to 2108483 reverse strand)
ctacgaccttcactattcctcctacaccctccaaagtaacccctctcttcttttcaccttttactatatactttgattttctcatagtcaacaaattaagtatttttatattttaacagaattgtttatttgaaagatacatgtgttttgtataaaaaaatatccaattgttaattactacctctcttttttatattgtctatatagcttggttgatctaaaaattattgtctaaaattaaaggagatatatacgttgctatcttaattttgtattctgaaaacatttttctttgcaaaggtctatgattgaaccttttttttatcatgtttttttcatattttttttagagtagttttttttatgcttttatttgttctcaaagggcagatgatggttatggaaatattggtattaaattaaattgttgcaattcaaattgtactgtcttttagattgacgacacagactattaatttttgctctgttacatgtatcatatatgcaaaaatttcttccacactaatgattctttatatcatatgtgtcatgccttcacttctcatatatttttttgttaatttttctggtgagtgatagttgttgagacggtgcaggtttgaagcaaa

SEQ ID NO: 24476 - DNA, 763 bp, Glycine max
  Intron number 1 from transcript Glyma10g38460.1 (locus Gly ma10g38460) derived from phytozome v7.0 (chr-ID Gm10; pos 46254903 to 46255665 reverse strand)
ccttctgggtatttttttttgtcactttagagtttattaatggtcgtttatgtttttattgatcattctgattgaaatttgttgttaggaatctaatccgttcattttttttttgtttaattattttgtggggatttgctagaatctgttttcagtcttttatgaaatttaaagctgggggagctcaaaactttaattatattaactttttgatctaattcagaagtaattacttggtgtatacatagtttttttttttgtttaccttaattagcgatttagctatttcgcaatagaagtctcattttctttgtttttgaagataaactgatttgggaaggggagaagtgttcttggctaagtcaatttttcgctttttctgtcttttacttgtcaaattcatggtattctgtgcctaacagctgtagtaaatgtctttatcgaatatttatcaaccaagttaagttccttctgggattttgacctgaagtgaggtttcggtgaatggcggtgtaaacaagatcaaatttggtattggtgtttagtaatcttattttgtcaaagtgatcatccctatctcccaaaccagatctttctgaaagagattttttagggtaaacatattctactgatttttgtgggtttgtagcgggattagaacattgttatggctgttgccaagagcaacagcggcagtggacattcaacttcatataattgttacaaagtagcaagcttaaccgaaaccatattagacacgaat

SEQ ID NO: 24477 - DNA, 733 bp, Glycine max
  Intron number 2 from transcript Glyma12g35050.1 (locus Gly ma12g35050) derived from phytozome v7.0 (chr-ID Gm12; pos 38200619 to 38201351)
aagctaacttcagctcttctgcattgaggtgcaaggtaagttaaactaaagctttctgtcttcttcttaattcatcattaagctgtttcttacttatctctgagtatattatggtattttactttatttcctttcagaaggactttatgtttagcaaattatactaatcattgtgagatttttttatattgatactaacctttcagaaggaatacatggtgtaatgtgtttcttggatagcaggggctgtcactataatatataactataagtatataaggagcagcggtgtaatgtttttcaaacaattaaaggggttaatgtaaggataaaaaagataagggtattagagcaaatttaatgaaaccttaggaggtgtttagtataatttgctctttatgttttttgaaaatccaataactaaggtttgtcatgtaaaatggccaaaataatataccaagtacattctagttaatatgtgattccatttttggaacactagaatttataatccttcagcctctaatatttgatggtcgaaagtgggtttttgatctgtatttttgaatcaattcaaagtttaacaacaaacaaaaaacaaagtactgcgtaatcccccccaccctccaaaagaaaaaaaaggtttcagactttcaggggtcattatctaatttgttttgttttccgctctctatcagagggaattcgaacaaaagctctgtgctgtgagggc

SEQ ID NO: 24478 - DNA, 799 bp, Glycine max
  Intron number 1 from transcript Glyma09g30540.1 (locus Gly ma09g30540) derived from phytozome v7.0 (chr-ID Gm09; pos 37355355 to 37356153)
tgctagagcctagaaggaaaaatagcaagcacaaggtgggtttctgtatgctcacactagggttagttgaagttgttaacaagtaaatttaatagtgatttagttagacatcctaaccaaattgaaagagagggagaagtcagaaggtataacatagccatatatataatcgagatgtcaagtccttggagtgatggatgtgtgctagagggaatagttctgtattttcattcatatccttgctgattattacatagccatatatatagcaattcttgctaacagaattgcaccaaatcatgctagggaatattacaataacagaaagcggttaaacttgtctcctagcagcactacacagcaaggtcccactgtcagctcagcctcgaatcagttttccttttgggccttagcagacccgtttcttccttctgcaataccttcttcctatcatcaatccttttgattattttaacatgtgcatgcgaactaggatttgattataatggttatgaaaatgtgaactcttaatacataaaggcgaagcacatatggatttgtcatggacttggctaatacaacattacctgttattctcaagaatgatagactacctaattataatgttttagatgttattgtgtgttgttttcactaataatgtgattctgaaatggaatttgaaatgacattaagttagtgttttctaaagaaagaaaatcacacaataatctatgaagtatgaattttgtttgctgttttcctgatccactgtcccctctccaaatttcaggtggaa

SEQ ID NO: 24479 - DNA, 938 bp, Glycine max
  Intron number 2 from transcript Glyma09g06310.1 (locus Gly ma09g06310) derived from phytozome v7.0 (chr-ID Gm09; pos 5081807 to 5082744)
aggaaatcttcaaacaccaggtatcacatcacatccatgctgcaagatttatcttctcatattaacaatacaaagttcaggttgcaattcactttataccagaaaggttgacatagggtggatcaaaaggcttgctttggttctaaattcatgttctttcctgattgaatgtgtggaaataacacattagtgtcccacattggttgaattaatgaatttgggtcaattggttacaatcctaaaaagttaagtgttgattggtttaagaaaatactttttttaaatataaaagtgttacctaattttactttttctattttctaaaatttacaaatgaaacactaaatttttttttgtttactttttattgtgttcactatatcatgtatgaactctttttaaaaaccaaataccacccacactccaaaaacccagcagaatgggaagcgaagtacttgtccctcttttctatacactggggctttatccgagttttgccgagggagaacccttttttcacggacatgtgatttcaatccaacagaatgagagactttcacctttttaaggacacggtacaataaattgctagtaatgtacaatcattattcttttgactgtgaccatgctgatgtcaaaatcaatgtaataaaatgtcctacattctgttacatctgtactgtatccatggccaaacaatttcaataattctataagccttactaattatttattcaaaattcctaatacacaccatatgcaacattattttgtcgattttgtggagatctcttttcacatcccaatgatatatttttatcgtgtgaaaaaggacaatatggcatgctgaaatttgaagctattactagttggcaattaattattggtgtttggaatttgtaggtgagggaactacaccgggtatacagtgttcaaaa

SEQ ID NO: 24480 - DNA, 947 bp, Glycine max
  Intron number 1 from transcript Glyma10g33010.1 (locus Gly ma10g33010) derived from phytozome v7.0 (chr-ID Gm10; pos 41372265 to 41373211 reverse strand)
cggacattcatatcttcttcgtcctctgaatcaaggtatgttgctttggcttatcttcttatttacttcgagatttatacttttgtgcctcaattcgtgctcctatgtgtgcatttacgtaattgattctcgacatacttctgtctctgacgacgatccgattcggattaaactttcgattttctaatggtttgtgcctcatcatttctgattgtttcgcgtccgatattgtgctccttctgccttcttagaatcctaggggctgaggtttttaggggttttcagctatttaccttaggtttttagggtttttgaaaagggttttcacctcaagcaacgtggtttggcattaagtatttttttaagtgatgctttgttttctctgttgtcttaatttcatgtcagaaaaccagtcaaagtctctgaggatgatgaaaaaatataactttcgttcttccgaattttcgatgaggaaaatacatggagacgacctgaactgaagaggctttttttttcgaactttgtttttttgtataggatagtttgttgtttgcttgcagcttcatgtacagattcccacttttatttgccatacaggttgttagtcctttaattctgatgtctgtccctgctttggaatttgaaaccagtcacattagcctctgaggatgattagaaaaataactttcgtttcctagttgtccatgaggaaaatacatggagacctgaactgaagagacctgttaatgcttttcttttctctttttgtttgtcccgtttcaccctttccttttctcattattctgttatagtatttcttattctctgcaatttatttaatgttttggttcccagttacctagtttcttattttaattcatcatttgatatatatgttttctcttgtttcagtttcgactttatttgagtagttttgctctttcctt

SEQ ID NO: 24481 - DNA, 987 bp, Glycine max
  Intron number 2 from transcript Glyma09g04920.1 (locus Gly ma09g04920) derived from phytozome v7.0 (chr-ID Gm09; pos 3701432 to 3702418 reverse strand)
cgcagttattgcagcaaacaatcaccacggtctgtgtaagattaatccttgctgttcaacataacttcacattatgctcaataagtggaacctagtgtgtcttgaagttccaatggtttgaggaagaaattcaaactaaaaccagaaaatgcaatgttgttttctgtgacatagataaatgattagatttagccatttaggcatttagcaaatttcaagtttctatttgagggggacatgtagccaaagtaatgctggtaaatactcatgttaacttaattatgagaatgagagttccaaaaccaaagagattccctcacacacatttcaactaaaacaggcaaaaagtatggagtaaaaatgtaaaccacatgaagtctagaacttgagagctagacttaggggctatgttaggattgatggaaaggggtggaatagaatgatactaggttcaattgtttgaattgtttaaaataggatggaatgtaatggaatttcatttcatctaatacctctttttttcttgctctgcaatttgggggtatggaatgaaaccacttttttttttttttcattccattgcaaatatatccaaacaattgaatggtgagtctattccattccactcaccattaggtaattaatataacagttccatctaaaagcatctttttaacaatactattccaaagacaaaatggttaggtttgaggagtaacaataaaattgcagttaattttaatggtgaattaggttgaaatatgttaaacatttagtgaatataataaaataagttcagtcataatccatagttgttttttttcctaataattaatgacaaaatacagataaagaggagaacgtagtgatatcattggcaagaaacacataactgacataagatactgtttgatttgttgaagtaagacaatggatttttagaatgttactgtatcatctaaaaataagttactattgcgaacaggg

SEQ ID NO: 24482 - DNA, 429 bp, Glycine max
  Intron number 2 from transcript Glyma09g37250.1 (locus Gly ma09g37250) derived from phytozome v7.0 (chr-ID Gm09; pos 42754922 to 42755350)
ccgaaaaaattgtttttaccgcacctttccggaatgtagtttaaaaaagctgcagaaagtaattttggtgtgcaagaagcaactgccaactctatatcatgcttaagcttttgaatgggaagctcaagaattcgtcgtcatgcataattaaaaaacttctggtggtggtaattgaacgataaattttacattgaatttcaaaattcttattatatgttcaaaaactggttcctcttcctataaaactggtttgataattctcaaaataacagtaaaatgagcagatacagaagggaaaattgcagcaagcaggtgcaatggctgagagaaaaacgagtgcatatcatgcagtctataactaatttatttagttttgtctgaataatacttacagttatagtaagcaattaaaaggtgaaaatttcaggc

SEQ ID NO: 24483 - DNA, 865 bp, Glycine max
  Intron number 1 from transcript Glyma11g35100.1 (locus Gly ma11g35100) derived from phytozome v7.0 (chr-ID Gm11; pos 36841013 to 36841877)
ttgcagatcctctcgtgacaatagcatctctcgtccctttccatctctctctctctcttcaattcaattctttctttctttctatcttttttctcaactgagttttcggctctttattggattcggggcgcttctcgtttcccccgtcaatttctttcgttttctgacagttcccttcccccaattgaagaagtggttggttttgttgatagaaacaaagaagaatcttctgcggaaaacgatggtgtttagttttttttttttttaatttaaacgtaaatgtgtccatcaaattcgctttgcgtagtttgttaatcactttatcttgccatgactatgtgagcttagactatgaatggttctcatttattgttttcaaaggtcctttgttgttggtggactcataaggtggactaagcctgcaaaatcataaattccccaagcatttgttttttgtttttttgttcactaaatttagttttattgtctagtaatgttatgtgatcgattgtctcaaagcccctataacaacaagtcaacaacaataatagtcttatcccactaggacagggaccctgaaacagctaatttgattgttaacatttgtgttattgatatacattttgtgactgtgaatttgcacttgtgttatggccgtcgtgctaaatgaatgagggggcatatgatctacatacatacatgtcttctaaagcttaatgatagcatcgagttgttaatgcttaaatgggattaaatgtcgtttttctctatgttttgattgttttcttgccgaatcaggacttgcattaatgtaatgaatcagttttctaattagtttgtgttttttttccctcttgtcataggc

SEQ ID NO: 24484 - DNA, 585 bp, Glycine max
  Intron number 4 from transcript Glyma12g30310.1 (locus Gly ma12g30310) derived from phytozome v7.0 (chr-ID Gm12; pos 33935855 to 33936439 reverse strand)
aggtaagtgactgataattatttctataatgttcctccaaatgccttggcaatgtctcctttgttatgtcacaaataaaaacagacggtccaagcaaggtatggtttagaatttgatttttgaggtcatcaatgttgatgcaattttggaactgcataatccctttgaaaatgctacttctactctttccttttgttttaacctacaatctacagatctgaggtctagtcttaaagcaagcagttcactattttaaattatattagaaataaactttaactgaaacatatagtatgtttggtaacatgttgatttgcactgaacatggtttcccaaagcaacaaatttaacatgtttttacagtaaatgtggatcccctacatgttaccaaacacctacataatatcagtattaccacctaatattttacgaagtccattgatcgatcatttagaagaatgcggagggtattatagaaagcaagtccaatcttccatttcacttaaatatatgaatgtagaattacaggggtaatgttaattcctttcaggatcctgtttgtgggagtgcacattgtgcattggc

SEQ ID NO: 24485 - DNA, 475 bp, Glycine max
  Intron number 1 from transcript Glyma09g22260.1 (locus Gly ma09g22260) derived from phytozome v7.0 (chr-ID Gm09; pos 27431569 to 27432043)
actcacttcgcgacccaccgtaagtgctctctcactgcttttttttttttttaaaaaaaaaaaactgtttttacaaattgaagagattacgaattgtttcactgtaatatgcttttattattatccaaacgcggttataggtttttttcgatactgcaatgtcggaatactttttattctacaaaataaattgtcgtaattataggtttttttacagcgtttttgttttcttaatcacttattgtacttagttctgaatgattgttttccgattcaaacctttttttatttatttttcttagctcagtgattttattaactacaaaatgtctggtgttttttgaaggtttcttacaatgagtagggttttcctgtgatgggtttaggtttttgtgtttttcagattcttactttttcaacgtttgaatgattgatttcaggaacaagacgcagaaacgcgtacacgccctgaatc

SEQ ID NO: 24486 - DNA, 988 bp, Glycine max
  Intron number 1 from transcript Glyma11g12080.1 (locus Gly ma11g12080) derived from phytozome v7.0 (chr-ID Gm11; pos 8623067 to 8624054)
tttccataattcccagcccctgtttgtctctggaggtaccttatctgcaaccctccttatgtttctgtatctgtaatttctgatccgttagttgtgtatcctttattgttttttggtctgcgtatatctgaatgagggcacttatttacaaccattctcatgcttctgtatctataatttactatctcgaattccctatgcactgcttgtattctgatctgttagttgtgtattctttattgttgttggtctgcgtatatctgaatgagggaacttatttatgttctaaatctgcattcgtggcaaaatgtgagtcacgttggacacatctgaactccactagaatccggttaaagctttccagtttatgtagatttgtgtttgaaagaagtgatactctgtctagatctgccatgctgaacgaatgaaagtatgaaactagaattatgtgtgtgatgcttcatatttgggtgtccttttggagagtaattttatttttggaaggccttctggagagtaattagctgcggtaatataaatatttaatgcttcttttgtatcttctgattgtattatctcttcacctttgttctttgcttgtcccaggttgatgaaagaagattataccatgagcagtaagaatgggggatttgcatttatgttttcaagatttatttgtgctgtattttttatttgaaaagccaaaaagatttgtttggtgtagttgaaatgctctggatctggaaattagtaactaatatgaatatgatttttttagacaaagcagtgctgcatggcatcttgttgttctaatggttgggtttcaatatgattttccaaaagtttcatttgtcacttggggtggagaagattttgatgtgttatgtacattggtataataagttatttattgtccatgtggaaggggagggctttgctttatacaatttacagcttattgactatatattgtttcttgggacagggg

SEQ ID NO: 24487 - DNA, 596 bp, Glycine max
  Intron number 1 from transcript Glyma10g26750.1 (locus Gly ma10g26750) derived from phytozome v7.0 (chr-ID Gm10; pos 35196034 to 35196629)
tcgttgccgtcgttgcatatccctcctccagacccgtgagtttcctctcgctctctctcaacgtttttgtttcctttaaattctgtttgcacgaagcattttataagtttccaaatgaactagaaatttcagacaaattaaattacagcaaatcaatagatatcatgtgcacacttgtttcaaattaaatgaaaatgatcatagatgaagtactaaaaacatatattgaagttctgtaacctaatttaatttagttgttctgtgtgaaattcttcgatttctgttttttgggggaatgtgtcttggtccctgtacttttggtcaaacttggttttagaccctatgaaatcagtcgtccaacttttgaaaatatgtgattttgtcactaatgttgttagtggagtttcaaaagttggaggacaattttaattgatttgaaaatacaaggctaaaactaatcttaatcaaaagtataaggacaaaagcacatttctccctttttttgatagaaaaaaaatgtttcatttctttcatttgcattttctgcatgattttgtcagtgaaactttgggtttttgcatggttttcagagcaaa

SEQ ID NO: 24488 - DNA, 1002 bp, Glycine max
  Intron number 2 from transcript Glyma10g26750.1 (locus Gly ma10g26750) derived from phytozome v7.0 (chr-ID Gm10; pos 35196825 to 35197826)
cagcaaccacattgcttggctgtaccatgtacttttcctaactattctacaatgtgaataaaatatgattgtgatggaattttgtttcctagggtcattttgctgttttaataagtttttatatgaaaactatggaaggaaatatgagtatcagattggggccggatagggttagtttttagttagtgattgctattatgcgatgcggtaagattgttaagattaaagctgctgctagcttactaggagtgatacttgtatggtgatttatgtattttaattatctattaatttgaacaatcattgcttgacttgggaaaatttgagcaccaaaattagtgtaatctatgcttaatcattgaattctgtcaaagaagtcttctttggataccatgttttgttgagtcagcatctttgatgggattgaaaccacctatactctttgttcccttctctgtctctccatttaaaaactgacacattactaaagaattaatctctcttgaataataatattctctaggttgttagttttctctactaagttgttattttttgttggagggactgtgaaggggacataaaaaggagacaggtgatttgattccctttgcatgaggggattttctttggaggctcctgtttgccatttgatgatgattacttcgttggctgtctagagcttctgccagactttttgagcccttaggacttggatatcttattttcttgattcactccttaaattaagatttgttttatgctcaccactccattgttttgggccattttacactaattgctatatgtcattgcagatttgatatttttattttggtcatggccatggtcatggaatttattaaaaaagttatagggtatttttaagtcatgattcttgatttccaattttctgagcatatctatccttagagtttgttttcagttcatattcaattaaatcccaagtatatatattatttgtttaatgccatcttgcag

SEQ ID NO: 24489 - DNA, 501 bp, Glycine max
  Intron number 1 from transcript Glyma10g35460.1 (locus Gly ma10g35460) derived from phytozome v7.0 (chr-ID Gm10; pos 43662182 to 43662682)
gaggtaaataatcctataataaaatctttcatttatcaaccagcacgtgtaacatgattaacagataacctcgtctcgtaagcatgtggtgaggattttgattgcaggctacagtctgaatgaaataatattttttagaagagatcaacgtcttaaatgcatctcaaaagggtcatttttcatgactgtttgtcacatagtcacaaatgttatttttcatattttgctttttgtttttattaatgtaaggaatgtttcctcaatttctataatttattggttttaccatgtttgatggtggataacattttaaggaggttttggattaatttatgtttttataattgctttcgtaatatttcacgtgactgatatgctgttcttagaatttaataacaaaaaaaaaactctacaaattcccattattgtcaattgtggtgaatgaaggagttttattaattttcaggagccaattaggagtgcaataatagactcctgcat

SEQ ID NO: 24490 - DNA, 976 bp, Glycine max
  Intron number 2 from transcript Glyma11g33170.1 (locus Gly ma11g33170) derived from phytozome v7.0 (chr-ID Gm11; pos 34941409 to 34942384)
aagaacttattaagaaaggttcattttttttcttgttgctttatctcttttggaaccataatatggttttgataactagacgggtccggtcctggacaggccaatcagatagtgtccaagcatctgaactggattgaccgaaaacagcagacttgagattggactggcccatgatcagtttattagaacaggctcagtctaaaatttaaaattagtgctgaagtttaggactataatgccagaattatggtccatttgctaactaaacctcaaaagcttcattaggtccttgcttaaattaaaatgtccacagtttatgcatggctggtcctaacccttgtcttcttccccttaaaaaactacttttgtatttcttttttgttatgttgtgacacactattcttgttaatgattaatagtaagaacatagtaaggagaaaacaaccttagttttttgaagatcactttgatgcacatattgattattttataatgttttccatgtgatccagttcaactgccaaatgccatttaaacaagtaacggctaaacttaccaatttagggggtgtttggtttagaggatggaaatagagaagatagaaatgaaatataaatttttttaattaaagtagagtgtaagagatgtaggagccacatggggtccacacaatttcttctctatttctctcctctccccttcaaccaatcacacccttaatgatcaattcagttgtttaaacattgctttatattttctccctctttagttcttgtagttgttactttcaatatggttttaaggttgaacaaacttccttattgtggaatgtttgtttcaaatataaatgtgctgaaagaagtttcacaagtagattgtagaatattttttgatcctggataacgatttgctgctataagaagatattttcattattgcagagattgaacagcttctggaaccggaagaaagagca

SEQ ID NO: 24491 - DNA, 783 bp, Glycine max
  Intron number 3 from transcript Glyma09g00670.1 (locus Gly ma09g00670) derived from phytozome v7.0 (chr-ID Gm09; pos 350084 to 350866)
gagaaatttgggaacgacatcgctattgcatttaggtagattcttaattttacattttcgtgctttggttgcatgatgttttgtttgtcggttttttttccatacatgggaaagaaattttatgtcggtgttgcatgagcgtatgaatttttcttttgaattttaccttcaagcgtgttctcatggcccaaattattggtgagggaagattttcaaatgttccgcaggtgttttcaaaaactaatgtcacgttcatagcttctagtagatagtgacgtaggggaacatgagacaaataatttctaacttgctcttgtaaagagaaatgttatatatttttacaaataattttaaagaaagtattcaatgaaaagtgaatatgtctatatttaatgtgttgaaaacaaaaaaatattacaaagcaagtaaggagattaataagagaatacatggaaaatattaaactaattgtttaatgttttcgtgggtcactcggtgaaaatgcaaaatcaatatgaaatttgctgaatcgatcggtagaaatacaagaacgatgaagttcaaatataactgacaattaatttttgttccgtttgtattatgttgtgtaattcgtttgttttgcttgtgggtttttattcattaacacgtttaattgtcaattgtattttgaaaattgtaacttgaattttgtgtgactctgactaactagaaagcaagtgctatgatatctatctggatttgaattttaatgagtacttttatcttgcagtggtgctgaag

SEQ ID NO: 24492 - DNA, 709 bp, Glycine max
  Intron number 1 from transcript Glyma11g13050.1 (locus Gly ma11g13050) derived from phytozome v7.0 (chr-ID Gm11; pos 9308158 to 9308866)
gcaattcttcaggttactttcatttcttttcaattttcattaatagaaaagcattccatgttcctatgtgtcaaaaagaactcaaatcattctttgcatttcacgcagttttattttagacgttaacagatccaaaaacaaaaaaagaattagatgttaagctaattcatttcctgaattctacttacatcttttagaaataattttgatgttaaataaaataaaaagatgtttatttaagattaaaaaatagatgttaagttaaattatggataactatatttgatgttaaattaaaaaagacttttaaaaaataacaaatggttcatgcaggtcttgaacctacacgttattaatatgatgttctaaccaattgaactaatagatcaatttttacatattttaaactcttttttttattaaataagagttattgataaacaatcaaagattgaaataatttttttattgataaataattttatccaaacgcaaacgcgaattgataaaatccaaattattgttaaaaatatccaaaattattttatccaaacgcgaataacgcaagtaacaaatgtaatctctctaatgaagattgaattcgaagtcgtacaatgagttgtagttgtagtggggtttggaaatcattcttagcagtttcgatgattccctatgcagggacacgacaacgaggtgccccagcaaccca

SEQ ID NO: 24493 - DNA, 665 bp, Glycine max
  Intron number 2 from transcript Glyma11g13050.1 (locus Gly ma11g13050) derived from phytozome v7.0 (chr-ID Gm11; pos 9308870 to 9309534)
ctgggtcggcgtcaaaaatccgattccaaggtaccaactttttaatgtgtttttgtttcttccatcatttcttacttacagtgttacagtagcttggcaattctagtttagactttatttgtcgcatatcatttttttgtagttttgctccttatgtgttatttattgataaaatattttttcttaaatataataatttagtagtagtatatatttggataaatagttaaattcgtgtgtgatgtaataataaattgatctttataatataaaaaacacaaatttaatatgtaaaaaaaatacgataatctaataattaatttatcatactttttacactttttagaaacaaatttgattatttatcttatatattttatattttatgggtaaatgaccttttatctcaaaaatgtataagaatgtgaatttagtttataaaagaaagaaattcctgttttaaacttttactatttgaatatgtaaaaagtagaataataattatgttgtgtcttactataacctgttaaattaatccctcaactttacactttaatactaatccaattgtcaaatttatctttgtacactaaggcttatgaacatagcatgcattaagtacactatgtgaacattgaactgaatttgcaggtgggtccctatca

SEQ ID NO: 24494 - DNA, 676 bp, Glycine max
  Intron number 3 from transcript Glyma12g04730.1 (locus Gly ma12g04730) derived from phytozome v7.0 (chr-ID Gm12; pos 3131892 to 3132567 reverse strand)
tcaaagatcttcttcttcagatacaacaggggctggtatgtatactaatatgaataattttgtcagtaaacttcttaggtacattgagaggaagcaatttgaagaaaaaccgagtttttttttttctttcttgggcagggagggggttttcacttatgttctattcatttaggaacagtaggaacttttatgataattgaggaggcgaattgttgagatataccaagctatgtaaaattattcattgggtagacagcagggtagtctcgttagttggtatcatccactttttaaatggagtgttttggctatttgcacacaaggtagaacttgagtttgaaataatacttttggaaaaatagcaaggttttatatagagcatcagactcaactcaacgtatgagactgttacaggaagtgggaaggggggatttgatttgagatcactttagttatgaggtgtacctggactctactctgaatgatgtgaaggtgaaaaccgtcctttatttgtttggaggggctattattgttgacctttttagttcctcctttctaattttttatgggttgtttatcgttttctttagcagttttccctatgaaattttcatgtctcattagaaattttgtaaatgcagaacattggttcagacgagatcaaagcactcaaagt

SEQ ID NO: 24495 - DNA, 547 bp, Glycine max
  Intron number 1 from transcript Glyma10g28810.1 (locus Gly ma10g28810) derived from phytozome v7.0 (chr-ID Gm10; pos 37673963 to 37674509)
cctttccctcccagattttcttccataggggctaggtattgttcttgtctttcttctctttcactttttttttttgttttcggtattctctagaattattagtgtttgtttgtcacctttgattctggttgttaattgttatcactaggaaaaaatttggtgtggttggtctctttctttacagtgtgtggttgattctgctttgtttattcctttcttggtggtttggttttctcttgtttgtgtttttcattttgaaatttgaaaagctggacatgtttttattgtagctgtttattctgtgaatgttttcgttttcggtttcaatgtgcttccattttggctttcggatgttactgagtctgtcctttggatcctggctttgttgttgcattcttatttgtctttgtttgactttcttttttggttgactaattagggctttttggttttttgctggttgatttcgagtttctttgttggatattttggcttggtttgttctaaatttgactacattttggtttcgtttttggaattgcaggaa

SEQ ID NO: 24496 - DNA, 742 bp, Glycine max
  Intron number 2 from transcript Glyma10g28810.1 (locus Gly ma10g28810) derived from phytozome v7.0 (chr-ID Gm10; pos 37674610 to 37675351)
gaaaactgcttgctgatattttccccaagtcccctgtacgtgtcttgtctccctttttcattgaaaattgaaatagttttttttttatttttaaatcagcatgaaaatggaaatattaacctcattcaactcttttgtttaccaccattgcagctgttttagctaatgaatctttttttctccagtatgacctcttagaaaaaaaatttgttgtggaaatctagcatttgtagtgccataatgccattatttggacattggaaggagaaaaataatttcctttttctgaagagaaaaaagggaaacttcttgttacttctgtgcattgctatgggtttattgtttggtcaaaacttatatacagttccttaggttcttttggtgcttttctgcaattagaattgaagtttcaccgccataatctacgtaataaacttctgcattaaagtcaacataaattactcagttgaaactccaattttgattgaagaaaagcaactaaggaactgtatctaagtttcatccttattgttttcagttatcccttgttctcaatggaaagaaaaattctgattctcgtaaaccgagcaagcttgttggtgaatcaatatacttgattatatggctatatcttttcactttacactcatttgtacatgaagtagaaccccatgcccagttttcatgttttaatttattcttctcaggacgagcctccaagtgaaagaaagattatcaaatt

SEQ ID NO: 24497 - DNA, 694 bp, Glycine max
  Intron number 2 from transcript Glyma12g17680.1 (locus Gly ma12g17680) derived from phytozome v7.0 (chr-ID Gm12; pos 17869941 to 17870634 reverse strand)
gcaggcaagtttatttatgttaatttgattggaatatacaatttatatgattattcaatgataaattttcatataattcataattttgaatttttgtagtgcttaccttaaaaattatattaagggttcagagttagattattatgtaattggtttcaatctcatagttatagtgttgggatgctgaaagctacactatcagtctatcaatatactcctaaggaaacaccattaaagactaaagaaagttatgaagaagataaaagaataactgagatatttttcattgatgatgattcaaagcaacagtactcttttaaatacaaactaagacctagcatgaagtggactacaaagaatacccaatatatatagctgtgccactttaggaaaaataacaaataataaagttaaataataactaaggcccaaatggagatgcttggtcaacctcctatcaaatagccacttttcacaaggttatgttaaactttctcttcatggcgatcatattttgcaatggttcctgacacctcagaacctatttttgtcctcaatctctgttctttaaatctctgttcttccaatgaaatcatgtaacaagctacttaccaaagatgtttaagttgtttgtaaaaatttgctgtgtacatgagcaggtagctgagatattgccagaagaggttcttggcaa

SEQ ID NO: 24498 - DNA, 718 bp, Glycine max
  Intron number 1 from transcript Glyma10g01520.1 (locus Gly ma10g01520) derived from phytozome v7.0 (chr-ID Gm10; pos 1113270 to 1113987)
tttccggtaagaaaagaagaggaaaaaaaatacatttctaatggaggaaaccccactttagtccctgattttaccgaccattgttatagtattagtttatgaaattagaaaaatgttattaaatgaattcctgatatagatgcaaatgcaatcataccactggatcgaaccggaagcttgtttggacgatagtaatactaggatagataaccttccgagaagtactcatgttgttacacctatcttgaaaaaaaaaaatccagaaattaaaatccgtcagtgacattagtctctgtcgttagctttgttaagaactataatgatgctaactacaaagggtgtatttggatttccgttcaacacaaacagacggacggacgttcatctcaatccatacttcttcgttcaactgacttggaattcgtgcaaaccataaaccgaacacagactaagttataaaatttagggactataatgatgataaattgtgcatttcagggactaaaataatagcaatgtcagtttaagggatttatttgatattttactaatttgaggaattactatgccagcgtctcctaaaatgggggtttgctcagttctaatgctattgtgtgttacttgaattgtaatgtgcttttttaaattttaattggtgaattagtttcaaagtaaggcattatctctctgtgttgtgccagattgttgcaaacaagac

SEQ ID NO: 24499 - DNA, 817 bp, Glycine max
  Intron number 1 from transcript Glyma11g05960.1 (locus Gly ma11g05960) derived from phytozome v7.0 (chr-ID Gm11; pos 4198887 to 4199703)
ggatttctggttcttggtaagttttaatttgaaacttgtacggtttcttctaattgttaatgttttggcatgggatacctgactggttttagtttatgatttatagatttgggtactaatagaccataaaaaaccaaattatttagcttcaacttactactgtgttgtgtgttcatccaagcgtcttgtttggtgacaatgttgtggtaaaacagaaactttaaaatttgactgcatcaaatgaatggttggcttattcagaggtgccactgcagcacaaattgggataattatgctattgtttctagtaaaaaactaatactaacatgttttccagtgggattgattaaaatatttagtctttatacattgcatgagtctggttaacatgtattttctgtttcatttgccacaaactacacttgaaaaatttgttcaatactctttgagataattcaggggtttggtgtagttgtgacaacctattagaagtgctagatagtaagttccacgcaagaactgaagtaattgcaggcagaatgataaagaaacctcacccgatgagtatattcatttagcgtcttaaaaataggataaagcaggttgcacaatatatatgcacagggttgttcttttagtgtaaagcagtactatttctttctcaaataggaatcttgcttcctaaatattttatatagttgaagacattttttaaggtttactttatgaaatttttagcatgtactatgcctaccatgaattgatacatagtttggtattaggtacatcaagtttgatacattcactcctgcagcag

SEQ ID NO: 24500 - DNA, 915 bp, Glycine max
  Intron number 3 from transcript Glyma09g08090.1 (locus Gly ma09g08090) derived from phytozome v7.0 (chr-ID Gm09; pos 7125519 to 7126433 reverse strand)
ttctgcttttgctgttgacaggtttggaactgtcctcaattagggttttcttgattgttatctctagataagctagcgtgtttactgaatgtgtaaaataaatcaatgccttttaagcttgtttaaacactctttctttacttattgtgctaagttttgctgctgttgtctccactgagatcttcagaagaatgctaaaatttccttgttatgtcatggctactaaccagtgcctagttgtaatttagcttttttcctaatgagtgattttatatggtgtaaaattgtatttctggctttttggaaatataatggtgaaaatcaaactttaaacactatggattttttgagagaggagttagtgataaggagaaaaattatatgacttcacaagtaattttcactacagccattttttctgggatgaatttgatgactactttagaggatggcttggcaaagtggaaataaatatgagaactacaacttaacttccctttgtgccccctcccccaaggaaagaatagttaggccaagatccatcactgcttgctgcatgcttcactttgagtcccttgatgttttaggaagcccaaatcagatctctatagaatactggaaatttttatgtattaacacagcattagtagttaaaattaattttcaatttagccatcttgaggtttgttaatagaatccaaactcgagtgcagacattattattatgtatgtataaagttaacaatacttcgtgtagctaaataaatattagtttacttttactaagcattattataacctataagcttctgctacttatacttaatattcagtgcctacagttttattatgtttaaatgccatatttttactgtttcaggaatctttcaacaatacctggtttatcaagtgcag

SEQ ID NO: 24501 - DNA, 485 bp, Glycine max
  Intron number 3 from transcript Glyma10g43480.1 (locus Gly ma10g43480) derived from phytozome v7.0 (chr-ID Gm10; pos 50157623 to 50158107)
gaagttttcaccatccttttacttcttaaagctaggtatgttcttttaatgcatgcttgcgttgcatctgtcttgattcttgacttgttggctttacatgtattgttaataagattatcacttggaatttgtcctagctttggaggcatttaagaagagttttaagattaatttggtttgtatcccatggtatcaaagtgtataagtttgctaaacggtcagtgtgaagatttttacactgtcagcccattagaaattgtgcttgatataactttaaaagtaagtattataaaagtcaacaatcttacaataaatgcttatgatacttccaaacagtctttcattgctagcatatttgactttggaaagtttacacccatttgcagtggtgcttttcttttttttcttttgaaaacttacatatccttttatttttctgtaatttcacagatacccagctaatattacccttttacgtggaaatc

SEQ ID NO: 24502 - DNA, 895 bp, Glycine max
  Intron number 3 from transcript Glyma12g06710.1 (locus Gly ma12g06710) derived from phytozome v7.0 (chr-ID Gm12; pos 4569575 to 4570469 reverse strand)
ctgaggtaatttcattttctctgtaattctatattaacttgttcttgtctcacttgcctgtgttgtgatcccaccttcatgtcaatttaccgttatcttgcttgctcacttcctttgatatcctcaattgtttttagaatgcattgctagactatgtatttccacttctgggttcttcccctctgtttggtacagtagaaagaaattaaagggaacagataagattgaaaattgaattgaatagaaaatagaaggaaacaaaaattaagaccttgtttatttattgttttaaaaaatagattcctgttttctaaaatttgtttgtcgcttgatacatttgaaggtgtttgttccctgagtacatttctgttgtgttttctagaagtctatcttctgagcacttgaacaatagtactataagaaaacataagaagtgaatgataaaacatcttccagctgtttctgttttttggttttcaaaacgcttatcttggatgtaattttcaaaacttaattgattttggatgagaaactaatttctgggtagtgtagaattattttagaaaacagttttttaaatcaaaaaaagtgagaatggaataataaaaaatggtttttaaaagtcaacatttctttttcttttgttttcaaccaaataaaagaaaatgcattgccatttgtgttttcttcctctcattcaaacatatcattatgtggctcaaaaatttaggtttgtgcgccatatgatgatgtatttctattatgttgaatgtctgtagttactacatgtttatcttgtagaatgttcagggctccctgccttgtgctccattttttttgtttttttttctctagaatattgagtgatgtggtcgtagggcaggaagatctgtct

SEQ ID NO: 24503 - DNA, 636 bp, Glycine max
  Intron number 2 from transcript Glyma08g45200.1 (locus Gly ma08g45200) derived from phytozome v7.0 (chr-ID Gm08; pos 44617425 to 44618060)
tctctctcaaggacaagctccagaagccgttcaaggtaggaatttttttcctctgtaaatgattgtaaaaagatttctcattgaatattaattggtatagaagaatcataagattatgcgatgaaaatagccagacatttatcatgatgtatggtgttcaatccattgtagtttttacttttaaattaggaattgagaagacaattaagccataggtaagtctcaaacagtgagtgactgtgaaaactcccttttagtaaaaaagtgaaacagcaatggaatagtcaagtgaggttcaactagtagtattccttccttcatttgcttttcatctaacaatatttgacttcagtttcattgacgggaattggtgaaagaaaagtgaaaaacaattaattgttgaatcatgtgactcatattggtgatatggaatcatattttgtatggtatgatactatgattcaaagccatttgtgatttcttgtgatatgacgaataagttgctgcatcatattgaatcccattgaggattgtgtgattctaacagtaactgtgggaacctttgcattttcattatctgattatgtattcgtgtttaatttgttttcttctggtaatttaggagtttatcaagag

SEQ ID NO: 24504 - DNA, 1067 bp, Glycine max
  Intron number 2 from transcript Glyma12g02070.1 (locus Gly ma12g02070) derived from phytozome v7.0 (chr-ID Gm12; pos 1272718 to 1273784 reverse strand)
tctgaaagctattccgtctctgctgcaattctcccgtgagtattagcttttaattatttttttgttaatttaatgcattgcttaggaaatctatcagtcttcgttgtatttcaaaacatacaaatacaatagatacctacataaagacaagcttttagcttggactagctctgttaaaggactttaatttttgtagactgtaagttgtgttatgttgaggactataatttcttgattgatgtcatgttgagcatgtttactgggtagaaaaatgtgttagatgttactcttgaaggttaggctgaggatggctgttgcacgttgcattttgctagggaaggtgtgattactctttttttttacatcacagatttatgtctcatccaccattagagctgtttgatttgtagagtcctatgtccttttggaaatatttagctacatatttagataaagaagcttgtcatatttggtttcttagtaaatttccatgaaatactaatattttatttttaactattgttgtggtggtgagggtgaaggtgtaggcagcatgacaatgaattgctcccaaggttataatagatgaggattagtttccttcattttaaagaaaattgattctcgtggaattcaaattcttgaatagagcaaatagtatataccttttgaatagttctttttcttggaaatcatttgatgtccacatacctattccactttgagcttttagttaccctcatgccttatcaaaataataaattagctgcataacttgctataggattgaattttgtgaatatatcttgtaatttttttgtctttctttataatttttctgcttgacattgatgaaacaatttgacaacttcaattaagaaaaatggcattatttcacgttatgcccccattgattttctgattatgagtcttgaattgatagtgtgattcattttccttgagtggaaaagaagaagaataaaagatgtctatgcctgtagtcttacctaaaatacgttttaaaaatctcagatttctcttcccagctttgggtggcctactatttg

SEQ ID NO: 24505 - DNA, 853 bp, Glycine max
  Intron number 1 from transcript Glyma12g02070.1 (locus Gly ma12g02070) derived from phytozome v7.0 (chr-ID Gm12; pos 1273813 to 1274665 reverse strand)
gcatttgatcccgtgcaacccgtcgcaaaggttcttttcttatcacttttttttttttattatatcttcttcttctttgggctggaattgatcagcatctaccctgaatttgaattatatgaatatatatccttttagtatgtgtagactttgtttggtttctgagaggaaaaaaaaactattgggagggaaggaaactgatgaaattcagaaagaaaagaaaaagggctgaaaaaatgagctaaaagaaaacaagctgaacattaggggttctggcattcatgctctcaaattggcatacacttggtgttcgattccgtccgtatgccaatttccttggaccaacgataaccacacaccacgagcaggattaatctatgaccattgagggacacccgttgtctctgaactctaaagtatacgatttgtcaagtcttggattaccgcaagcacattacaaagcagttttgctgttgttttccattgttcttttttcgctgaatattttgttgagagagcgtcaatagaaataacagaattgaaattatcaattttttttataattgtacttgcttgcctatcagctaattttttttaatgaaatcagagaattatgcgcatttagctcttgattatttatttattttgtctctataaaaaaatgaaataagaataggctgaatgcttgcagtcagatactgtcacactaacacatgcagagctgtgtgttgttttactggcaaccaaactaatttgttgctatcttttggtgtttattttccctttcataacgcttgaaacacattgactttcactagaaagcaaggtcaggtggtgagattgtgagtgcaag

SEQ ID NO: 24506 - DNA, 1056 bp, Glycine max
  Intron number 1 from transcript Glyma08g45850.1 (locus Gly ma08g45850) derived from phytozome v7.0 (chr-ID Gm08; pos 45116143 to 45117198)
cacctgaaatctcactacaagaaaacctctcacctgtatgttatacttcttagctccctcatttaatttgtatgttctttcaatttcaattgatgtgctgtgtgtagttcttgaattcccaaaactatgtgttgcttaatatttgctgttccgtttctaatgtgtgagcaagattgaaaaagagagtacttcggaacttgattttctttttattgtgttattttaagaagtttgcatgtctactaacgaagacagaattctcaaatgttaatcttcatatatattctttttcatgacttaaaatatgttttttgagttgacaaaaaaaaaagcatgttaattgtttatgaaatatagtcgtattttggttcatgtatttttttttattattttgttttaatccttttattatagttattttttcattttaattcatacgtaaattattttcttttagtctctatcaaatattttttaaattaactaattgaacaaaattttataagcattgaaacaaaacaaatatatattgaaagactaaaataaaataatatcaccaaacatctcaaaaaatgagaaattattatataatacttaactttttcacttttatatagagattatctcacacttactccaacaagctggttaattaattcaaaatcacatatatagattaaacgtaaatagttacttttaacagatctgagtcacctcattttcacaagaacttgataatctcatgttacatgtgtaaaatcggttgttccctgcaggagcagtgctggttccttcctagaaaatgtctttcttttatatcatatattgaccttttcaatcacccgagtactagtaattggtaatcacttttaatcttttataatcacatgacatactgtaaattagttttcaattgtgcaacactttatgatcgcatgatagtgcaattaaataaaaaatactgtatgatctttttgcctgttataatgaagtaatttgccactgactctgtgtgtgccagctccagcaaaaagtgaaaaagtacaacagaacaag

SEQ ID NO: 24507 - DNA, 606 bp, Glycine max
  Intron number 1 from transcript Glyma11g19750.2 (locus Gly ma11g19750) derived from phytozome v7.0 (chr-ID Gm11; pos 16529994 to 16530599 reverse strand)
tcctttacttcaaaatcaaaagctcagcttcaccggtacgttccttttcacgcttcaatgtttctgttaaattgcaatctcttaaaaacgcgtgctgttttgtttttttgtgttcctttgctgaattgaatcctctggattcaattttgtttgcttgtgcttctctttcctggtcggatatttgtgtatttagcaatgcgaatttgaattccgtttggaattattttaatttatttcctctgtggcgcgtttgtgttttctgagcgaaatggtgagaaatgaattttcgaatttccttttccggagtcgaaatgacgaaccccggggcggtgagccgaatggccgcgttttgctgaggttcgctgaaattgtggaatctgagaaattttccgttcaggtgtttttagtgtagctatttataatttttatttatttatttggcatgttcctaatatatgtttttgttttttttattctgatgttatggttgcgaacttcgattgtgactttgaataaaggaacgtaaattgatttttattgtttttcttccgttttttttttcttggtgcaggactaagtgtaggtagcggtgataccttcaattgg

SEQ ID NO: 24508 - DNA, 986 bp, Glycine max
  Intron number 1 from transcript Glyma09g39290.1 (locus Gly ma09g39290) derived from phytozome v7.0 (chr-ID Gm09; pos 44410565 to 44411550)
gcattggacctacaaggacacagtcaaaggtaagctttactgtgcagatgttacttctatccaaaagaaatatgaatattcaaagtatgtttcgtcactgttggaaaagttcgttatcctttgcatgctatcttgtaaatacatttatacactaggagggctgatataatgttggcgaagttactacctttttgcaatactgtgcttaactaaataaactgttttttttttttgttttttaattatgatttggtggtgggtttcatttgttacttttaccggttgattgacaattcagttgacaacatttttaagttttaatcaatattattgtgatctaaatcttctaaaatagtaatattattaataaatagttaaatgcacaatccaatccgtgattaattgaagtttctgaaaataatactttaaatattaatatattgtttggctaaagaagatattgtgattattatttaattttttttattgccataatgatagaattttcagccaatgatttctgttcttcaagtgagtcttctttgggataagataattctcatgcttcaatgtgggcttatacttgtgattcttttcttaaggggttgcaaacttttttcattagggacttagcatttgaaccaaatttaattgtgtcattcacatgaaagattgttcatttagtacatataaatccactttctttctttcaaagctagtggaaagattctaaatttaaaaacttagaaagtgggttttaaggctgagagaatacattgcaatttccagaaatggtgtagtacactgggtgtacaatgtcaaattggataacagctctaatattgatttctgtatttgttccatgctaaacttatttctatgtgactcatcctatctctcttagcaaaaccacacatggatggataaacaattacttctctgtctctgcagattatccgcggtccatcatattccttcattgctaa

SEQ ID NO: 24509 - DNA, 709 bp, Glycine max
  Intron number 3 from transcript Glyma09g12030.1 (locus Gly ma09g12030) derived from phytozome v7.0 (chr-ID Gm09; pos 12401017 to 12401725 reverse strand)
ggagaggttagtttctgatcagtttatgtaatggttcaaatgaaccaattacactcacattgacaccccttgttgtttcttccaaattcacatgatgcacctgcatttaccgttaggacttgagcacgagtgagagcctggtagacctttttttatcccgactttcaatgaaagcaccaataagaagagtgtcaaatgcaatagactagtccattaggcaggagcacctcatgccttaagtaccacattaattagtttagtttattccactaaacgaggaattcctaaccgtaaccccattacaatgcattttgaagaaaccataagtgtaattcgttgagaaggtcctaaactgcaataatgctgtcggtgtaactcaacattgtgctcaagctcaatgtaatgtgatgaataggcactctgacttacgaccattgcctttattagggtatagggcaagggttttttggatgtagtttctttgacatctttaccctctttctttaaccttgacattttgattaggacttttgctagattattattattttgggtgactatggcttataattcatgaagttgcacacatggtctctctcctgtcttgctatgcatagttttttgttatattttcactattaattcaagaattcaaatttaatttatttttgcaggagtcattctctctttgtgatccaaaagtcattga

SEQ ID NO: 24510 - DNA, 387 bp, Glycine max
  Intron number 1 from transcript Glyma09g24530.1 (locus Gly ma09g24530) derived from phytozome v7.0 (chr-ID Gm09; pos 30283590 to 30283976 reverse strand)
gaggtaggtggtgatgccttaaaattgatttttttcttcttatttttacggaaggttttaaaaaaatggttgtagtggtggttttgtagcagtccttgatattgtgggaaactattataagcaaatgttaccgatgtgaccacaattgtgatctttgatattgtagaaaattataaacaaatgctactgatgcgatcacaattgagattacagacaccacaaagactttttattttgtggactgttttttaaaaccatactttttatatcttgacattggtgtcatgcatgattaattgatgatttgcatgtgaagataatgccattatgaaattgggtttggttggtgtagggtggagaagtgcctttgtctgaaatttttggcac

SEQ ID NO: 24511 - DNA, 752 bp, Glycine max
  Intron number 2 from transcript Glyma10g30150.1 (locus Gly ma10g30150) derived from phytozome v7.0 (chr-ID Gm10; pos 38871882 to 38872633)
ggttcgtccaaggaagctgctctaccttgccatcggtatgtatgagtataaatttatcatttattttctcattttctctgtcatgtaaatgcaacaaatttacatgattcgtttcgaaagtgttggatttctgatgttaaagttaaacctgtcattgtactcttctcttcctccttagtaaattttcattttctagcaaaatgtacttgactcacatgacacagaacaacacaagagtgctcctcttggctagtactcccctgagaaacctagagtactcctctaagatggagtgctcctttgactcaaatcattttatgaataaagaaaactcgatatcatgtgataatcaaaagcttatccatctatagatccaataaaggcaaacatcctgataagctattcttattctatgctagaataagataatttgaaataagaaaaggctcaagagctctataatgtaactgtttaaataagtgtataaggtgaagatcaagacagtttccacattaaaactgagcctggtgaatcaaaacttacgtatatccaactttcctctagctacaatctttctgtctgactgcaatgttaagagtctaaattttttattatgtaattttcaaactgatagttcccagattctgtttttactttaaacccactttctcatttcatctgtttctttattacacgtacttttgttaccccttcagtttttgcctcttgtttccttactttgaaatttgcag

SEQ ID NO: 24512 - DNA, 519 bp, Glycine max
  Intron number 1 from transcript Glyma12g05530.1 (locus Gly ma12g05530) derived from phytozome v7.0 (chr-ID Gm12; pos 3685774 to 3686292)
tgcaaatttccgaacttcaacttggagaaataagtgtgtggctagtgctattaaatattgtgtttgagggtttattatttcactggttggttatatatatagtgttatgtttgattgagtgaattcctctttggccaacttgtgttgtgtggtttagattcctagttgtgaagaaaaaaaaaaactgttttcgtactcactgatggtggttcatgcaagagcctatgtggatctcggatagagttttagtatttatttgttgatattatacagatgaactattggatcttgtgtgttaaattcatgaaataaacttgtggtggctgaggttaagagtatacattgttttatgttagaattattgtcttctgtgtgttgctttcctatttcacagataagttctttatatttgatgatgtgtgcatatgataaaatgttatgctatgtgatagcagttaggtagaaatagtttatttgtgctactatagcagttgatatcgattcaaatattctagtaag

SEQ ID NO: 24513 - DNA, 936 bp, Glycine max
  Intron number 1 from transcript Glyma10g38110.1 (locus Gly ma10g38110) derived from phytozome v7.0 (chr-ID Gm10; pos 45979526 to 45980461 reverse strand)
gctgttggagttctgtccccattaaggcaggttggtttctttcttcttccctgtttgtgaccttttgtcaatcctcaatcataccacagtgagcatattcctgatatgtacttgacaaagggacattattccatactcttgatactgttatattattaaatggagacatctaattggtcatcttggaaaaaggtttctcttctttgatttgaaagtatgcctactacttatttgaactcagattatgttatcaaatggaaaatgtgagcatgtttcactgattttaacatctataaatttgaaatgtcttaataagcttttcgtttccctttatttgaattaataatcaattctgggtatgaaaagattgtattgataaggaaaataatacttctacgaagaggtgtttgtggcacgataagaaaattcttaagtagttataaaaaaaactcaagtaatcacggacattataaaaatattcttactaaaatattagtataatttttgttagatttaggtacgattggcttttaaatttgaatttgaaaaccaatccaattccatttacttttttggtttttaattttttcagttcattcagtttttaatttttttaattaccagtcaaataatactctattaattaaactaatgtcatccattttttttattcacactaacagttaaaaacacttgtgaaatgcatgacttggtagttattagaatttcataatcctccttgctaaattaatttgacaattctggcttgcgtaatttttacaccttttggtagaccagaccggcatattgagtcagtaaattctgctggtaataaacaaagtgttatagtcaaaccatcaggtatttatataattttttaaaaattttacctgacactgttggggcaaatacatttatgtgcaggcttgcaaagga

SEQ ID NO: 24514 - DNA, 686 bp, Glycine max
  Intron number 2 from transcript Glyma10g31380.1 (locus Gly ma10g31380) derived from phytozome v7.0 (chr-ID Gm10; pos 39891624 to 39892309)
ttcggctctttcactttggtattgaaggcaagacggtacgtaattaacatccttttctttttcttttatcagtcaagaaatcatattatatgacatgggtacaaaggatatccaacccttttaaacaaagttcttactcaactataggcatttcatacataacataggattaattgatcattcatacaggaaaaaataaaaattaaaccctttactcctgcatttaaccgtgatcacaagatctaaactttattagatccaacctcacctttaaagattatattgtatatttctatcattctatgcagtcatattgttcaacttaggccaaccacaccatccaccaagtcttctttaacctttttctttgaagccgtacgtatgttgtataaaactattcctactggcattagccatcacaacttgaactccaaacaaagtacaacaccttttcgtatattaatgacgaaaaggggcatgagaaattgagaatataagatgacattattactcaacccaattaattatataggttaccttggatctgtatcctatcaagatatgaaatatatgaatatatgattgcattataaacttaaaaaagacgttcaatttcatgctaattttgagtctttttttatgtttttgtaggatctctctgtgtctgccgttagagataacatact

SEQ ID NO: 24515 - DNA, 438 bp, Glycine max
  Intron number 1 from transcript Glyma12g32830.1 (locus Gly ma12g32830) derived from phytozome v7.0 (chr-ID Gm12; pos 36233927 to 36234364)
cctttgtttcgtctctagacttggaactgaaacaggtattttaactgtttatttcaattgtcgttatttttttcccacctttctctcacaatattgtcttgttcagttatgaaaactctaaatctctatttttggtacgatcttgctattctaatgcattttggcatttcctatgtcggagatggtcattacctattacccatatccgccaaaattagctgttacataggtgtcttcactcttcacatctcatgactcatgtttaaaaaatcaaaaacaaaaattgattaattaataatatttgagataaggttttgttttagttattgtccttgtattcttaaatggattgtggccacattttaaggttaagtgatttttgttgtctgactcactcactcactccacataggtggtgattgaaatttgtaaataaac

SEQ ID NO: 24516 - DNA, 627 bp, Glycine max
  Intron number 1 from transcript Glyma09g34940.2 (locus Gly ma09g34940) derived from phytozome v7.0 (chr-ID Gm09; pos 41208940 to 41209566)
tcgcatctcagatcgaaatcgaggtcactgagtgagtgagtcgtgtttaattttctctctctttctcagcttcctctattttcgccatcgctgttcctgcaattctggcgccggattaatttactttgattttatgttttgcgcattcaatgcttttgatttcgattgaatttctctttactctactgtgtgtgcgaactgcgaagcttttctagctgtttacctagtgtgcttccgtgctactttttattctttcgctatctagatagaatcgtgcttgtgttgctgagctgaaatttttttaactgaacttgaagcatttgctcctattgttttatagtattattgattttgttcgtatgcgtcgtttttaattacaatatagaaaactaattttgtgtttttatttactcggtgaggttatgttacatgtttactggtttttttagtgttatgtgaataactgccgaaacagaatttattttttgtccgctgttattaatttccgttgatgagtttgtaataaatgatataatgatgattcttgtctgttgtaatctcagcatagttttttcccccccctttttttgttgttgcaggaagtgtttacgttattctgcgctgttg

SEQ ID NO: 24517 - DNA, 526 bp, Glycine max
  Intron number 1 from transcript Glyma10g43990.1 (locus Gly ma10g43990) derived from phytozome v7.0 (chr-ID Gm10; pos 50507087 to 50507612)
acactgttcaggtcagtttttacttctttttttcatttttctactttcactattgggagtgactcggaactgtgatcctcatgtcgttagaatttaatttaagtgcattgttacactgtcatcaaatcgcatttttttcatgtatgttaagttttataataattaccttaaaactcatacctatatgatttttgatcagtttggtaatgtaaaaatctttattctgacatgacagtggaacaaaatttaactcgtgttgttatctgatctctaaatttatttaagttgattggtgaaacagttttgaatccttgtaaatttgtgtggcctttgttttttttttttttaatctcttttggtaagaatgagatggtatatgtatcttaatagcccccaccaaaggttgacatggatgacctttgatggaaatataattgtgaagcttttaaagttgtgggatcttcattacctgaatttgttgtttcggggttacatgataggaacaagaccttaaggaattccgaca

SEQ ID NO: 24518 - DNA, 932 bp, Glycine max
  Intron number 1 from transcript Glyma12g34280.1 (locus Gly ma12g34280) derived from phytozome v7.0 (chr-ID Gm12; pos 37464674 to 37465605)
cactaccataggtacactattagctcctttttctctgtcacatgcactcacatacacacacataagatcacaatcatatgcaggcatggacagaaagacacaaacaggtgcactagtggaagtgaaacaagaagggtggataaggcttgaatttttcatatttcaaagcatattattattttacaaattttgaaatagctctttggcattcctcgaacaaatcgtcaaaacttcaccgacctttgatttataaaatttataattaatgagacttttgataaattaagaaaacttgcaagttgccacacacaggtatagatgaatattcatgtgtgtttgtttttaaatcttggttgatgtacacgtaagtttgtctatttgatcagaaatatcgatctatctatctatatatatcatctcaccccacctactatagatccatgtgggaactgtaaatctgtaataagaaaagatgcattagacaagtttaaatatatcttctatatatgtgagtttctttatattatcccttttgtcagaactggaatttatctatcttgtattgtataagcagatagaatttgtcattagttattgtcggggtaaatctgaccattcattcaagatttccaatttaaagtgtagataaggtaaacttcagtacaagttcacgtgcacacttgatagacctcatgatagtaaagatataatgaaaaaggatgaacttcagaatcaagaaatcataaattcttaactttattatctattaaaagaaaaataatccgaccttttcaagcgtgtgcatgatttttacagatagaaattacaacttcagaaaaatatgtttattacgcttttatatatggattttgattaactttcaaatcatatttgtaggttgcctagggaaaaaactaggaccaaggattttg

SEQ ID NO: 24519 - DNA, 848 bp, Glycine max
  Intron number 1 from transcript Glyma09g04000.1 (locus Gly ma09g04000) derived from phytozome v7.0 (chr-ID Gm09; pos 2937469 to 2938316 reverse strand)
ccgcgaacgagtcgagtgaatcgggttggtaaggtaaggtactctctaactaacctccaccgaatttttcttctcttctctcattcgcgatcctagatctctgattctctctctttgattccctcttcgctcccgaatctcaaatcttcgtgattttagggatactctcgctgcatattccagaatcttctcttctgctttggttttttcgttgtttcgtgttcgagttttcgtgcatttggcttgaacttgtgctggtagttactagcttagttgcgagtttggtttccgttagttggatgattgatcgttgcttaaacttgttcttgttgtggatctgcttcgttcgcttgtttccttcgcttaatttttcaaatcaaatagcgtaaatctttatttccgttcttctggtgatggatgacgtttttcgttttttattgacgcattaaacgatcgattccggtttcgttctcttccttttatagtcaaagagatttcaaattctccttcattctccaaacgcaacgttttagtcgttaatctactctgtttttttttttttttgcttattttggatcatgaagatcacgtggctatagttgtgaatgacatttttttaatcttgttgaatctgtggttgcttgagatagcttattaatgttagtacttggagagagatatgaatctcgatgtttgatttcaactgatatggagaatatagtaaattattaattatttgatttcgtgttttatttatattacattttaaatattcctctgtatcttttcttttgcaatataaaaagtagtgcacttgtttgtttccagatctattctgtttcttcgtc

SEQ ID NO: 24520 - DNA, 509 bp, Glycine max
  Intron number 4 from transcript Glyma11g37550.1 (locus Gly ma11g37550) derived from phytozome v7.0 (chr-ID Gm11; pos 38624090 to 38624598)
cagaggagtcaagactttattgggggaaatctcctgtgcgttttctccttgtccttaactacaaatttaatagtttcactacattgaattttgtgctcatataactataagatctgctgcaatcaaattagtgtgtttggggaaagtgtttatttatagaaattcattttacaaaacctattttgataaaaaaaaatgtagtgaatgggtttatgttttagtgtttttattctaattttttttatttaacacaaaaactacctaaatttgtttaaactcaatcaattttcggttcaaagtaaattcttcaattggattaaacatataaacatttgcctacttttgtattatcttgttcttttcctaccaagtcagttgaaaaatagatggaaaaaaaacaactaaaaaagttttgatgtttatataagaaatcattttattttcaattgagaaaaacaaatctgaatccagatctgatatctatttgccttttttatagataccttgca

SEQ ID NO: 24521 - DNA, 538 bp, Glycine max
  Intron number 2 from transcript Glyma12g05700.1 (locus Gly ma12g05700) derived from phytozome v7.0 (chr-ID Gm12; pos 3814867 to 3815404)
ggttccaataaatcctctattggtatgtccaactcattgtcaaagtagttgaacaatttgctgttataattgagatgttattcatacaatagaacattttttacaatattatttttccttttatttctcttcaatctttatcacttcaataatcttatttcacgtttctctttattgtacaattataatttcttgttataatttgctatgttttgcttcagtagtcagttttatatggcaaattagtgtaagatagatatttgaatagtttacagttatatgtgggactcgtgtatcatccaaagacaataaattttcatttgtttttttttctgtccaatattttggcatcttattcgttacaacaatgtaattaacatctttactaagagagtctaacttagttggttgatcaaagcgaatgagttattgtaaactcgatactagtattcaattcttacatattaaaaaaaaacagtaacatccggcttgaatatgaacaggtaggatttggacaaccaatttgtacacctctaag

SEQ ID NO: 24522 - DNA, 733 bp, Glycine max
  Intron number 2 from transcript Glyma09g02470.1 (locus Gly ma09g02470) derived from phytozome v7.0 (chr-ID Gm09; pos 1672514 to 1673246 reverse strand)
aaggtatatctctggcttaaattcatttgtagtttaaacatttatattttgggtccatgggtgagagtgaaaatggtttcattttaatttttgggatgaaagcaaacaagtcaactcattgtagttgagttattttctctagccctgttaccaaactattactgcagctgttttcttttgttgttttcattcttagttgggtttggggggaggaggttgacatgtcttgaatatgtgactacatttgggaggataccatttagtttaatgctaatttctgttgtaaaccactgtgaaattggttggatggtgcaggattttaattagtactataattttgtaattatactttactaatataaattctcaaaattatgtaaagtagagagacgatagtggtagagaaactcctctaagaaatgtacacctggcaaattactcattttgaattttgaactgcatactcttcctgcctattgatatatctatttccaaactgttagaagttgatttgatataaagccttgagaccaatttatgttctgtcagtaatattttaattttttcttttaagaattgagaaggtatccattattctattcaaaaatttcccccatccattctaaaataattttttacattctagtctctcttctgtacaattatttttgtatgcattacactgacaaaacctggaaaataatatataatttttcatcctttgtttgtgcag

SEQ ID NO: 24523 - DNA, 747 bp, Glycine max
  Intron number 1 from transcript Glyma09g23540.1 (locus Gly ma09g23540) derived from phytozome v7.0 (chr-ID Gm09; pos 29011946 to 29012692 reverse strand)
cattcacaacccaacctccctttctcggattcaaggtacccttttcaacgttttctcttacaatattcttgctttctcctagtaggcaaatgtgaaacgcaacatgtatttgttcatttattatattatttatgtttcagggtcaggaaatttgtatataatgcattactcaatctgaacattgccggttatgatatgttgtggagtttttgaatctcatagtataaccatgtgtgtataagttgtttgtacaatttaacgagaaaattagattaaactttttcatataagtttcataagctatcctagaaagcttttcgaaaataacttatgaaaatatcataagctttttccaaataccataagataagtttaaataagttgtaaataagctcttccaaaaagaccctaaataatacatgtactcacggtaaatgtcttttacactgtaatccaatcacaactcatcatgtataataagttcattgacttttataataaccaccttaaaagtcattcaaaggatgatttcttattgtttgatagcataaaaacttttatattggtagtgtatgcctattacaactcttttgaatcttgtgtacctctacatttggttaaaaaaagtgattttctaaggtctggttactggcttcataaggtaaagttccccatttttcttgttgcatagggtaaatcatgttttttttagaagcacagttgttgcttgagtgttaaaccattttg

SEQ ID NO: 24524 - DNA, 348 bp, Glycine max
  Intron number 2 from transcript Glyma11g35570.1 (locus Gly ma11g35570) derived from phytozome v7.0 (chr-ID Gm11; pos 37216804 to 37217151 reverse strand)
gaagagtagtggtcttgtaagttctgattttctgatctgttttacagaaactgaatatatgtaattttcggttcaatttaatttatggccagagacagaacaaaaaaaatcaagattttgttttttctttttttcattagggtcatcgtatgagagatcaaagtttaaaatttgttttatttcttcttgttattagcaaaactgtttgatccatgatattttgagactgttaaatcaaattactattgttcatattgttggtttgatagtatttagtatcatgctgatcatgagaatgtattttgtttggcaggaatttgaaagacctttgtctcgaaggaaatctgg

SEQ ID NO: 24525 - DNA, 318 bp, Glycine max
  Intron number 1 from transcript Glyma12g29540.1 (locus Gly ma12g29540) derived from phytozome v7.0 (chr-ID Gm12; pos 32977831 to 32978148)
tttagtttgttgagttttaaaaaattcattttggtcttctgaagtgtttgtgtcagacaaaattgattcttcagttaatttatccactaatttgatcaacttgataacacttgactaattgtaggagatgtctgatcatttgagcatttgccacatcaattaaaattaattttttggtgaaaaaactgtcagaaacactaacttggtctaatagagaacactttatggaatcaaagccaaaaattttcatacctaaaaataaaaaaaaaaacgaacaaaagtgtatttaagcctagaaaatttcacttttcatttcaa

SEQ ID NO: 24526 - DNA, 1009 bp, Glycine max
  Intron number 1 from transcript Glyma10g42650.1 (locus Gly ma10g42650) derived from phytozome v7.0 (chr-ID Gm10; pos 49533670 to 49534678)
tctcccccatttggcattcgcagatcgaatacgaggtagggttttccccgtttgaggtttaattttatttcccttccttctttgattcattgtatgttgaccttgttgctgtcaaaactttggctggatgattttatgctgtttagtcaatagtgtgtgatttgttggtcgaactcgaacatgagagctcgtgcactatggtagtcactcactcggtgaatatcacagtacatgggttgtttcatggaggcttaaaggtgaagagacgctgcttatgcctgaactgaatttgttatgtaaaaaaatgagagatagggaatctgagagggggtttgcgtgtatatgtttagcgggaaaaaaatcagagggtgagagagagcaggtttgtgaaattgagagcccggtttgttgtggtgaggatagtatcggtttgtgtatgttttaaaaagaaatttaaaaaatcagtggagaggtagtgtgaaatttttgcggtttgaaactgaaaataccaatgtcattctgttttatgatcttgtgtagtattgcattttcacgtatattgttttgttttttagagaatggtgcatgaataggaaataggtgaatgtgttggattattattattattattgctagttctatcatgctcgtgttagatttataatgttggattaatatcagctcactcgctattgtaaattctactgtgcttgtgtttgattcaagtgttagattttaaattttaaattgtagtgttagattgttagatctacaaatgtgttaaaagtggtaaacagtaatcaggggcggggaaggaaaaacccgtcctcgccccatttccatgcctacaaaccccagtgaggaacaaagcaagtgcctcttcagtaattcccaatatccccaaccccaaccccaaacctttcccatccattttactctttcccctctttgttctaatctctttttcttcaaccattttatgcagtaatttcactgaatcttattgaag

SEQ ID NO: 24527 - DNA, 758 bp, Glycine max
  Intron number 6 from transcript Glyma10g42650.1 (locus Gly ma10g42650) derived from phytozome v7.0 (chr-ID Gm10; pos 49535636 to 49536393)
aagaatccgtaaagaacttctcagctttgatattcgtgtctatttttatttgtttgcttgcttatgctgcatctatttaggaaaaagggtaaaataggtttttggtccctctaaaatattccaaatttgattttagtcttccaaaattttttgccctaatttgactctctaatttggaaacttttggtcctcaaagtggttatacttaacattttatcacagttataatttataaatcatatggaaatatactgaggataaaaaatggagtatttccaaattagagggatgaaaataggacaatttttttggagggctaaaaccaaatttggaaaattttagagggaccaaaaacatattttactctaggaaaataatttatgaacatttcttacgaagttgcttcttatttgtgtatctgctagaaaaactgatgccttatatattgcatttggcaactgttgattggagatataaacaagtgttatttacctgaaaaattcagaatgtacatatatcctgatattgcatcaattcttgaatgtacaaaaattaaatgtgtaattcctcttataaggtgcttcagagttcagaccgacaggttcagtagcatgtgccaataaacttttttgttttgtacaaaatactaaatagcagtgttcttgttgcagtagatcatgatatatgtattttaactttcaccttttcttttctctttggcagtctcgaccatttggagtatctcttctcattgctgg

SEQ ID NO: 24528 - DNA, 848 bp, Glycine max
  Intron number 2 from transcript Glyma11g14790.1 (locus Gly ma11g14790) derived from phytozome v7.0 (chr-ID Gm11; pos 10542478 to 10543325 reverse strand)
ctgaggtaatttcattttctctgtaattctatgttaacttgttcttgtctcacttacctgtgttgtgatcccacatctatgtcaatttaccggtatcttgctcacttacgtcctatgataccctcaattgtttttagaatgcattgcttgactatgtatttccacttcttggctctttccctctgttggtacagcagaaacaaaataaagggaagaagtaagtttgaaaaattgaactgaatagaaaatagaaggatagaaaaattacaccttgtttgtttattgttttgaaaaacaatgttctgctttctaaattttgtttgtctcttgatacatttgaaagtgtttgttcctcacttccttgagtatatttcttttttataaaagtttatcttctgagcacttaaacagcacttgaagaaaacataagtgaatgataaaacatcttccatctgtttctgttttttagtttttaaaacacttgttttggatgtaattttcaaaacttaatagattttggatgagaaactgattgctgggctctaaattttggtttttaaaaatcaacatttctttttgttttcctttcaactaaatcaaagaaaatgcattgctatttgtgttttctttctttctatttctttcctctcgttcaaacatatcattatgtggctcaagaatttaggattgtgtgatatgatgacatatttatattcttttgaatgtctgtagttgctacgtgtttgtctggttagaatgctcagcgctcctttccttgtgttcctttttatcttggttttttctctagaatattgaatgatgtggttgtagggcaggaagatctgtct

SEQ ID NO: 24529 - DNA, 692 bp, Glycine max
  Intron number 1 from transcript Glyma11g37280.1 (locus Gly ma11g37280) derived from phytozome v7.0 (chr-ID Gm11; pos 38439975 to 38440666)
gggtcttgttctttctattcttctcacaaaattaggtagactctaaaaggttaaagaattcctattaattaataccaactgcttgttttggattccatagtggtagatctgatattgaagtttttgtttggaatttttgttcatattcatgtatttccaagtagcattggctatgaagtttccttgtcatgcatgtctggtgcaacaaatatgataagaaaagtcatggtttcagtttggaatgacagtaatttcttttgtctgtcttaagataatgcaaagttctaaaatgagctgtggagtttcctttgttaatttgttgtagcttatctgagaatgctacaacactggtaatatgaataatgttttcagtttataacttggttatggaaagtaacttcttctctttgttggtgttgttgttgttgttgtttatatatttggcataagaaattgtttgaacaaataatgtcttatttgagtttcttttaatctttttgatgtgcaggtcatattacttttatagatttattaaaaatgtgcttaatgatgtgccccactttgtaattttttcttcttatagcatcaaattactcctgcgcttttatttctgttgagtattgcccacgatatatgtattcttttgctctattataggtattaattgcacagttttggagagaaacaaggca

SEQ ID NO: 24530 - DNA, 469 bp, Glycine max
  Intron number 2 from transcript Glyma12g23220.1 (locus Gly ma12g23220) derived from phytozome v7.0 (chr-ID Gm12; pos 25568211 to 25568679 reverse strand)
ctgaggaatttggggtaggtagtagttccttcttcacaactgatatgcattgtggttctgtgaataatatggaaaatgaccagtttttttggtttttaaaattttaaattcatgttaatgtctgctgtaaccactttcatgatgatgtggtgtcagtggttgttgataagctagctacaaataattttggacatttggggtgaaactctactattatttgtttaatttgcctaaattaaatgtcgctgtctttctcttgaatttcttcttgatacggattgcaattttgttacctgttttcttcaatgtgttgtcagttgccttcttcaacattcagatatgctcactatcaaatcaaatgagtttgctttatttcaataatggtgtcatttcctgcaatattctctcgaaatcaagtttatctgtttatgtagataggatccactgagtgggttcaacaaaaccttaa

SEQ ID NO: 24531 - DNA, 663 bp, Glycine max
  Intron number 2 from transcript Glyma10g33640.1 (locus Gly ma10g33640) derived from phytozome v7.0 (chr-ID Gm10; pos 41947452 to 41948114)
gttccgtcattaactgcctcgtagtatccttgtttgctttctttcaaatctccgtacagatgcatgttaattcaaaactctgcaaaactccgttatatctttccaatcaatcacttgtagcatacttacttgttagatgcattattggttttttttaattattattaatgattatgatttcattagtgtttgtgcttgaaattataagattcatggcaattcaagcaatatataggcctaagattattttttatttaaattcaagaataagtaagagctcgattacctgataatgaaacttcataaccataggccctgcttgcagacgtttttctataagtgcttgtagaagaagaaattaaggagttaaaaatgaattaaacttcttccattagttaaattcaacttatacacttaatttttataaaagtactttcatctaactttttcaaaagttgaggtgcatgagttgattttaacttatggaagaagctcaatccattctaccttatgttcttccactataagtgtttatggagaagtttattcaaataggacatgagctatgatcttacttgtatgctactattatggaactctattacttgtctgcttccttgtttccaccttaactactagtttgatcttttgggagaacttcac

SEQ ID NO: 24532 - DNA, 936 bp, Glycine max
  Intron number 3 from transcript Glyma10g06480.1 (locus Gly ma10g06480) derived from phytozome v7.0 (chr-ID Gm10; pos 5181808 to 5182743)
cgtacttgaaacgtgagtttaagttactgttttcgaagggtttgttgataagatgcttagatgattgctttagaagaaacggaagttaattatcttaggtctttgattggataaacttattaacaagcatttatgaagtgaattgagtgcataggagaatctcagttcattttaggaagagtgtattaaagcatctgcatgactgcttaaatgtgtttcttatcttaaatttgtgaacctacaatgccacttagatttaagaacgtaaaactttactccaatgctaaagttgctagagtaaatacttaactttgagtcacattaaattttggatcgaaaaaattgttcttgttttggaaataatcaattaagcaatggttgcttatataagcaattcaatgccaagtcatcagctctaatggaaaaatttgttaagcaactcatttaagcacccgcatcggagatgttcttaggagtgtttatggataagagttttaataaataatcaatggctttaatatagataaaaataattgatggagaagctccatttattttcttctcctgcctgtaagtgtttatggagaagttcatccaaattttaataagtaatggatggcttctctaattttactgcataggtgaagaaacaaatctcttctgtgaagttaaattggcaggatatatattctgttgcattctatttttgttttgaatactaagcatgtaaaatggtgaccaagtgaggcttgccatagcatagtaataaattaaaagtaaaacgagggagtagtattttttttcttttcagaagtgtatgaggaagctgcttaagcaagtaattatttctataaaaataagttaattcaactatgcattaagtcctgttttactttttcagcttatttccttgaggcatataggccagtgaggaag

SEQ ID NO: 24533 - DNA, 880 bp, Glycine max
  Intron number 2 from transcript Glyma12g08200.1 (locus Gly ma12g08200) derived from phytozome v7.0 (chr-ID Gm12; pos 5932170 to 5933049 reverse strand)
tggtatgtgtttgaatttgatgatgatctgaatttaacaagtactcaacagttataattatgtttaccttttctcttcaagaagttaattaaataaaaataatctagtttaaatatattttttttatctgaaaaatttacatattttatatttggtccataataaatttttcttagctttgattcctagaaattttatgaattttacatttctgacttttttttctattttgtctcttctattatgttggctatattaagtagggcttgaaatattttttggatttttctttaatttggtttctgaattttttttatatcacaatcatcaatgtgtttttctttaattaagcgaaccttttgggcttaacgagtataacagtgatcatgcgcttagcgcggaattcgtgttaagagcgtctttagacttcttcgtgcactttctttgtactgttgcgcattaaatgaactattttaattttcaactttttcttcaaaaaattttcttcacgtttttgtttcaattctcctctaaaacagttcttttcaattcggtgaaaaattaacatgatattaaatttttcgttatttcattaaaaataacagtaaaataaaaaattctaatcattcttaaagaaacaacaatataagggccaaaataaagaaaaaaattgttaggaacccaatgtaaaatctataactttttcaaaaattaaaaacaagtttaaaccaaataattttaataaaaattaagagcatgaattgattttaacttgagaagttcaatttactttatctttttttttataattaatgtttatagagaaatttattcaaacccgatctaatgaactttgctttgtttttatttaccatttagg

SEQ ID NO: 24534 - DNA, 1028 bp, Glycine max
  Intron number 2 from transcript Glyma08g45000.1 (locus Gly ma08g45000) derived from phytozome v7.0 (chr-ID Gm08; pos 44456579 to 44457606 reverse strand)
ggcatgtaagattactcttaattgatcccttttttctctgtgtgtggctaaattttgtattgatatattttctcataaatagctatcaggagaatgagacagcaaattatgttgttttatttcatggattagaggagacaaagggcttttatattagccttaggtctaggccagtcttttgggttgttgtacctgaatatggcttcagagctaatggaataaaagggcatattagccacataaagatttcatcatttgaatggagaaagcataaattaatgtttacaaagaaatgtggtaggtttgctgtttgtgaaaaaaattgagtggccttagtatcaatatcttgtttgataatctccactttgaaattactgtgggaacttttaatgaattcaagcaatgtctttctattacttttggtggatgagataacatgacatcatgtgatttttttatttgttggaaatcggaatgtcatataaccaaggattaatccttagaagatgttgccataaggaagagtagaacttatttagaggggtatcttgagcaggggaaggacaaggggtcagttgggataaaataatggatgagggttatctaagaatcactgccctttgattacatttccatgatccaaaatgactgtactatcagagaatatgtgtctaagaattaggacttgttggaccaaattcaaatcaataagtgcattgcaaattatgtataatctggaaggaaattcttatcaaagttgtagatcaactgtgaatttttccactggcttcttgcaagaaatgaaacattatgttgtgatatggggggtgggggtacaatcgagaaggttaagtatggtaccctttctgcaattctcttttagtttttgctgcttcttttgtgtcattgtaagcaattttatctttctcattattttgtggttagaaattttatttttctgttttgtgtgattgggtggggtgtttattgtagggcaaggtcaaagatattgaattgaaaggtcacac

SEQ ID NO: 24535 - DNA, 495 bp, Glycine max
  Intron number 1 from transcript Glyma11g35850.1 (locus Gly ma11g35850) derived from phytozome v7.0 (chr-ID Gm11; pos 37442321 to 37442815)
ctgtaatatttccctgcatttttttcttatatatatttttttgtttcatttgattattatcctcccttcagttccacttcttacttttattctttattttttgttagttaaaatattcatatcatggattcttccttgttatataccttagttacttaaaatcttaaatccactgcctacttcatgctaatgctatatatctatatctcgattatatattgttttctgtgtgttgtatattttcattcccatatatatctggatagaaaattgaaacacaaactaattaaaaatgatgattgttaaatatattgttgaaatattatattatattgttctcaattaatttaatacattaacatatgcatatatatatatatatatatatatcaattacatatgtggtgcttaatttatttgggatagtaaattatctaatatttattgttcttttgctgggttggtggcagctaaacaaaacctcgatcataatag

SEQ ID NO: 24536 - DNA, 328 bp, Glycine max
  Intron number 3 from transcript Glyma10g02230.1 (locus Gly ma10g02230) derived from phytozome v7.0 (chr-ID Gm10; pos 1558573 to 1558900)
caaaggtatgcaattcttttcacgcgtagtcttcttttgctgttgtgttagactagtagtcaataaacatttgtggttttaagtcatgaattttttaatgctgttagtcactacatagtctttagtgtagtaaaaaaattataggtgggaagaaaaaatatctaagactatcatgttggttggttttcaggttaatgatggatttctttttgggtttgatttgtttattctgatccttaaaacattgcatcagtcttcagattacactcctggttaattcttattatcttttttggttattcttgtccaaagcttaggcttctttggc

SEQ ID NO: 24537 - DNA, 795 bp, Glycine max
  Intron number 1 from transcript Glyma11g34310.1 (locus Gly ma11g34310) derived from phytozome v7.0 (chr-ID Gm11; pos 36171630 to 36172424 reverse strand)
cgcgacgcaactttccgattcgcagcgagcaacgagtgagtgtgactttttttttttttgctttcgctggatgttgcaattttaccttttctctctgtagtggaagagttttcgccattctttcaattgcgttgaattttgtctccaatttcgttagtgaaaatgctggatccgtcagatcttcttctgcatgtgcattttgaagtacttgaactcatgtatatgtgtatatgcttaggaattgtgatttgtgtgtatagtgttttatacttattactttacttagggtagggttactttgtgtgttcgacatttacatgctgtgttgctgaattgaatctgaagcattctcagtttgtgtttttttgtgtttgtatttcgtgcttcatttaagttagggcattactctgctacctgtatgaaaaatgttatgtccagctacaaaattgtcttatttatcctcctaatacttttctggagaaagtatcctgaaagcataaaaaaagcatttaatactatgtttaggaagcaggaagatttagaattattcttaattatttggtttgtggaaatcttgacttgttatttctgttgtctcataggatttcatagaagacttattcagtaaatgcttgacaactcatcttggttaccatacttgttaaagactcaaagtaacataaaaattgcttttagttattttgtttgtggaaaccctaatctatttatatttatcgtttatttgttttggacttcatagaagactcttgttgatcatctatcagatccttggtg

SEQ ID NO: 24538 - DNA, 870 bp, Glycine max
  Intron number 3 from transcript Glyma10g37930.1 (locus Gly ma10g37930) derived from phytozome v7.0 (chr-ID Gm10; pos 45850169 to 45851038 reverse strand)
atttcgaggagtttatacgtcatcttaggcataaggtgtgttttatgataaatttcttatctgaacattgacctattgctacccagtctactttttttttcttctttttttccttttaattttttccttttttttcccgtacaaattcttttttatttaacttactgagaaagggaattgaacttcagagttgtaaaaacatattacattgcctgtgatagtttaatgttttgaataaaattgcaaatgtttttggtgcaaagaagatatatattccaaggttatataaatgatgaaagttaaatttgaaatcggtctttcaaagggcaatagttcatctaaaagttgtcaaaggaatactagtaataaccaagcatgaaactacacagattacttgttgattaaaactgtgcgttaacattgggctaggtgaatttaagttgacaatttttttggagctatgttcaatgaccatttttgacataagctagcatctatctgattcacatgttaccttctatactccaataactcatgaatttaaaatgttttatggaatcagctaaagtaagaaactcacggttttgggtgggggctatatcactggatcattatgtagtgcttcctgtaaagcagtttggcatttacttatttttctttgttgatgctaccatattttctgttgcttgtgtgataaatgtgggaacagggattttgtactattgtttccatgctctcagttttctttttaatcgtattggtacaagattataaaattttcatggatgtcccatttataaactagtgtttaattgattgagatgatttttttgttttttgtctgtatattattataggtattgattgaga

SEQ ID NO: 24539 - DNA, 701 bp, Glycine max
  Intron number 2 from transcript Glyma10g04650.1 (locus Gly ma10g04650) derived from phytozome v7.0 (chr-ID Gm10; pos 3577644 to 3578344)
ttaaccaaagcgcttttccaggttcttagggttttcaattcttttttctctttttgtcgcttcactcaatgcttccaatttcgctcatgcaacttctaaatttcacttaaatattacatttacagtcatttagttattttctggtgattacatttaaaggagctattttccctaatgctttgtcataagataaaaccctaaaccttattgagttattgtcttgtttgaggaaacagttctcactcttcactcgtggttagtgggccccttggcaaactactagtgtttcaattgttgatgccctttacaatattagtttcagattttgagtttgaggtgatggggatttatttgcttctttgaatactttaagattcatgtgtatgagtgtatgcatttcttgaacttcctttgaattatattcagaacaatgggattcatgtttgtttgtcttagcactattctagtagtagtcttactaaagcattaatatcttcaagtgtatgagaataaacttatttatttttggtgcagtccagaattttttttaatgaatacagtagtgtgtgtgtgtgtgtgtgtgtgcgtgctttgatttggttttattgttcagaaactgaagtattcatttgagggtcttcagcctcatcacgctctttgacatttttgtcaattttgtgttgtttaatcaggcacaaatt

SEQ ID NO: 24540 - DNA, 720 bp, Glycine max
  Intron number 1 from transcript Glyma09g40940.1 (locus Gly ma09g40940) derived from phytozome v7.0 (chr-ID Gm09; pos 45728198 to 45728917)
ctcaacagccggcagtttttccaagctattgcgtaattactctttgagcttttccctgattactcaagtttcaaggctgacaatgtcatatagctttcttttcttattatagatatcagaacaacataaactactactcattccatccctaattctttcaattaattcaaatcccttgaaaaaaataatttagttaatcacattaaatttattaattatttgtattatcattccaaaattattattattttatctcttcatccacttaattatttttcattaatgtttggagagaaaataattaagtaaagatatgcacggaaaaaaataattaatatatctaaaaattaaaaaaagatcttataaaaagaaacaaacaaatttctaaaaagaatctctaaaaagaatcttataatttaggacgaagagagtatataacatcaatataactatcaaaacattgatgttgtatgcttgacatctagtttcatattggatttacactttacaagatattagtattagaacaaacctaaatgttacagtccacattatacaaaatgatagttttatactgttatattggaggtgttttaagataatttttatgtaaacttggaaatggttaaatgcattgccattgttgtggcattttcttaatatgacatgtgaaacatgatggcaggaacaacggaaactggacgagctccactagattgg

SEQ ID NO: 24541 - DNA, 631 bp, Glycine max
  Intron number 3 from transcript Glyma12g00450.1 (locus Gly ma12g00450) derived from phytozome v7.0 (chr-ID Gm12; pos 169853 to 170483)
cacaccctcaagacttgaccagtcttcttaagaaggtatcaatttttataaagttctattcacactgttttgttgtaatatgttcagtttatatcatatttatgaactgtcttcattgcatgtcaattatgttaatactgtggtgtaaaaacaaaattggtaatgtactcatgctctttcatcaccatcactctctttgattaaaaacttaaaatcatttcatgacctgcccctaatagttcaagcatttggaataatttcttgacatgcttttgtagcctctttgatacagtaaacacgattcaagagcttgatgcttgcttgctgctcctttttccttaatattatttaaaataaaatttcagcataaggtgatgactgcctgttcttgagtaagggcatgttagagttgaactgcatccaataacttgatttaatttaatttcaacaaaatgttttgaaagttatactagataaatagtaaatcccatggttgtttcttttatcttcctgctcttattttgtaatattgataaagataatgtgtgaattatttgtcaaattgattttaacaccgtgttttcatgtgatgataggtttctcaatatttacgcagtaaaaattgggatac

SEQ ID NO: 24542 - DNA, 1011 bp, Glycine max
  Intron number 2 from transcript Glyma09g41380.1 (locus Gly ma09g41380) derived from phytozome v7.0 (chr-ID Gm09; pos 46078626 to 46079636)
tcgcaccggaattcgtagacgacgagttctttcaggttagtcattggcagtggcattagtgattagtcccatcttgcatgctagtactagtgtgctataaacagataggtacagtggttagaatttgattagattacactgcctgctcttagagggcaagccctggtgcaatggttaagttgtgccttggcgactggttagccatgggcctgaatccggaaatagcctctttgcaaggctatgcacaattaccctcctccaaaacttcacgaagcgaggagcctctggcatcagagtgtgttacttagttagttagtatgatcgaacaatgattgataaaagttataaagtataaatgttgaacactgaaatcacacataatacagcaatacacttgctgtcccagagacgaaagtctcctattatgcaaatacaataataatacacttgttgtcccagagactaatgtctcttacagagagttcttctctctccacaaattgcaaataactttacactcctaataactcagcatactatcagagatatactcctaatacataaccaccgccagtaattttctacactaccactctgcaattctaatacagaactgtattctaaaacagttatctgagtttctaatacataactgatttctaaaacagctattttctatgcttaactgtcataactacccctaactctcagtttccatcatagtacacttcctttctcagcttagcctctttatgataaattggcaaggcaaaattgagcatctcaagagggtgaactttcatttatgttgcattgcctgctgtataaaccccgttcttgttttcatgtgataatcctgtctaaaagtgcttagtattgttttggaagttttgtggtatagtaacgtgtctgccttctattgcttgctgtggtgcttgcttaccaaaaaaaaaattgcttgctgttgtgcttgcaggcaaagataacttgacaagtttagcagtagaggca

SEQ ID NO: 24543 - DNA, 594 bp, Glycine max
  Intron number 1 from transcript Glyma10g32530.1 (locus Gly ma10g32530) derived from phytozome v7.0 (chr-ID Gm10; pos 40990336 to 40990929)
ctgtcgttctggatttgaattgcattaattaactggttcggttaattttctggttatttcttattcattatttaattttccaacacttgttttcttttgatcactttgtttatagctgagttcagctttatcaagttttttctaagtgttggtttatgcttttcttctaccatttgcatgcatttagctgtttcctctagaatctggatatctggtttcttctttctgacatcatcattccactcggtagcttttgtctcttaccttaaaatatttttttcattgatgtcaatgttctatttgagttctgatttattagttaagaaaaagaagaagaagaattagaattagtctcactctgttttttgtttcttgtttggggtgttaaagaatatgtcttcaataagaatgcatggtgcattggcatcacaatttattttggttttgttatttctggcatcatgtgttgtttgttcctttgtttgttactatgttgggtaaatgtgtctggaatgttttagaacatctcatttttgtctaatttttgttctgtgttcaggtttcatcatttagagtgagtcagcactcagcata

SEQ ID NO: 24544 - DNA, 866 bp, Glycine max
  Intron number 1 from transcript Glyma10g33890.1 (locus Gly ma10g33890) derived from phytozome v7.0 (chr-ID Gm10; pos 42122292 to 42123157)
tgcagggaggcatcttcataattggtaagaacaaatataaagttagtcttgttcttagcataaaaaaatcaaggtatatttttggttgaggcaaaacaaaggaatactaggaagaaagtatcttgcaaaatagatatttttgtcactcctcagttctgttttctaatccaccaaatactttagtcgaacttttccagtagacataccaactcaatttttaaattggtatccttggttattacctaaaataaattgatattttttgttgccaaatatttaaaattcatcttcaaaattgatattcttattgtgggtggtctaaatactctattctttgatcaaaatattagaagacaaaacaaaagaaaaatgaaggattttttttttataattaaactagtctggtacagtgcaatctaataggtgtatcatttgataacacacgttgagtttgtgagagaaaagttaaatttaattttcacaaaatacattcttagaaaaaacaaccaagaattaatgtcacttatagtttatttgtatagttcactatcatcgatgaagatttagtgtgctaagattttagattggatgtgatattaagtgctcatgaatcattgatgatgattagatatttattatcattattatttgaaaaaaggttaattatgtaacttgaatggctttggaagtgacatgtttatttcatatatcaaaagatttttccccttattttaaggtcaattttagctaattaaagcttgtagtgacttatattaatttttttccctagtatctacttcctttatttcttgtgtaacataaaaccaactaaagttaagaattccgcaggaaacacaacatttgtg

SEQ ID NO: 24545 - DNA, 859 bp, Glycine max
  Intron number 1 from transcript Glyma11g08340.1 (locus Gly ma11g08340) derived from phytozome v7.0 (chr-ID Gm11; pos 5912351 to 5913209 reverse strand)
acaatcttaaccggagagatcgggttttctcgtaggtaatttttccttctcccctctgctttagggttttcaaaaaggtttataaaaatgcaattagagaatcaataatcgaaatcaccaacatcaaatgcccatactgaaatatatccgcttcccctgattctgaatgatacaaagtttacgtctttaccctttttcgctgtttggtatgcttgctggcactgtgaatcatacttctttgtgggttttctttgactttttgtgtcttcctcgtaccaagattttttgtctactatgctgcccatttcaccagtgcaaaccattctctcatttatcgtcaatgtgttggttttgtgttgaatgcactttttgattcaccactctatgcagtgtgcacctttacttattgttagccatattcaactcgaatcctatggcaaaaaaaataaaaataaaatagaattcacaatgtgtttggaattgtgtcaaagtgactaagacccacattgaggctgaatctacagcgcgtgtttggtgatggattgatcatgtgtcgtaaattttaacgggcatacatagaagctacttttatttgcttaagaatggacacacatcccttgtcctaacagtaagcataagcagaagctatttctatttgcttcagaatgggcacgcattccttgtccttacacatggacaatatgttgcattgagttagatgtcatttcttgctgtgtgaaatgtgaatgcagttccaaacacctacgcactcttgttattaccatactattgtgtctgcacgggtattgtgtgtgtttatgtccctctttatcaaatacttatgtacattaaactatag

SEQ ID NO: 24546 - DNA, 757 bp, Glycine max
  Intron number 3 from transcript Glyma10g16410.1 (locus Gly ma10g16410) derived from phytozome v7.0 (chr-ID Gm10; pos 19487420 to 19488176 reverse strand)
ggttagtaattgaatgaactaacttgtctagaatgactgatattgtatcagcattccattcatatattctgatctctgtcacccttttcaatagtctttttctctctcacatgcacatgcacatgatacacacattcttcttacctggagtccatgaatttacagcacagatatctggttgatccgggtaaacaatgaacctatatgaaattatgaataagaatacatctacactttattgactaggttctgttctttcttactgtcatagtaatatcttctggaagaaaactgtattgagatgaactgcttggcagcaaaatatttcaattatgaatgttcacaaagctttattaagaagtatcatacctttttctccatgaggaattggacagtagtccatgcgagcatctctgaacattattcacctgtacacccattatcttgttaataaagccttcatctaatagtaagttcaaacttcaaacaaataaagcaactagggctacctatttttgagataaaaagcaatgacattttccttctgataatcaggcctagattaggaaataggaatttgcaaatagaattcttttgatactcatgaaaaataattgatgccaatttgtttctacagtattgcaattagctgcttattctgctttttgcacttaggcttgaaaagttgcataggattaaattctgagttattgtctctgtaggattgacatatctgaaggcaagtttttgcaatatt

SEQ ID NO: 24547 - DNA, 793 bp, Glycine max
  Intron number 3 from transcript Glyma09g03540.1 (locus Gly ma09g03540) derived from phytozome v7.0 (chr-ID Gm09; pos 2531199 to 2531991 reverse strand)
ttggtggtcaggataaggtgatcattggttgaatcatatgtcaaattctctctcatttaattttttgagtgcttttgaactttgacattagcttcactagttaactgtgataaaaaagtttgtccaacacttcccattttatcttacagccataaaatgttgtaattcgcatcataaaagtggtattgtagaatagtagaagttatagaatttagaattctgtataaggatatatagttagtccaattcctgcacaagaaaccaaccctccagttagaaaaagtgacatgaaagattgtacaaatcgtaaaagtatgaaacaataagtgttatgcttgagctgcaaggatgccccatttgtgtgagagagtgtttacatgggtaaggcttcttgcaagatcatgatggcactctgaaattaaacgctagagttatatattcttgtacaagtgattgctagattacattaaactatgatttgctactttcttaaagtacataattgtggttcatgtatgtcgtgggtctagataaacttctaaaaaagtacttacaagaagaaaataagataaaatgaattaagtttctctcacaagttaaatgaaggaacctgcatattgtgagagaggtttaatttattttaacttcttatcttcttctcctacgagtaaaaatttattgaaagccttaatttatttctatcaacaatgatgatgcaagaagtaactagaaattcagtaacaaggggttggtttcagattcgaccattgtggagacactatttccaaaacac

SEQ ID NO: 24548 - DNA, 917 bp, Glycine max
  Intron number 1 from transcript Glyma09g03540.1 (locus Gly ma09g03540) derived from phytozome v7.0 (chr-ID Gm09; pos 2532342 to 2533258 reverse strand)
ctcggtggacttctctctcttctcgttctaatcatgtgagtttgtctcttttttgaaatatgaattcaattcctttcatatatttctcgtttattgtttgtaatgtattcaatttgaatttgtgtataagatttcatcgtattgatcaaagcatggtcccattgtgaaataaatttctttatatgttaacgatttccggttgtgactcgattgaattttcttgtaaggaactgaatcacttattagctgatctatgaattgggcttccgtgatgtataatgttgattatataattcatgttacattcattcttaagattttttaatcataaagaattattcactcaagggagcaaatcacttttttaagtttatttatcgttctaaaagtaagagagaatttagatttagcatttgcaattcttccctatgtaaaactctcaagcattgtaaatcatggattttttggttttccgtgatcacttaggttgacattaataagtatcgctttcgagaggggaaattattatatgaatcaagtccagtacacggccatagttctatcaatctccacatgatatataactgtgttttttagtttataatgaaattcgattgagtatcaagtagagattgatgggaaccatgataatttttaattcaagactatctagtaatttctcctcccaccttagctggtgttatgtgtaagttttgctggtagaacttacaataaggcacttcataggaaaatatgaatttggaataacaccagttactacaaataatattgcctatcattatcatgttcataaaattttaagttaattcaaaattattttactattatgatgtctatcctagatcttgcatttgatgcctaactcctccactttggggttattgtaatggcagata

SEQ ID NO: 24549 - DNA, 544 bp, Glycine max
  Intron number 1 from transcript Glyma10g04560.1 (locus Gly ma10g04560) derived from phytozome v7.0 (chr-ID Gm10; pos 3520187 to 3520730 reverse strand)
tacttcgaaggtacatacatacaaaccctacccctttcgctaattgatttaacttgatctcgttttgtttagatttaactatatcactattctgttatgtgttgcttctatagttctattattgtgagtgccccgttttgtgattggggcattcactctgggaagcatatagttgtgaaattgccagttttaaacagcatgatgtttattatctctttgcattgtgttacctgtctgctggtaaatcccttattattcgatcaacttaaactcccaaaattgtcattggtttgattcctgcattgctaaatccctaatatagatttattgtgtaatttgtgccctttagacttatagggattacccattcaatgatacttcttagtgttttaggattaattggacaatttttgctcattcaatgacactccttagctttttaggatttattggacaattttagctctagttttctttttgatcccgtttaacctggataatctgtgcttatgttttcttcatcttggtatgctttctgcagata

SEQ ID NO: 24550 - DNA, 167 bp, Glycine max
  Intron number 1 from transcript Glyma12g29130.1 (locus Gly ma12g29130) derived from phytozome v7.0 (chr-ID Gm12; pos 32505595 to 32505761)
aaatacattgaacggggtcacaaggttagcttcactttcactctaatcctttttttaaattcatgttcttgtcaattatttataatccaaacacgattcatgtttagatagcacatgtattgtcatgttttgttttttgaattgattgattggtgttttccagattg

SEQ ID NO: 24551 - DNA, 1030 bp, Glycine max
  Intron number 2 from transcript Glyma09g00770.1 (locus Gly ma09g00770) derived from phytozome v7.0 (chr-ID Gm09; pos 412678 to 413707)
agaaaattcaactcaaacgacttcttttcaaagtggtcagcttcttttcttttatatttatgttactcttgtcatacccaactagtataaatgtataataaccaaaatttctaatatgagtacattatagtccacttgactgatgcttgaattgccctcccttcaaagattaatattttctgtattttttttatggctctaagcattattggtttgaataattaggtttgaatttctgctaaaaactatggggctttaaaaaaattcacatgaggattctgagtgaaatttcaaagtttactggactagtgttcaaatcaaaacattatggattctgttaagtctgcaaattgatggcaacctggtcaaagaaaagaagaatactctaatcacaatgttttaaaataaactaaaatggatgcagcgaacaaaagttgatccagttggtaaggattggactcaaattccacaaagacgtggattcaaatcctattgccgatgtgaggatcttgttgatggatgatttataagtagctctgtaagtgcttagtgagccttgaggcatgccctgacgcttggtgagtccgagggacccagctcactcaaacttttctttataaaaaaaatgtgtgcaaattggtctatctggaaatgggagtgtaatttttaaaataaaaggggaagatgatgtaatttaagcatctcaaagaggagtgtattttattcttctaatatttgtgtggaagaagagtgccagactattcaggttggactttttggggattggggtgatagaaaattggaactctattgtcaaaagctgaaatgttttttttttttttcacaaagaaaaattagcatgttgctgctcattccgatgagctatactgcttgcttaatcatttatgtttaaactactataattatgtgtggcttgtgctttttgttgttatatttatgcattaggaatcatgtaaatcgtttatttcatgcagatttttggagccgcttatcttggaccctttggaca

SEQ ID NO: 24552 - DNA, 728 bp, Glycine max
  Intron number 3 from transcript Glyma10g39760.1 (locus Gly ma10g39760) derived from phytozome v7.0 (chr-ID Gm10; pos 47386102 to 47386829)
acttattccattctctggaacaaccaccagatagtgttagttccatctcatcctaccagttgctgctataacctgtgttcttatcacccaaaaaagtgtttatgttcttcaaaacgtttttgcaaatactatcctttatgctgttgtcggtttaaagcttctcttctcaaaagtcaaaagtagtacaggacgtgtttgtgaggttgaaaaaacgaatatgttccagtaggacccttaccggggtggccctagtgttataattgctgctagattaagatttagataatgcacatatgataaatcatgtggacagtactaagaaggattcaaggaaagagggcttttcttaaaaggactacaaatttcaagggtaaaaaaggatgctactacttaaaatgggattttaagctttgtccttgtaaccactttgggcaattggtatatgttattcttgatgcatgatatgcagtatttcacttttacaataattatttttaaaaatcattctaattatgatttttgactaattgactatataatttgttttaacaatgacaactaatctggtaattttaatgtaaaatgaaactcaaatagcaaacttaaaaatattcatatctagcttatgtatttctttctaagatgaggtgaatggaacgttgctgactgaatgatgcaattaattctgaacaggttttttgtggatagagttccagtgagggtgttca

SEQ ID NO: 24553 - DNA, 1002 bp, Glycine max
  Intron number 1 from transcript Glyma09g31030.1 (locus Gly ma09g31030) derived from phytozome v7.0 (chr-ID Gm09; pos 37781215 to 37782216 reverse strand)
cttcttttgcctctgtcacaggtttcagtttattggtatgttagttctcttttccttcataagtttaaactgatggatgggtgggaaccaaggttttaaatatcagtcgtggtcgcgttacgatttcatcacgtttgttgatattgtgaaaaattgcggccaacgcaattccaattgtggtcatgttgtggtgacaaccagttaaaaaaccttaacgttacgacctgttggaatccaaatcacggtcgcggatccttttttaaaaccttggtgggaacaaatgaatgattttattgtacgtctctaaaacttgggaagtcaacatcgttggttcaacacacttgctttttgcaaatcatcaactgttgcaacatggtgtcaagaactccactagctgtctataagtataagctggatacacaatttacttttccattaacacttacctgagaaagaaaaaaaataaggtaaaatgcattgagcttctcccataagctaaaatcaacttatgcaccttgattttgggagaagtcaaataagagaatttttataaataaaataaaattaagtgtataagttgatattagcttttaggagaagctaaattcattctaccttttcttttttttcctggtgctgaaatttaaagtttcattacaaaaatcagggatacaagaatcaaattctagatcacttggtcctagctagaggctttgattatatgtcatgaattaacaattcctaaagtttaagctatttggcaaagacaaatgaatggttagatatggctgagaaagtcatcattattggttcacaacaattgtgcaggttgttaccaattagacttctgtgtagcagaatgaatattaatagttgggagtgtgaagtgtctatggtttacattacaaacatcttttcaaggataatggatgatggtttgcattacaaacatatcaattttttttcttttctttgtttggtttttggttgaaataggtagga

SEQ ID NO: 24554 - DNA, 1031 bp, Glycine max
  Intron number 2 from transcript Glyma08g47180.1 (locus Gly ma08g47180) derived from phytozome v7.0 (chr-ID Gm08; pos 46106283 to 46107313 reverse strand)
caggttggttgttttttcaatttttttatttatttttgaattgtgcaaaagggtgaacattgtgggaagaattttgatttgacggttctgtgttgaagtgtttttgtttggttgattattatgacgtaggttagttgtaattgtcaagaaatgttttggttagaacttagaagtttgagtcttgggtattaccttctcttttggttagtgctgttagttcttaaaactgcattttgtatcttccatagacagctcttaaacttgatacttgctgtgcaaaatcaaagaacattgtggaggcgggaggaattgaacaatgatgtctttgttgaagtattggttattgatgattgttgtgatatggatttgttgtgatcatcaataagacctggtttggataaatttttcattaagcatataggagaagaaaataagaaggaaaaatgaaataaagttcttcaataagtttaaatcaacttacacacttcaacttttatagaagctctctcatctaacttctccaaaagctgagatgcataaggtgaatttaatttatggaagaagtttgattaattttgctttatattttcttctcctataagtgcttattgagaacattatccaaactagtgctaactgtaaagcttttaaaatgatggttattaccttcgatttaagttcttaggtattgcttttttttttttgtgaatgttgatagtttcctaacactcccgtgtgtcttctagagacagaacttaagcacgatgcttttagtataactttgatgaatattatgggaagaatgagacttgtgtttttactgtaatatttttgtttcagtagtttttaactttttatgatgtggatctgttgtgattatcaagaaatattatgcttttcagtgatggttatcatactgtgtttggtttgatttcttaggtgttaccttttggttaatgttgtttgattcttgaaactcctttgtttgtctttcagagacagcactgaaacttgatactttggttggtgat

SEQ ID NO: 24555 - DNA, 382 bp, Glycine max
  Intron number 1 from transcript Glyma09g32690.1 (locus Gly ma09g32690) derived from phytozome v7.0 (chr-ID Gm09; pos 39195005 to 39195386)
atcttggtgtttcaggtgagttaattctagctaccatcttcaaaataataaaccatgggaaatttagcacttttttgttttaaaagttttttttcttaaacaattctacattattgatcagcaattaatttctcacgtaattaaaatctatcgaattttgtaaattattttcaaaaaaccgtttaaaaaccaaaatattgaatcagctgagagatattaacttctcattcttttcttttgtttttacagttctttgttttctaaaatagtaatcaaacaaagaccttaatgttccctgcatgttttattaaattttgaaagataaaataacgttggaatcttttatcacttgttgcttggtaatacaggtggagttacctcc

SEQ ID NO: 24556 - DNA, 878 bp, Glycine max
  Intron number 1 from transcript Glyma09g26790.1 (locus Gly ma09g26790) derived from phytozome v7.0 (chr-ID Gm09; pos 33435162 to 33436039)
ctgaggtgagaaaaagcttttactcgagggatatgaataagaaagttagatatttctccaatggtactctttatagagaccctgctgcaaactggagggactcaattgtttttttgttactcctgatcctccgtatcccgaagaaataccagcagtatgcaggtactaattttgttttgattacacttgataataacaatcattcttattcagcagtgattgagattgtatatttttcattgaataaaccatcaatcttggtccatcaagtattattctctcctaaattgttcatgaagtaataaaactatatgtattccctcaggtattattgcatatctatcaatttagtccctgagttgatatatcttattagggtttaagaaccaatttgaagggtttttccatacttgagagactacctagtatgatttctaatatttgagggattactaatatagtttttttttttttactttaaaaactatttaggaaaaaggataatatttctgttttgaatttgagaggtttattattttttgtttttaaaatacagactcaatttagaaaagttgtatacaagcaaaagagggaggtggtttacaggatatttttactatttttattttctgcttttgctaatgattacaaaaatatcacttgtaaaattatcattgaaaattaagaatgtttgttatcataagatgaagcaacatcagtagtttagcaagatccatatggaaaagagtttcactcttcatctttattgtgtaattcacttttagaccccatcaaatttagactttttccattgtctatgatgaaataatcatgcatttgcagagacattgtgattggatattcagagaaagtaaggg

SEQ ID NO: 24557 - DNA, 873 bp, Glycine max
  Intron number 1 from transcript Glyma12g30960.3 (locus Gly ma12g30960) derived from phytozome v7.0 (chr-ID Gm12; pos 34592096 to 34592968)
taccgggagaggagtccttaattcacttgctgaaggtgagtcttctttggtttttgttattttattttatatatattagttttccaatttgatatgattttagtttagctagtataaatcttcctccatcatctgtgaattttatgttgaacttcattttttgtcctgttagaatatgggataaatatagccggtggtgccggtgctttcatttgcagctctgacatttattctctgttaattaataataatattttgaaatgaggttcattggttgccacgtggcagtctcgtggccatgcaacatgctattattcctcctcgttcatcagttcatgtgcttttgttgggaaggaaggttttgggactgatgtccttaagaatgaagttgaggtggacctgagtttcttgggaagcattcttttagaattttatttatttattttatatattttaattataaattttggtatttttattaaataaaatgatagaaatattaataaaataagaagtaattatgtttttaaaatgaaaaaaattagtattttaaataattttgctataataattattattttaaaatcgaaaaaaaaatggatgatggttattccaccgccgaacagagtgtgctgacgtgaacatcacactgatattctttgttttgttttctgggattggatgaagaatgttgagaattgaattgtggaatatattataggctctagaattatttttttccatgtaaatgaatttctcgtcgtttttatgagggagagttccactcattcatggcttattcctcttcttgttgtcgtctatcctctctcacacacaggagattttgtttgtgtatagttgctgcttcctagc

SEQ ID NO: 24558 - DNA, 384 bp, Glycine max
  Intron number 2 from transcript Glyma09g32720.1 (locus Gly ma09g32720) derived from phytozome v7.0 (chr-ID Gm09; pos 39211156 to 39211539)
tttccaagttttcaaggtatcctagcaattcttcaatatgttagatgtatagcattgcgttagagtattattcttttattattataatctcatatatcagttgcaagttgtcctgtggttttttggttagtgtgctactatgatttgattagatttggaacttttaaaatcaatttcaagaattcatgtcatttaatcctacaagtttaaatatgcacattgtcaactagacttcctctgtaccagcaataatttggagatcattccatctgttggcctggaaaacaaccccctccaaaaaaaaaaaaagaattctgtgttgatgcataggtcctctttcagtagataactgtaacacatttatacatctgttcttcaggagtt

SEQ ID NO: 24559 - DNA, 838 bp, Glycine max
  Intron number 1 from transcript Glyma10g13820.1 (locus Gly ma10g13820) derived from phytozome v7.0 (chr-ID Gm10; pos 15673434 to 15674271)
aaattagggacatgtttgattcccatctcctattttttcattcaaagtctattaaattttgaatattgttttcaaaataattgttttaaaaatgaaagaaaaacagaaacagctaagatattttctcatattttgttttcatcttgttcaatttttcatttggtctgcaccttgttcaattctgctgtttgaccaatcttgtaactacaatttgaaagctaaaaattgattttgaaatcagaaatcaaacactcattgtttagtctttactggttatttatttatttcaattcttgtctaatctttcataaaatagaaaatattttctgaaatcacccgtttaggaactagcgagaccctgaatgatcaaccgcggaagagcttgcaaaggaaggggcagttaatctccagtttgacttttaaacatttgtttgagtccttagtgtaatattttaagtgatgttggtttgtccaattttgcttttaaattcatgaaaatgctattcttttccttcacaatgatcattgatgacaacaaaagcacaaagtgtaagcataataggctaacccaatgccaagcaatccttcagcttttttttgctgctgattagaataaatatcctttgatttccgttcaagtcattccattcactttattccccacaagaattctagagtccctcaatataaacacacccacattcatattgagcacaaatcagacccgaaaataccatcacacttgagtgaaaatcttcattcattcattcaccttaaaagaaaatgccttcaccagtgcagccaagtcactctccatcatctgctgaaggtgagaaac

SEQ ID NO: 24560 - DNA, 806 bp, Glycine max
  Intron number 1 from transcript Glyma12g33780.1 (locus Gly ma12g33780) derived from phytozome v7.0 (chr-ID Gm12; pos 36977597 to 36978402 reverse strand)
aagactttccctgttgaggcatttgctgctggccagtaacatagttaacaaatgttcatcatgaagatgatactattatatatagatgatttgcatggggtgaaataagaaataatagctttgattctctactatgtaatgggatttaattcaacgctatgatatccggtgttttttgtttacttatcttttcgagctttatatatggcaaataattgatatggaagttgtgataaacttttgagttaacctattattgctataccaccacttttttctttcacctcatttctacctatttgtttctatatctcttttcatctctgatcacatttgtaaaataaaataagaagaataggaaaaatatatttagaaaagaaagggtagttaatgatcaggttatgtttttctttcacccgatttaaccttgtttgtttttttatccatagaaataaaaaacatgtattagaagtttataagtttatgactatttaggcatcctgctcaatctctgatttggtttaacatgattactggaattaacctagatttttattttgacaaattgatcgagttgacagtgtaaactgggagatatgatcatcgtcattcgctaatcacttcagtgaagtttaaataacagtcaaattgtccagatgatttattaatttgcattaatacacttgagcaggcctaaagttgttaccctaatgaggcttattgcttcctgcacttcccaagttacttcttgcactctttttggaatgtgcttttgaccttttggattggtcattttggaaggaaaa

SEQ ID NO: 24561 - DNA, 418 bp, Glycine max
  Intron number 2 from transcript Glyma10g11030.1 (locus Gly ma10g11030) derived from phytozome v7.0 (chr-ID Gm10; pos 10984525 to 10984942)
ttatttctaattggtgaaagaatattcattgatatcgtaggactggatatatattattaattttgtgggaaggaatttcctcatgtgacattttggtcgtgtgaaattacagtctttaattcaaaataagacagagaaaatttaaataataaaagaatgaagacatgaagttttgatgatggagatttttacatgagaaaatccaagtggtctcccttgagaggaatccactcccttttgtattctgtaacagcataactcatcgtgatttccgcttcagtttaatttcatgaatgtcacttcaaattcattgtagctttcctcaaatattcttcttactaaataggtctgttttttgttaacaatatttaagaattttcaatcggaatacaataaaaattaaatgataaataagatc

SEQ ID NO: 24562 - DNA, 683 bp, Glycine max
  Intron number 1 from transcript Glyma11g33110.1 (locus Gly ma11g33110) derived from phytozome v7.0 (chr-ID Gm11; pos 34877142 to 34877824 reverse strand)
ttgtaagtgtaacaatttcttctactactacataatgttcttaatcatacaacaaaattcagaatctgtgtaatatgtatcaaagtataaagtacaacaatttcatgttgtttgaacattaaataattaattaaccccgtgtcacagtcttcagctatatatctctttcacgcactctcactttctatcttttttttcatgtaatttatatatttgatgttttcccaagatcaaatgagactacaaaagctatcttgtttttatttgtaccagaaacattttcaaaagtcagaacacaaacatatcaaagtaaaaaagttgagtaaattccaataactaatgatgcatgcatattttatacaatattagtgatacgtcgtcatacattctttaatacactctttttgtggctctcttttatagcttaaactttacagaaaaatataaaattataaataaagtctattaaataagaaatgacaagattaagacaatttcatgatttttaataaattttagttaataataaaaaagtacattaaagactcttgttagcatttctcttttatatacacatatatgattcatgctaaagtactcaaagattaattatctggagtatacatatactaattttctggtttatgcaacaggtatcggtgctggcccctaacatccccgcg

SEQ ID NO: 24563 - DNA, 515 bp, Glycine max
  Intron number 2 from transcript Glyma12g04810.1 (locus Gly ma12g04810) derived from phytozome v7.0 (chr-ID Gm12; pos 3178595 to 3179109)
tttgctgtagaaccttgcagggtcacacgggaaaggtacccttccttgttcccttttttttttttgtgatatgttttgcttgcttgacttgttctcaattttggtctcttaacttgcttgacttttcggtttctagagcaccacagtagctgcttatcacttttcagtttgtggttcgttaaatgattatggaattatctcctcaaacgttaatgagtttgaggtcctgtgtggataaattttttcataggagaagataataagcagaaaaaaattatataaacttctcccattagctatctagctatctagctttctttttgtccaccccagtcgtgacttgtgagatagtcttgttctgtcttacatagcagaaatcatcgtgcttttgatatactacatcagcaatcgttgtagatttcttctaatcatcaaacttgcagattttaggttgacttgggattgctttcaaatttataggtgtattcattggattggacttctgaaaaaagtca

SEQ ID NO: 24564 - DNA, 999 bp, Glycine max
  Intron number 3 from transcript Glyma12g08430.1 (locus Gly ma12g08430) derived from phytozome v7.0 (chr-ID Gm12; pos 6173284 to 6174282 reverse strand)
aaccggactggtttttaaaacgggttcgtgaactggtttgtaaaaacctgttcgggaactggtttttgaaaaccggttcgggaactggtttttgaaaaccggttcgggtccggaaccggactggtttctgataaccggttcttgaaccggactggtatttgaactgtttttctttcaaatgaaaaaaattgattcaggttaaaatttcaaactggttttgtaaaaataatttggttaacaaaaatggttttgtaaaacatttttttttcaaaccagttccattaaacccggtttggtatccgtttggttaggatacagtttgggtttttttccacacacctaccagatttattttaagttttgaaatgttcagttaatgatttaaaataaatatcttgccagacagcataatgttttagcaatttttagctaaatatttgtttctgttttttattttgaaaagtgaaattattggcttgctatgcatgctcatatatttctcgtttaagaagaaagcattggataatctacttagatctttcattaattattaatccggtttagtgtgcaagttttttagaaccgagttcatagcagacatataagtttattggctcaattgtttgctttgtatcctcatagcagacataatctatcttttgataatgtgcaagttttctagagaatgtggtagacattcccggtttagtgagtcttacttgtagcttgttgttgctagcgtgcgtgcacgtaagttgagcgcctagcccggcacctgggtctgtagcatggccattctaccatgtttccaaggtcaatatactggttctcctttgtgaatgtaaccaaataaggtaggtgatattgtaatgttgtgcagcaaaaggacatttctgccatattaattgtaactatttgttaatgctgaaattatctgtgttgtattgatgcatttgcttgtgtattttttacagatagagtctctatctgttacgttcc

SEQ ID NO: 24565 - DNA, 949 bp, Glycine max
  Intron number 2 from transcript Glyma09g09200.1 (locus Gly ma09g09200) derived from phytozome v7.0 (chr-ID Gm09; pos 8787058 to 8788006 reverse strand)
cttataggctgcagcttgagcaacgtgtacaacaggtttaacatttttctcttctatgaacatttatattcttgtttgtgttagtttctgttctcgtttagaaaacaccagaaaataaggctcttttcaaattgtagtagccaagtaagtctattttaaaaatcaaatgagacctgtgttagaattcgattgttaggtatgatgagacttgagccccacattggaagtatgagattctaatgtggggtttataaggcccttggctctccaattaaaatagctagcttttgtaggttttcgcatgattcgtaccaacctgcctagtgttaagagagaagggaaaactgtaacctagctgttctttggaaattgccagggtaatccccatcagccaattgaaaatataacggtttttgatggagagggtgtcatgcatttgattgttaaaataatagttaaatgttggtgattgctgaggagtttcattcctcataaatctgaagcacatctattcaagatataatagcggtactggtttattatttgcgcttttgttgtagtcaataggggatcatgttgacttaagtctgaataattagtaaattgttaaggatcgggcttttattgtgctgatatcacaatcttataaaaataggtaaagcaagatagtgaagatatttcatcatgatctttctctctctctctctctctctctctctctctatatatatatatatatatatatatatatagattttttttataatttttatttttttcatcaccttttcacatgggggacatatgaatttaaccttgtaaccttcattttttgccgtggtgattgtgaagacagatgtgggatttcctctgtattttcattctgatgtgtataatgttttccaatgaaaaaggcacaagcaaggagggcggccataaataaagtacc

SEQ ID NO: 24566 - DNA, 648 bp, Glycine max
  Intron number 2 from transcript Glyma11g03610.1 (locus Gly ma11g03610) derived from phytozome v7.0 (chr-ID Gm11; pos 2424686 to 2425333 reverse strand)
tttattgcacagctattttttctttcatttggagggtaaggaaatctaatttaatttcttctatcatttcttttcgaaatccatattttacgcatataggttctacctcaagcatcaaattattttctcaattcgctttgtctcttattcggaagtggaaactattttgaattgctagaatcttcatactattacatcattgaatgacatatcggtaatgcatcaaagttgattattttgttgttttgtttgtcctctcttcagtgattcagcagtccaattgcaggttgtgtttgaactttgaaccaaataaaagttgaaattgaaataatgtttccctaattgatatttatggagaagaaagacaactagtcaaatcatataacaatcccataattttaaggtttatccaatttataatattaataattctctgccttagtggttctaacgttagtggagtttttttcacccctgcaatctttttgccacaaacgccttctctaattatacgtaatagttttttactttcctttttatgattcggttcttcatatttctaaaacatgatacaacgttgttgtttttctttctcatggccgttgttatgcagactaatcttccagtatttattcctcaaaggaatca

SEQ ID NO: 24567 - DNA, 220 bp, Glycine max
  Intron number 1 from transcript Glyma10g40910.1 (locus Gly ma10g40910) derived from phytozome v7.0 (chr-ID Gm10; pos 48150810 to 48151029 reverse strand)
ttatcccctccggttacccctgctccgagtatacggtactctctttaactccataatccaagcttcttctctcttttcatccactccgcatcacaattctactatacctcattttcatatatcatataccgttccgttctgtttctgtttacagttaatctcaaaattgaataacggactcctttcttttgttttgttttgtttcagattcaaaccaagg

SEQ ID NO: 24568 - DNA, 464 bp, Glycine max
  Intron number 2 from transcript Glyma10g38530.1 (locus Gly ma10g38530) derived from phytozome v7.0 (chr-ID Gm10; pos 46312195 to 46312658 reverse strand)
gctgtaggcctcaatccaaatattagattctataggttcgtttgttttctgaggctaaactttctcctgatgtagttactagttagttagtaatagtatagcttttctgtttgctaaagcttatatctttggacattgcattttcatttagtattccatcattggagcatcaaaaaattgacactacatgtgacaccatatataattatctatatgcggcacttactttttatttgttttcttatatacacatcaaatgttgtcccactttgatgttcatcaaatattttccttttagtttatgctatcctcttcatgaacagaatacaccactggtctctttaaatttggttctgagagaaaaatgttgataatttaaatgcatttgtcttcactagtgaatagtgatgatgtacttttgcatttcaggtacaaggttggtcagcgctttggacggcatattg

SEQ ID NO: 24569 - DNA, 612 bp, Glycine max
  Intron number 1 from transcript Glyma11g37460.1 (locus Gly ma11g37460) derived from phytozome v7.0 (chr-ID Gm11; pos 38563785 to 38564396)
ccttctcctctcccgcagaaactacttgttacgaggtgagtttttttttttttttttggtttcgtaatctcaactttttatgttttttttttgttgcgttggttactgagaattggtgttatgctatgtttggtttttggttgttgagagaatgagagggaggttgtagtgtctgtaactgcattttgtttcgattttagatttttttagaattgcgtttccttctgcaacttaactattcagttaaaagcgttggtataattataccatgcactgaactgtagaacttctcgccgccttcattttatggattcatttgccaaagttttgaaaatttctataattcaatctcacgttgtttttgtcgaggaaagcaaccacgcatgggtttcgatgtcactggtaaattcatcaatgctattgttctgttatggatatatatatatatacatttttaatttaagatttatatcaatattacgattttgcagtttcttctgcagtgttgagtctgtggtgtggtgacttgttatatatattggtatttatttattttttattttctttgtgattccagggtaaccccattcttgcgcttggagaatctatctc

SEQ ID NO: 24570 - DNA, 709 bp, Glycine max
  Intron number 2 from transcript Glyma11g26470.1 (locus Gly ma11g26470) derived from phytozome v7.0 (chr-ID Gm11; pos 25465869 to 25466577)
taaacccaaggacaggtatgcataactaactcttttggtgcattgtctttatatctagcatctgtacaatgtagtacatttattttttttgtgactaatgttgggctaataaatagttatttttagtgagtgaatgaaacaattataattcctttcatagatacattctcagatattgttgttttcgtcgtggtcttctgctgttgtctagcaacatttgcagattctcttgatagtcactaggctgagatcattgtataacgtttctgtgcatgttagataaattgtcttttcttttcttcaatcactcgtattgtctattgcctatccaaggtggttcaaactgtcttgtcagattaccagcgactagcttaacgctgagccacctcaaattattctgattgtcttccattgtaaaatttccttttattgattttcattcacatatacatatatatatatatatatatatatatatatatatatatatatatatctcctttaatttaccctgacttatattaccagaaatcttgaacaaaacctcaaagtaatggaatagtatttattactatcattgaagaatctaatttttgctttttatgtatacttgcactaagatttggaaatttacactaatctacttgatttgtttccatggatttgataattaggactcccaaaattgcgcggagggtgggttgatagg

SEQ ID NO: 24571 - DNA, 351 bp, Glycine max
  Intron number 2 from transcript Glyma12g11100.1 (locus Gly ma12g11100) derived from phytozome v7.0 (chr-ID Gm12; pos 9111054 to 9111404)
aggcaactctcaactgcttgccttattttaacttggtagtgtatctcttactcttgcttttggtttcgaagatcttatattgattagtgatatgatcaaaatagtgtatataaataaagttgtagaagtaacttttgacttcaaaattgaactttttggattgagtttagactaaaatttgtatttactattttgatcatatcatatctctaattaatatgaaattttcaacaacttcacaaaccaaagattaccaccatgcatggatcattcactaattatatatccttttttttttctctcattttgattgtgttgttgatcagggttgtgctggccattggattgtcc

SEQ ID NO: 24572 - DNA, 620 bp, Glycine max
  Intron number 2 from transcript Glyma11g12960.2 (locus Gly ma11g12960) derived from phytozome v7.0 (chr-ID Gm11; pos 9271192 to 9271811)
gctgtctttgtcgtaagcttattagctccttctacacccattatcatgaaactcatgagactagctgcaccatttggatggataacaacacatgaaaaaactaaatttaaagttaaactattatagacgtgtgaatcagctgttcaactgaggaaagctggtaaagtcactgtgagggaatcaaacttgaaaagattaggtgctactcattttaaagccggtgtagcagctgagcatttcgaggtatatctactttcaataagagcatatatatatatatatctaaaagtatggtttatttgttagttagtgtcaactatcaacatgtataaaattgaaaataacattggtcagatttgttatatcaatgtttgcattaaaatttgacgctagttgtggcattaaggattgagattccatccaaatgcatgagagtagtataaaataatataataggggggaaaacatgtacatatctcagcactttatgataatcttgcatagtgagtgcttgtttttttgtggagtaaagagagtgctttctagaagagtaatgcatagtttattcttttgctttgtattaaggtaacaaagttggcactattggagaccataaaaga

SEQ ID NO: 24573 - DNA, 596 bp, Glycine max
  Intron number 6 from transcript Glyma10g43790.1 (locus Gly ma10g43790) derived from phytozome v7.0 (chr-ID Gm10; pos 50353742 to 50354337 reverse strand)
aactgaaaaggcaaaataattttcttctttttattgtaattgattaggttcatcagctcatggcctatcttgttctaaaatttaatctgagaacaatactaaaatgcaattccttaggtgttactgttttcagagttcttcaattcagattagagtttcatctcaatgagtaacgcaataaaggttgacatttaaagttagcattatatatgaggtgaaactctattttcttttttgttagcatttattgatacagagtattcaccggtttttttataactaatttctgtcgaaaaatctgattagtcacttttagtaggattcttcccttacaacttacacgtctcagtttttgagtcatgaatatgcttcttagttatggctcaagtccggatatgtaaataactagacgtgcttcttgaaatcttcaatttggttatatatatttgttttggcaaatacagagttaagtgataaggctatatctcaaatattcaaattagtttttactctatcctccaccaatggctactaatggttgttataaaaatgtttccataggcggcagataaggaagagcagaattctggcttcat

SEQ ID NO: 24574 - DNA, 444 bp, Glycine max
  Intron number 2 from transcript Glyma09g07470.1 (locus Gly ma09g07470) derived from phytozome v7.0 (chr-ID Gm09; pos 6369220 to 6369663)
cttgcagattgtgctgttgtggtggaagaactctggtgagtctcaatgaaaaacaatagtacttttttagattaggatcctcttgtgctagcaagtcacataacattataacaatgttatgtttcatgatacaaagatgaaattaacaaccttatacaaataatggcatgacaaaacttagatacagttccttaagtatgtgtttttggtgttgttcttcaatcagaaccggagtttcacctagataagttaccaaagtgaaattctaattctgattgatcgagaggattcaatcttcaaattgacataagaagattcaaattcattttttttttttccatttggatattgggttaaggttatgctatgaatgttactaattgatgatgatattaaattgatgatgtaggtggaaggcattagactttgcttctcttaaacgga

SEQ ID NO: 24575 - DNA, 1008 bp, Glycine max; identical to SEQ ID NO: 17682
  Intron number 2 from transcript Glyma12g04020.2 (locus Gly ma12g04020) derived from phytozome v7.0 (chr-ID Gm12; pos 2636468 to 2637475 reverse strand)

SEQ ID NO: 24576 - DNA, 850 bp, Glycine max
  Intron number 3 from transcript Glyma09g32810.1 (locus Gly ma09g32810) derived from phytozome v7.0 (chr-ID Gm09; pos 39349939 to 39350788 reverse strand)
gaaggtctaatcttgggttgttgttctgctggtatgaactcctcttcacaaataattgaatgaatgcaggaaacagcacatgtaatctgcataacctagtacatttgagaaatcttaactttttaggctcatagattctctctagctgctggatggtggaacaaggaaagagaaagacacaggttctaggtgggacccgcttgtctttctcttcttacagtggagaggagccacatccaattttaagtcattaagataaaaatgccgcttcatagtctctatcttattcttggagctcacatgtatatattactccgagactgaaaaatgaaacttatcgcttgcatatttctattgattctgtatttttgtcctctgtgtgagtcttggctttctctctacaattttgcatattttaaatatataaaagaaagaacgaattatcccaaatgatgttaatgctatataggagttccttgtacatgaggttcatgccaccaaattcgtaaccgatgttaatctagggggtgacaaagtggatggatcggataaattttaatttgaattataatggatcagaggaaaataattcattcatgcattttgattccttaaaaaataatttcaaatatatgatccattcatgattcatttgataaaaatccatccaaattataggcttgttttacccacaaaagttctacttagactaagaatacatcttgcaaaattctgcaatgcattatttttattagagcatcaaacttttgcatcattagttgattgatgcattttatggttgagctcattttttagattgatatggacaggaaatttagggaacctgcct

SEQ ID NO: 24577 - DNA, 389 bp, Glycine max
  Intron number 4 from transcript Glyma09g39800.1 (locus Gly ma09g39800) derived from phytozome v7.0 (chr-ID Gm09; pos 44813302 to 44813690 reverse strand)
ccttataaagatatcagagcaacttggcagcacaggttagctataggtttcttttcattactttgagatgctgtaatgttaaaaacaagcaggaaaccactttgagaaaattgattttagtgtttcttttcattacataattaattccatcatgtatttattcttttcttattcttgtgttctgatttccaaaaatggttgaagtatggaattatgtgtgcttatataaacttataataattgctaccaagtttttctttacattatctgctttcttcttcttacattatctgatttgtggatgagttatcaacattaaagaagaaaacaaagaaagaaacaaaaggatttatcttttgattgcccctatttttttattgcagttacca

SEQ ID NO: 24578 - DNA, 530 bp, Glycine max
  Intron number 3 from transcript Glyma09g36920.1 (locus Gly ma09g36920) derived from phytozome v7.0 (chr-ID Gm09; pos 42501584 to 42502113)
ttgctgaacaactagagattgcttatcgtagtcaggtctgtatgattattgaaattacttttttcagagcatttgactttagtagagctcgtcagtctcgttgcatatccaccaaagacacttctctaatgtagctgtgcgctggagcaccacaaaatacttagaaaaccactttatcctctccagtcataagcatcaaatagcagcaagtattgcactgtcaaatgacctttccctccttttgatctttccaaaaccattttcttaaaaaaaatcttgttcttttcccttctaaaactgatactaagcagcaatgcatctagtcaggtaatgcagtttaaataatgttctctctggttctcctgtgtaatttagccttttaaaatgtttttttgactgtgggtttgggttagggttgggaaggggatagtcagttttcaatttgtgttctttgcttcagaaagtgaaaggcttattttttattgatttctataggtttggcaccggagaacatttcaaccatcaggact

SEQ ID NO: 24579 - DNA, 690 bp, Glycine max
  Intron number 2 from transcript Glyma09g33530.2 (locus Gly ma09g33530) derived from phytozome v7.0 (chr-ID Gm09; pos 39982123 to 39982812)
ggttttaaattggggtctgcaaccgcagcatcaaggtattttgattcaccgtaaccacaatttaaaaccatggtgacatgttacatatatctttttctattttactttatttgtctggaatttctttttatttttattttagtttactaaattgttggcaatgtaagaaccaagaatttagaatgttgctgatttgtcctgttgtgctaacttgtaagaatttagatacgaaattagttatggacgaatgaaggtatttccgtttccaaagatacaattatcaccatttttgttcaaatttttatgttcttattagtttattcataactctgccttgttcggataagatgataagtaaaaaaagttcaagtgaatataaaattagaatgttgctaaattgtaagaaattagattattccatgtatctgtagatatgatttggtctttaaccaaactgaatgacattgtttgattcatgtagccaacttcacctactatgataagacttttatgtactaacaaacaaaaaagaagagtgaacatctatttatctttccttttaggatatcttctttctatcttgttccggatgtttttctgactaatttctaggggtagtattttgtgtggcactaaaaaatgaaattcctttcaggtccgcaggcaagcagtgcttccacggctcaagct

SEQ ID NO: 24580 - DNA, 548 bp, Glycine max
  Intron number 2 from transcript Glyma09g03430.1 (locus Gly ma09g03430) derived from phytozome v7.0 (chr-ID Gm09; pos 2418343 to 2418890 reverse strand)
tggcatccaaaacaattggtgattttcgtagagtaagtggactaccaagcttatttttattgacaaatattagttattaatttttgttagttagaaaaaattaaattcacaactttttcctcttcttctcccttcaatcaccatatgctttattttcttaaaaacatatttcattttatgaaggaaaaagaataataaacaaatagaaacgtagtgcaatcacgtgaacttgttgttttacttggataacatcatgaaaccacttgtgaaactaattaaaattagggagtaaattgttttcatgttgatttgattaatgttgaagatgaaaactagcacaaacgtatgcatttgcttatctttcatttacatgcattagttctattggtgcatagaagtaaaaatttctactagcacaaaccttaacaacttgctcgaatataaagaagaatgtatctataaccttccacctctttctgttttataactcaacaagaggcttatgacttttatgcagttgttggttgtagttacaagcgcctataggt

SEQ ID NO: 24581 - DNA, 1006 bp, Glycine max
  Intron number 2 from transcript Glyma11g35920.1 (locus Gly ma11g35920) derived from phytozome v7.0 (chr-ID Gm11; pos 37495507 to 37496512 reverse strand)
tgcaattcacgcccaataagctttttgtggaggaggtatcgcttctactcattttcctttttctcttttcgagtgttcaatttcattttattgattatttatatattttccaatgttctgtatccaaccgaggagattaggggtttttcttttacgtccggctaagggcaccggttaaaaagtgttcgatacgcaccttatcagaaattttatttacttaataaagattgagtgatttttatgtttttggatatacggtgtgttttagaagagcttagttcagcttatgaaagtgcttatgacattcgtataaacttattttagtttatttttgtaagtttcacacagaagtttaacaaaatgagttcatgtttagggtatttcaagaaggttcatagtcaagcttatgaatgagctcttatgtgataagattatatcagataagggtttgtttggaagaggttatttacaacttaactagacttattttatgacaaacacttgtgctagcgtttgggagagcttattaaaatagcttatgatacgtctttaaaatgtttttagctgatttcaataagctatctaggatgacttaggaaaatagcttacaacttttgtgaaaacaatttaatccaatttcctcttcaatagtagaaacaacttatacatagttgcttatatgataagcacttactccatatgcccttgatttagatgtttacctacatgtgccctaagtacataatattcataaactcttgtttgatacaagtttatccaataagtacttgattaaattgtttatccaaacatgtttgtaataaaataaattatttttttcaataactactttttaacttttgttttctttgcgcaggtcttttttctttacactttccatttcccctccatattacagaattttgttggagcagtgagtttattgatgtaaactgattgtaactcttcttatttggtgtttccttccaggctattggggctgaat

SEQ ID NO: 24582 - DNA, 421 bp, Glycine max
  Intron number 1 from transcript Glyma11g01320.1 (locus Gly ma11g01320) derived from phytozome v7.0 (chr-ID Gm11; pos 777414 to 777834 reverse strand)
aaggctacctgtttgtcccttttctttccttcgcttctaaatttcccctaacaattcattcaatatttttcgaatctttttttttttcgcttcgaattgttattatttagttcaatcttcctgttattgtgcctcttttttttttttcatttcttataattttccactgcttttcgatttcgctttctccgaaaaatgcaatttatgaaactcagagttgatttaatagctctttgttcataaaatgttgggattgtcaaaggatttttgctgtgcattatccggagaaatgtacgtggagattattgagggttccttgattccatgaacaaagtagatttatctattgatactcgagggttgtgcattttgtgctgtgctgtgctgatatcttttacattattgtttgaattttcaggag

SEQ ID NO: 24583 - DNA, 986 bp, Glycine max
  Intron number 1 from transcript Glyma10g36720.1 (locus Gly ma10g36720) derived from phytozome v7.0 (chr-ID Gm10; pos 44808209 to 44809194 reverse strand)
aagtttgttgatcattacgcatttttgcagtacaggtttcaccctcacaatccatttctcgcttctgcaatgacctttgacttctctttatagattaatccaaattcttattttcggaggcaaatctagccctaccattgttatagctggctcaaattttctgattccaaggttttagggttttagtttaaaccatttcaattctttattaataccaacagttctatttaattcgtgataccagcactagaattgtgaatttttgattcaatagtgtgagatgtgatgtgactcttatgttaggtcaccttcaactacctcgtgtcccttaatttttactacatttagtttaatagtgatggagataacgccctatccaagacaaaggaaaaaaagcaaaaggaagggtaaaaaaactggatgcaaatttgacaatttgtgtattatgtgtggtgacagctagagaaacttgtactaacaatgtgttattttcagtggattcacactcttgcgatttcgttattgggaagttgtaggtttaaactagtttataaggaacatatcttctggggttgcttgaatggggaaagagatttctaacccatgtctttaatggtgaaaaatagctcactgtgccggttcttgttatcctttttgaaggaaaatttgaacaacttagattaatttttgacaacttccttgaagaatgtagaaaaggaaaaaaattgaacttcgtcctcccatagtgattagtaaattgagaatggaaagctgtgttcttatttttctacgttggcattttgcaagattatgacggttatttttatttttattgaagtttggtttaatttgttagttgattgctgtgtgtgagtataaagctatcagagatgagtcctgaacatattaatttatgtgctttgctttctctctaaaattatgtatgttttctatttttacaggttacaatacaaccatttgctctg

SEQ ID NO: 24584 - DNA, 983 bp, Glycine max
  Intron number 2 from transcript Glyma13g00360.1 (locus Gly ma13g00360) derived from phytozome v7.0 (chr-ID Gm13; pos 98386 to 99368)
ttggctgaggaaagggcaccggaaggcttaccaaggtattgtgtgtctctttatttaccatctgatacacataggtgtcatggaattacaagtgaaactacatataacttcagtgtttataaatcacaacacaatcatcagttaattttaattcttggaaatcttcccataattttaatatatagcttaagtggcaggggtggatcatcataggtggttgccccaaaagtttaaaagttccatagatagaaatatgtaaaagaaaaaattagacatgctttaccctaaatatgatcaaaacatcatatggccattccatttttttaaatcaagatctgcaactattaagtggggtgggattttctttatgaatggggcattgttttgggtttgaacagttgcatgttagaaattaatacttattgaaatttaggaatcaaatggaaagaaaaaagggagaagcgtgatgtcataatataaaataataatctaatgcttttattttgggcaatattctaggtgaagaactagtatagaacattagtatagtctcaggccaaaaacatacataacataataggagtgctaccacattaattatccttatattcaaacaatacaaatagatccagcagactatggaatataagaatggacacttatgttattattcaccctgagttctcttgaaaacattactcacattgaacataagctttactttcctgccttgtaattctttgataatatctaggatttatagaaatgattatattatatttctttgaagtaaactgacattattattttttcatcttctacctctcccaagatatagtccatatcttctcctttataacttataaattaaagttgttgtattgctcctacttcttatgtgtttctctactgaatgtatgtgccttcatttgtgtgtatatatgatctgctctcgttatgcaggatttcaaaggctgtgttga

SEQ ID NO: 24585 - DNA, 558 bp, Glycine max
  Intron number 2 from transcript Glyma09g41650.1 (locus Gly ma09g41650) derived from phytozome v7.0 (chr-ID Gm09; pos 46333184 to 46333741 reverse strand)
ggaagccaagacaacaacggtttttcttctcttcattcatgtcttctctctgtttgattgcatagagaattaataattgaaaccccttgaaatgaatccctacttgaattgaatgtcttaattcttagatgagtagtgctacatatcctgaaacttttgttagaactttgaattcaactagagtttgatcgattaaagggtgattgttagaatagttatgttggtctaagtattaatatcattcttgccgactcattctagcaaaaaaaaaatgagattagttttcatgcagcgtaaagattcttttactggtaactagtcagaaatcatcctagatatgacttttaaaataattatcaataaagttaacctacttactatacatgataatctatgattagatgacagtgtaagggcattcttattaaattcaaatttcaaaaggaattagtcaaaatttttagtaattctttgattttaaatgtgttcctgactttttttttttcttccggtgtattttcagtagcattgtcatcaaattcatttttagcttacaaa

SEQ ID NO: 24586 - DNA, 995 bp, Glycine max
  Intron number 1 from transcript Glyma12g04120.1 (locus Gly ma12g04120) derived from phytozome v7.0 (chr-ID Gm12; pos 2691489 to 2692483 reverse strand)
cttatcggaggttgcggattcataaattaaccacggtatgctgtgaatgtggattaggttatcggtgttacagtatggcgaaaaggacatgtggaagttgagaggtgaaaattccttggtttgcaaataaaaaaaaatgatatgaatgagaatgagtgactgtttctgatgcttttgttaattggccagaagtaaaaataaagaggaggagggtggaaaaaaaactgaaaaggatggtactgtttgtttgggaccagtgttgtgctgcgtgtgcataactaccaattttttatggtcaatttcatatttattattatgtaaaaactctgttacttcgttctcaagcgttattggggggtcgctgctgttgaaagctttctattcttacatcacaattggtctttgttgaaggaaggattaatggaaaagggaaccccgcttttttatgctttgtgtttagccccagcaacacttttttttttttttgtaatttttcttttcccttgctccttctttattcttctctccatatgaagcttggtaccaaagaatatataagtaaaagaccggcatgttctttaaccgggttaaactaaaaccatgattaatcgtccctctctctctcttaaaacagaagtcttttggttttaggtcgtgatatattgccaaccactgatagtttgatgataaaagcgtaattagttagcattctgttttgtctcggtctttctttcgttggttggaaataaatataatctaaagttagctcgttattgctgttattgcctattttatttatcaaccgaaattaatgggttgctatcttttctgagtttggtcatttcatgattatgaattatgattatcactagcatttagtaaagggcttagtattttttgtgaactcccagatcttttcttttaaatgcttgcattttgggaaatgaagaataactttaatagttacccaccccacttgtcctcttttaggagtc

SEQ ID NO: 24587 - DNA, 602 bp, Glycine max
  Intron number 1 from transcript Glyma12g33580.1 (locus Gly ma12g33580) derived from phytozome v7.0 (chr-ID Gm12; pos 36812161 to 36812762 reverse strand)
tcaaattaccaattaccttatcattgctagagggggttagttaatatcaaattagtttcactccacaatcccaaattaggaaagaaaaaaattaaggtattggatgaaatgaaataaaaaaaaaaatagattccattccattgcataatttttttaaattcaaacaagttaattaattacattttattcggttcccttcaattcattcctctacagcagtggctctgcctatctgagagttagcaataaatatagaataaaggctatcaaatataccccatgtgcaaaattccttagcttctgcatgaaattagcgtgcttgctgagacagtatcttaagatgaacatgattccctggttcttcaataatctttaaattcaaataccacaaagcactaactatgagcgtggacctataataaaaaaaattcctagtcttccattaaactggaatttattcgaaacaatgcactacaactgcaagtctacacaaaagaacaaactgttcacaccaattgaaacaacttaagttgaggaaattgcctatcaaacatgcaaatgtattagaattcagtagttttgggcaggttaaccttaagcaa

SEQ ID NO: 24588 - DNA, 1028 bp, Glycine max
  Intron number 1 from transcript Glyma11g38160.1 (locus Gly ma11g38160) derived from phytozome v7.0 (chr-ID Gm11; pos 39106919 to 39107946 reverse strand)
atatccacctttcaatgttagccacctctgtctcgtttctactacttcatgattgtgtcaatgctttaatttaatgcccgtctgtttctacatgatttatgcgtcggggttaaggtctccaagctacattaagtgctgtaaaatcgtttatttgttttgctacttagttttatggatgcgtagggggtacagtacagggtatggcaattccccccttcaaaaatttagggtatgtatacaacaggatagcatatagaagtatcaaaacagaaacaataaaggtattaagtgcatgtctggtttgaagttgaaaatgttgtgcatgcgttccaatacaaattcaatggataaaagcaaaatgaaagcaaagccaagggtcctgatccgttggcaaaagtacttttgcggttttgcctcaaaacgtaattttgtacccgaaacccaaacatgcactaaatcattggaaatgtttaaagaaggcacacgttttgaaggagtgaagtagtagcaaaccaaaccactcagtgacaagacttagggcctgtttgggtaagtgtatctagaaggacttctagtaaaagaaaataagtaaaaatgggatgagcttcttcataagctcaaattaacttatgcacaagctaatttgtagtattttacatggactgacttgtacttgagaaataagtaaatatttggtatgtacctattagtaacccttaagtactagtatttggttccattcctggttaggcaaccatttaataggacccatgtatcgtaggtttaccactttgataggaaaatcggttatttctactgtttgttcctttagtggcatgtatcataggtttactactttgataagtctgtgggatcctcattaatttgaagagcatggtgtgccttaagtgtgctactttgcccaaagatttataattcatgcaattctggctgctgatctattatttttgtatggaattcaatgtatgctagattttcttgctcccaaccataataggaacagctac

SEQ ID NO: 24589 - DNA, 853 bp, Glycine max
  Intron number 1 from transcript Glyma08g45840.1 (locus Gly ma08g45840) derived from phytozome v7.0 (chr-ID Gm08; pos 45113491 to 45114343)
caccttaactcccactccaagaaaccctctctaccgtatgttacacttcttagctcccttatttgtatgttctttgaatttgatgtactgtgtgtagttcttgaattcccaaaattaagtgctgcattgttgttctgtttctgattcgtgaagcaagattgaaatcagaacttggttttctttttgctgtgtaaaattttaagaatttttcatatttgtttgcttcgagtaatatggtgcgcctgtgttgactaatgaaaacagaaaacttagtttcaatcctcaaatattcacctttatgtaatttctttgatttttgacatggatcttgaaagttaagttgtggggttggttaattaaattcaaaatcacatggattaagcataaacacctatttttgatggatcctgggttacctcatttttacaagaaccggataatctaatgttatgtgtaaaatcagtgcttcccttcagatgcagttccttcccaagaaaatgtttgtttttctacatcataatagtttgagactccaaccaccctagtaatggaaataggtaaagatgatggaagcatattctccctttggttaccattgacccatttcttctctttcggctaccatctactgaagtgtagaaatcactttatagtttatgtaaatgatttttaaagtaattattgtaaaatttaataatttgttaaaagtaattattacaaaattcaataatttttttggtaacttgcaacttctatcaacaattcatgatcgcatgatagggtatataaataatatttcttttgccgtgatattaagtaactcgcaacttctatcaagaccagaaccagcaaa

SEQ ID NO: 24590 - DNA, 553 bp, Glycine max
  Intron number 1 from transcript Glyma12g11670.1 (locus Gly ma12g11670) derived from phytozome v7.0 (chr-ID Gm12; pos 9752873 to 9753425)
ccgtcttgatcctcccaacaagctctactttccttgtatgtctctcattattaatccttttttgtttttagcatcagtttctgttttgtgtttttgttacattatcctattcaaagtgtggttgtttatctcgttttcatttgattgcttgtgagtggattggtcatgactaatgtgcccatttgtgagtttagtttttggttaattattcatttggtacctatagttgtctccatttttaagttttagaagctttaatcactacacaggataaaagttaaaagttttggtctctggtgctaaagaccagagaagatttctactagtgtcaaatcattacaaaagcattctcccactcggagactgcttcatagggtgatacagctgacctgccgtctcaggataactataaggactaaattaatagtttaaccttatttttttgtgtatgttttgctgtagtggctaggaagaacatgggtgtggtgtggagtttgcattggatgtttggttttgtctcttgtctgatatgatgtgtgactttgttttgaag

SEQ ID NO: 24591 - DNA, 621 bp, Glycine max
  Intron number 1 from transcript Glyma10g37820.1 (locus Gly ma10g37820) derived from phytozome v7.0 (chr-ID Gm10; pos 45716357 to 45716977 reverse strand)
tcatcaactctgttgtgcttcaggcaagttatatgaatccttttgttaagttcaggaatccaacatccttttgaatatttttacttccagcagattatgatgaaagtaaaattaaagcatttgttgatatataaggtagtcttctttaaatttccatccatatttgtttcttgctttgtgtataaataagacatgattagaaaagagaacctaaattttgaatattctggaatacagattgcattcctgaactgttccagctttgcataaacttgcattagtgcaagggaataaaaaatgacgaattatgaatatagtgctccaaaacctttaaatacaagctataattttcatttagtttattgtttgacgagtatttattgtgatagccacagtctgcagataaatacagatttcctaaattctagtaaattattccattaatatatgtggtgagagaggagcatcattgaaagacaaaataaagttttagccaggcagctgttaagcataagttgcatctaactactaatatcctcatactccgttacttccttgtcttgattcatgccaattgccaaatcttgtactttgaaataactgctcttttccttgatcagg

SEQ ID NO: 24592 - DNA, 937 bp, Glycine max
  Intron number 1 from transcript Glyma11g37100.1 (locus Gly ma11g37100) derived from phytozome v7.0 (chr-ID Gm11; pos 38330894 to 38331830 reverse strand)
ctagggttttagtctcttccttcagcttatttactgtgagttgattcattctcttcctttatttttttctttgatttgtttttttctcgttaaaggaaaaagccactgcgaatgcattgcttgccgtgagagctcatcgcttttgattttcatatcagatatccatgatttgagctgagcttcttcggttagctcacgctcgtgtcttgtagttgttatgttttagggtctgttgtgtttttagggttttatgcgatttcaatgtgaaggttcggttttatccgttccttgttctgtttgattctcagattttggatactgatatcgcaattgatgctgggtagttgatttggtgtgcttttagatgtatcggttttgtcttggtattttcgagatactttaagtgagggtgtgactgtggagttctgttgatttgatagcctcgtgcgaggaaggaatgactaattcgttagacgattagttaacgtaatgatgtatgaataattcttgaaaatagatttggttgctttggaacaaattttgagtgtgaacttgtagtttctttttctgcttttagtctttctgatgttagttgtttgaattataatcctatgcgactaatctagttagagatgtgaacttagaagttagagctctgaatttttaagctgttatgaagattcattttgttttttagtgttgagttctggatattcctcgaaaagatttgcttcttagtcattactaaggtatctccatttggggaggatctagccttttagttattactagggtatctgtttccgattggctgggatctttgaaaagcggttcctggatgcactgtgttaggttagtctttctgaacctgtttttgctgctttgattactcctacagaaattaatcagcttgtcaaacattcttcttgaagtggac

SEQ ID NO: 24593 - DNA, 1001 bp, Glycine max
  Intron number 2 from transcript Glyma09g03020.1 (locus Gly ma09g03020) derived from phytozome v7.0 (chr-ID Gm09; pos 2113565 to 2114565 reverse strand)
ctgtttcaggactttgaagctcgccacgccgacatgtgagtttcgggtttctctttttgattggtgttttttgttattgttgttgttctgtttcttgcagattatggtttaattgtcaagtaaatggtggtctaattatctggttttgctttcaatttcacaatttaaactatgtttaaggttctgttagcttagatgagtaatgtttgtcactgtagtgattgtttatttagataaatttctctctaagaacttagagaagaaaataagaaggaaaaatgaaatatgcttttcccaaagctaaaattagcttatgcattagttaagtcaacttttaaaaactaaatgagacagctacaataacttaacttacacataagctaattttagctcatgggagaagtgtatttcattttgtcttgtatggttgtttatggagaagtttattcaaatagagctgaagtgtcattgtgttagtggggccagggggggattttgtgtcttggtagttgtggtgggtgttgttgttcagcttcttctatcaatttggttttcagtcactttctctaaatggaatgtgtggtcacttcatctgatgatatttttttgagatttttatgtaagatgttaaaaaaattattgttaagaaaattgagttttgtttgggaatgatattttaaaagtggttacaagaattttacttgaatgataaaatagaaacattttgaagtttaggtttttgtggttccttcacctaaaacaaattttactcccatcagaaaagctaaaaaaatatttagtttttaatcaattctactcattgcaggatttgattttgagaactccaaaaattacccggacaactgttgttagtttatgaataaattctttgggggccttaagcaaacatgacatcagttgtaagttcaattttttgaattaatttttttaatcttgttttgattacagttggtgaccttaaccacctgatatctgccacc

SEQ ID NO: 24594 - DNA, 508 bp, Glycine max
  Intron number 2 from transcript Glyma10g41040.1 (locus Gly ma10g41040) derived from phytozome v7.0 (chr-ID Gm10; pos 48250391 to 48250898 reverse strand)
tcaggttgttatctctgccttccttaaatacactctcatttttgtctccaatttttcaagtaaaaatatgaaaaagaaaccttattttcgtagataaattaaaatcagcatagaagaaaacttatatacagtttcttaaatacttcaattattgttctctaatcaaaataagaaccttatctgataatctatattgtattgatatttaatgtaaacctttattaagaaaattatggatgaaactctatttctaatagcagaacctcaccaacaatactggacgaacaattcatctaagttttgtcctatataataaatattttttttgtatagtttgctaatttgttctacgaaactgttcaaattctcaaaggacatcatgcacatgttgttggtaattggagaaaattaacaaagaattgattatagtaaattaagttggacttacaaataatttgaaaacacgaatccaggtgtgaaacaagtagaggtgaatagaaagcaaagc

SEQ ID NO: 24595 - DNA, 591 bp, Glycine max
  Intron number 1 from transcript Glyma10g32080.1 (locus Gly ma10g32080) derived from phytozome v7.0 (chr-ID Gm10; pos 40524749 to 40525339)
aggaactcgccaagtggtgtgagtcactctccaactccaataatggccatttgtttctacacattttcgttttcttttctttacaatgaatacatagtgttttatatttaatgttatatcatccatttgtttcatgatgaagtattagctaacatgattttaggtaaatgttctcatgtttagtttcacagtgagaaattgttggataaaaaaattatactgctaggtttttactataaaaagagatttaagatcaaagttttaactgaaaatgagttttcgttgtgaagcaatttatgcaaaatgcttatccagacacagacaagttgatggtaaataatgtccaaaagagtaggaagggtgcatgttggagttatgctcaacttaattaatagtccatgcctaatggcttaaataaagaaagaaactaatgcagggtattatatatatgtcaagaggttcattttgctaactacttaaagtattagcacggaggtatcagtagaagggttttaatttcataatttgttaacttttggctttcgcttggtggcaggtcctgacagaaggatcttcttgcctgagggtctc

SEQ ID NO: 24596 - DNA, 619 bp, Glycine max
  Intron number 1 from transcript Glyma10g05710.1 (locus Gly ma10g05710) derived from phytozome v7.0 (chr-ID Gm10; pos 4475258 to 4475876 reverse strand)
tctccattcactcgtttaagctttttaacgttgtaagcccttcatcgttattcttaaaatttcattccttttatttcgatttcgaactgggaaaccattcgcaacctctcaactgttttcttcccctttaattttggatcgaaaaatgttgtttattttttttttgcaaaagggataattctttccccttctcctgacttgatttgaagctcctcttgcccctttgtctctttgtcctcctttttatattttcgctttcgttttgcctaattttttatacaaatttgataagttgttaattgtattggattaattatttttttcagtcttcaaattttgtttggggctctgggattggagaggtttttggggtagggttttatgttgatgtatagaaaacagaacatggatttgtattcttgttgcattgataagcataatttggaatttagtttttctggctatactgtgaccagcagagggtagggtaggggtctaggggataaggtttttttttatttttaagtttgttgattttgatattgcctttgggtttgtggaactgaaattggaagttggaacaggctacaccattggtggcagggattgcagtggcggc

SEQ ID NO: 24597 - DNA, 648 bp, Glycine max
  Intron number 1 from transcript Glyma10g05690.1 (locus Gly ma10g05690) derived from phytozome v7.0 (chr-ID Gm10; pos 4463102 to 4463749)
cgttgtgttcttcgttttcattctcgcgcttgcaggtaagaatgctaagctcaaatttattaaaattcttagtaattatgtagttttttcactatttgacctcgataatgatttcggttatttgttagttctttactgttattttttttttgttccaatcatggtatgggccattgaggagactagactagagtgtacgaaagaagatattgtttggataaacttctcctaattacttattagaaaagaaaataagaaattgagtttcttccatgagttatgcacttcaacttttggagaagttaaatgagagagtttctataaaagataagtgcataagctgattttaaagctcaatttttgttttcttatgtgaagtttatccaatcagggcctaaatgtatatattattataaatgaagggacctatagattctcggaccgtttctttgtgatgtattgattttttttttttaaaaaaaaaactgcattgctattgagctctcatatgttctacaaaattttgaagcaagttttgttattgcttacaaatgatctttttcctgatggtattagcttggtattgacattttttttgagttttcttttgcagctataagtgtagatcccagtcgtgaagcagtggcc

SEQ ID NO: 24598 - DNA, 861 bp, Glycine max
  Intron number 3 from transcript Glyma10g36950.1 (locus Gly ma10g36950) derived from phytozome v7.0 (chr-ID Gm10; pos 44984075 to 44984935)
agtcttaagggtccactttgggaagaagttgcaaggtacacaacacacatataactatataattcactattcatgtatgtttattttctggtttttgtgtttgtgtgcctcagcttctcctccatctttttctattcagctttttcttttcactttgttttgctagcttcttcaagatcatgcatgaagatttatgagttcgttttcaatttccaaaccaatcagtttgtgaaacccatttgttgtcagtggatttttattttttattttaatgaattatttgggaggctagggagggagcgggggtaccttattataatttatattttctagtatacataattagatatataataattatttaatcatactcctagattccgtagtaataagattacccagatgccattcaaatcattcagctgaaatcctttgggaataatataacgagtccatatatagttgcaacaaatcatgttgtgatgacagagttaaacatgtattctgcaggatttgctcaatcaaatttaatttgttgagtttatcttcttcttaatttcttggtttcatcccttcatatgatcggttgatttgtgtacgtcttatttattgttcagttctcttttaggtattaactaccatcatgtttttattagtacggcaagaccgtctaaaattttacctttctttaagtgaaaagaagtagctttatttttttgttttattttcactgtttccaattttcaatggatatatatgatgatgatcataaaatttgatcattctctctctttcttctctctctctctctattatatatgtgtaggaaactatcagaactgggttaccaccgaagcgcta

SEQ ID NO: 24599 - DNA, 451 bp, Glycine max
  Intron number 3 from transcript Glyma12g08930.1 (locus Gly ma12g08930) derived from phytozome v7.0 (chr-ID Gm12; pos 6693831 to 6694281)
gagcctttctccctaaagatagtcctcttcgtaaggtggcctttttgaattttattcttgacccgtttcttttttaagagtgtttccagatctgtgcattctgagctgtggttttgcgttttgcattaatttggaatctgtcggtgacatgatgtggctaattggatttaggttgtgattaatgattgccttgttattatacgatgtcgactttggacattttcacttgcgtttggattgtttgttagaggaggttgacgtgttgtgattttgttcttttgatgaatttggagttggatttaggttgtggttgcattccttattggaattttttttttctggttttgtattgggagcaagggttggttggttgtttgttgtttctttcttctgatgggattgagctgatatgtgttgtttgtttgcaatttgtgttaggatccggcatact

SEQ ID NO: 24600 - DNA, 709 bp, Glycine max
  Intron number 2 from transcript Glyma11g37080.1 (locus Gly ma11g37080) derived from phytozome v7.0 (chr-ID Gm11; pos 38317513 to 38318221 reverse strand)
ttgacaaaaaggtaatttttttcttcctttacctcttgatcatttctacatccatgtgtttagaaaaaaaaaaggtgttttatttgtatggtttttgtaattatttctggtttctcacgtggatctgataaaaagggtgatggcaaaaaggttgttgatgattcatgctcagcttgtattcatgaattgtcttgttacttctaatgttgatccttttttatataaactaagatcaagatctgtttcttcaatagctaataaggacgtggttgccacttacaaataaaaagtatattgtatttgtgggtaaatattcccttacagagctaaaaaaaatgctggaaatcaattagttcttttggttggccaaactttttgtttaacgttgctggaaaggtttaaccctttgtaagatgctgtttttcgtgaggacaaaacttatatatgcgggctctactgtttgtcaattaaaattgggaattccatctaagtaattcgcattttaacgtttgtattaaaagattatataaattattgagacaaaatttcattttctgattagaaaataggacaagcaactcctaaagcaccctatataagttttttccatttctcatcacccacttcttgttgctttgaattgaggcttgattcttctgtttgaggcggcctcttaattaagtgtcctttgtaccttgtgggcaggtgg

SEQ ID NO: 24601 - DNA, 181 bp, Glycine max
  Intron number 1 from transcript Glyma11g37080.1 (locus Gly ma11g37080) derived from phytozome v7.0 (chr-ID Gm11; pos 38318413 to 38318593 reverse strand)
gcaaagactgaggttggttggcataattatatttttggcttttcttaaaattccttctttgattgatgtttttttctcttcccatggaggtggagattgtaatttattgaactaaagtaacttgtgattcaactttatgcatgcagttagaggtgactgttgagagcaagaacaaagaact

SEQ ID NO: 24602 - DNA, 862 bp, Glycine max
  Intron number 1 from transcript Glyma09g05810.1 (locus Gly ma09g05810) derived from phytozome v7.0 (chr-ID Gm09; pos 4563065 to 4563926 reverse strand)
accgtttgccaggtcgtcgatacctccgtcagagagtgagtgtccccttcggtttcttctgttttatttgcgttctgttttgttggatgatatttctaggttagggttttgcgacgagttggtgtggatttgagaagcccggggcgctaggttttaagttgccgtcgcggtttcgatgtgtttcttttttgtgttactggaaattgtggacatagatgaaattttagtgaggaggtgttgggagagggtccaaggttttaaatgtggttgcgttttcgttgtgttgcttggaattgatgatgaatgaggcatatgaagctgcaattgcagttgcatttcagtcacagacacccacaagcctcgatgttgtgattgaaatcgagattggggcctttatttgcgttctgtttgttactaagcgattgttgaagaggttgaatttctatgttaggggtttacaactgtaggaagtggatttaagaaacacagggcgaggtgttgagagagagagagagagagagttgctttttagttttaagtggatattgtataaactaagattttgttttttaagaggaaaggaaggaaattgatagattgtcatgataccggttgattattcattttttggatcattgaataactgtaattttgaaaacgaaagctttattgtttgtcagttctctctgaaatcctcgattcaaacatattctgagactgtattgttaaaggtgttgtgtgtgcttcacatctaactgagtgtgatatattttagattttgttgtgtaggtatttacatggggtgtttgttttttaatttttgacagggttcaggctttaatattgtcaccaacgagggaac

SEQ ID NO: 24603 - DNA, 676 bp, Glycine max
  Intron number 1 from transcript Glyma08g43950.1 (locus Gly ma08g43950) derived from phytozome v7.0 (chr-ID Gm08; pos 43731863 to 43732538 reverse strand)
actctgacgccaccacctttgaggttcgtgtgttggtgtgtgtgttttaatatttcttcattggatggttaattgtgcttgtagaatgtactaattcagcatgtgtgtcttattatgtgtgaaataatgtctttgggtttgtacataatgtggagatttgtggagataaggtaaagtgaataatgggaattatgacaatggtatttttttctaccttttgctatgtcatatcttgttagttaggaggtttaggaagtataatggcactggattcaatgtggttaaggttttagcttgacttgtgttttcggttttcctaactttttgttatgtagagtggagagaaaacgagggaggagagaaaagtttgaaattttaaattgaagagaaaaataaaaggagataaaattttgaatttttgtttctagaagtcatttttattttccactttccctgtaagtgttaccgaacaaaagaaactacattgttatctgtgttttctttcctctgtattgtcttttttcctctcctccaacataccattaatgttttgaactcaataacgacagggtttagatgtcaggtggcatgatgcaactaccaattaatatccttgttaatgcaatattttggtgttttaggttggtgacttggggactcctagcacttcagcaat

SEQ ID NO: 24604 - DNA, 540 bp, Glycine max
  Intron number 4 from transcript Glyma11g34020.1 (locus Gly ma11g34020) derived from phytozome v7.0 (chr-ID Gm11; pos 35866344 to 35866883)
gagtaaggattctttattccatcagttatttgaattatttggctgtcattggaatttggaagattatggccttaatcgtgtatttgatgatgattttgcttgctttgtccaaagttttattgatttgaatttgaattacaagtttatttgattaatgaaattctactggatttattgcaacagcggtagcgaaagttgatttaaataaacaatatgattttataaattaacattttttttgtcttgtgcatttatcttgtccagtttgattttcagaaaaaacaaaaatttcatttgctttggatatagtacttaattttcttttctagttcatttgattttagggaagctttttttttttttttttgctgagtcattttagagaagcctacatttgccatttattaaattactataatgaataaactctttctcatgaaaactatcctcatttttttatgatttctttaattttctcttttcattattgtttgtatgatgtactaaaaatctctttctctactgcagagcattgcgggg

SEQ ID NO: 24605 - DNA, 645 bp, Glycine max
  Intron number 2 from transcript Glyma12g09930.1 (locus Gly ma12g09930) derived from phytozome v7.0 (chr-ID Gm12; pos 7666929 to 7667573)
aagtaggagggaaagacttaatcagttcaaagaaggtgagtttgaacatatatatttgcctatgataatcagttcaaattacttagaaggggaacaaaaatattatgaatttaattttaaactgattcagaataagttgggcctaatgtaaatcagattttagtgtttttgatattacaattgctaagttaatcttcgaggagagtaggttactgctattggactcaagtaggcctggttattacataatacatagtgattagtggctgcaaggtcatgaaattaagcattatatggtttaagtgttccttaaaaaaaaaagaaccttggagctcttgaacaaccatggaagaaatattagaacgcataataattaaattctgagtatgttgttatctatatcattgaacttgtttaaaagctgtcagggattcttttgtattgttgttttttagtcaattgaatcatgcattgacattgctcattttagcataatgtttttgtaattctgtgaattacttgttttttaagaatgggttcaactgtgtaatgaattaccgtagtacagtatttgaaattccggaattatggagatcattttctcttgcagacaatcaaaagataaaatctgctcaatccattctg

SEQ ID NO: 24606 - DNA, 939 bp, Glycine max
  Intron number 2 from transcript Glyma11g31890.1 (locus Gly ma11g31890) derived from phytozome v7.0 (chr-ID Gm11; pos 33231019 to 33231957)
tcttcttcatcgcttatcttctcttcaaagacatcgtaagttccgattataacactcttctctttgtgtttctcactacccatttgtcccatttcctcaaattttctatgtgggtgtcgtgtctgtgattttacgtttttggttgtgtaattgaaattaggctcaaattttgatcccatgcccggggatctcaatttcttaatccgcactcgtcgagattcaaattcaattttaatgcttggttgtgatcaatatgttgttaactataaggaccctgttcttgaattcattgtaaatgattatatttatagttataattatattttttgtcgtgaatgaattatttaagtaaattttaagtttttaaccattagataattacttctgcatattggtgttgcctccttgattcagatacattgggtacaccttctagtcataagatgttaagaatacactatgtattatgtaatgtaatgtgttatactttgtatttgttggatgtgatataaactataaaactagattcggtatgaaatgttaatatgccctgctattgtgtcggatttcagtgtctgatgtttcagtccattcggaagagattttgcagaattgatttgagcttgtaaaattgtgtttagcttgtttaaacaagttttattcgcaaaatttatctttctagcttatttcaacaagttttatggtcaaatttatgatgtaaggttctcatttgatgagagtttattgaataagcgcttaactaatctagcttctgaatggattcttaaatgcttggcaacaggacatctttttccatctaaactccattaccccctactacctgccccattgatctcattttgcttttggcagtgagttctaagttctaacagtaactgtttacatcaattgcagacatcaaggcctgactacaatcaa

SEQ ID NO: 24607 - DNA, 923 bp, Glycine max
  Intron number 1 from transcript Glyma09g10120.1 (locus Gly ma09g10120) derived from phytozome v7.0 (chr-ID Gm09; pos 10133460 to 10134382 reverse strand)
tttacgtcaaccaggccctctccgctctcaaattggtactatcttgcttttgttttgttttcgcgtttttggattttgatgtttctgtttcttgctgtgtattttggaagagtggagcgatgtgatgcgagtgtctaatctttttgccgagtaggattgtgaagatttgtgtgagagcacaaaacttagatgtgattcctcaggtacttttggtgttgttctccaattagaattggagttatacatcagtaattgacctaataaaagtttgcattatagatcaacaaaaattactgagataagacaccaattctgattggagaactacactaaaagcacttatgaatgaaactgtgtttgtgtttttgtgaagagttgaccaatgtgagtgtctaatctttgctgagtaggattgtgaggatttgtgccaatgggcaaaacctagatgcagttctttaggtatttatagtgctgttctacaatcagaattggagtgcaataaaagttaacattaaatatcaacataaattactgaggtgaaactcctattatgattggagaacaacaccaaaagaacctatgaaactgttttaaatttttgcgaatctgtgtgttttttttcccagagtgaggcgatgtgactgtctaatcttctgagtaggattgtgaagatttgcagtgaaactgtgcttgtattttattgtttttggaggttggtttaggttgtggattaattatgtgaattttatggtggtagtttatttactagttgtcatgccttattgattcagtgttggtcatttgtttgtttggcttttggtgtttgctttgttatttttgttgtgtttgcatattgctattaagttgatgtgttttgctgtgatacagcttgttgcgtctgcagattgtgctggagcactaga

SEQ ID NO: 24608 - DNA, 330 bp, Glycine max
  Intron number 3 from transcript Glyma09g38930.1 (locus Gly ma09g38930) derived from phytozome v7.0 (chr-ID Gm09; pos 44156017 to 44156346 reverse strand)
ttcattccgccaacagtttacactggctttctcaggtaaaataaactaaattctttcttcttttttcttgaaagttgattaagaatttgggatgttatatatgatcgaccaaaactagtattttgtatggtttggtttctgtttgaatttccaacttttaatcaaaattaatgtccaatagtgtccactttatatttttcttttgggattaagaaatggtgatatttttaacatgttaaacaaatcaaacactctaaatgcttgtgtttatatttaactcatatttcaattgtaggatccattattggagtttactaaggaggcagaatc

SEQ ID NO: 24609 - DNA, 276 bp, Glycine max
  Intron number 1 from transcript Glyma08g42910.1 (locus Gly ma08g42910) derived from phytozome v7.0 (chr-ID Gm08; pos 42857669 to 42857944)
agtcaggcatctggagattctgattccaagggaaggtatattaatgtttaccttaatgcaatataaaaaatatccttcttcataataacatgtttttgagatttctctttatgtgtatgcatctttgaatgtctctctcctcaacttccaattcctcttcttttatttttcaataatgttaaataatcagagtttggataaagtcaaattctgattaaataaataaaattttaagtgaaaagtttcttctgatttgcactatgtaggaagtgattg

SEQ ID NO: 24610 - DNA, 330 bp, Glycine max
  Intron number 1 from transcript Glyma09g33740.1 (locus Gly ma09g33740) derived from phytozome v7.0 (chr-ID Gm09; pos 40205391 to 40205720)
tcttcgttcaagcactcatcttatcccttgttctggtgagttatgcttgtttgaatttaattttgaaatttttcgcaagtgtttagttttagtttattgggtgatttgcagtattgttgggggttactgatgataagatgtttaggtattatttgatttttgtgtttggctgatttagtgggtggaattattttttggattgaaattggtaaagcagcacctttactgttgcttgctccttgcaattatgtgtataatttgagtgtgctttgatgatttttcttatatgaagattttgatttttggaatcggaaatttcaggtcataagg

SEQ ID NO: 24611 - DNA, 195 bp, Glycine max
  Intron number 3 from transcript Glyma09g33740.1 (locus Gly ma09g33740) derived from phytozome v7.0 (chr-ID Gm09; pos 40206122 to 40206316)
tagagaaagtttttggaggtcgtttcattagcaaagtatgatggtgaagtacattgttaaacaatttggtttttggcttatttatgatttgtattgttgtgttggtaattgttatattttcctggattgtgtttttgttttgattaagaatgttgtgtttgctaattattatcttctccttgtgtttcagcttca

SEQ ID NO: 24612 - DNA, 531 bp, Glycine max
  Intron number 3 from transcript Glyma10g07580.1 (locus Gly ma10g07580) derived from phytozome v7.0 (chr-ID Gm10; pos 6301737 to 6302267)
gtcattggcggaaagctacttgcttctggttattggtaagatttcatttatgttgaaattataggtttttaggtagagggaaaggagagaatagagtatcacattctgaaattgatcttcattatgatgttttacaatgtcatacaaagcataaacacgtatcatgaaatacaaggaaatatggaaaccaagctgtaatcaaagatactaccggatatttttcttaaaatataatttcatttgatatctattttttttcttgttcttctcttatttccatatgcagacgttattgagtaaaaggaaaagatagtcttattttatatggaattcatatgcatgtggtttattttttcacccttcatctagctcataatatgtgacaaggttctcacaagaatttatgtttgatactgtctttatcatttgtcatccttgattctgtttctcattgaagtcattaagctttcttattcttattattgttatgttgaaggggtattgctagacgctgtaattacctaggggatt

SEQ ID NO: 24613 - DNA, 782 bp, Glycine max
  Intron number 1 from transcript Glyma11g36110.1 (locus Gly ma11g36110) derived from phytozome v7.0 (chr-ID Gm11; pos 37635786 to 37636567 reverse strand)
cattgaaagtatccttttttttattgcactttaatagttttcccccctttataaacaattggttctgtttgaatattgactcttgggctgtactgcattattttggaagtttaatgcaatataaatttgcattaaaagtatcttgaagtaactaagaaagcaatcaagtaagaaagagggcaatcaagaaagaaacctctttcattcattcattcattcattatgtgtgtgtgagtacaaaattcatttctggaatctgaggtgtttcatatagccatattagtatgttagcccggttaacaatttttgggtaagtagcattgctctgttttactattgttttaggatagtaacactgcaggaagagaaacaaatacattcttggaactaatacattggactaattctaattaccaggtcagatttttggtgcatcgaaattttactgtcagtcacatttcattcttaggattaatttgaaattgcttggttaatgtaacatggagtgcgacttcttttaactagtgtttatatatgaattttatttaattcttcgaaacagtttagtttatggcatacttagcttcagttaatttcatgaaacttgaatttattagtgttaacagaatacaatgacattattttatccatgtagctggtcttgcctagtggaaatggcttctgttgtttttgttgtgtattagtcattaatgcaatgtaagttgttgcctttaacttttgatatagctttatcacattggtgtatatttcaccggagcaaa

SEQ ID NO: 24614 - DNA, 789 bp, Glycine max
  Intron number 3 from transcript Glyma11g02710.1 (locus Gly ma11g02710) derived from phytozome v7.0 (chr-ID Gm11; pos 1752959 to 1753747 reverse strand)
cccctgagttgcagaaagatttgaagttattaaaggtgcttttgaattttaacatatctaccttcctttctacaatgttttctgaatatggtcaaatatgatgttttgtgaaagtagcttggattaagctaataacataacgtacacatacattatattcaaaatgaaaagaattaatgaaagtgaaaacatcaaagtgggtgattctgctttctccaagtgatacggtaatagaggaacatttaggattttaatttttattattgttgtggaatgaaaatattaggtcctttttatgttctacttttactttataagaaaccttctctttgtctggaacttggattatgtaggatgtaaatttaaattcttgcttctcgctaattactgtatgtttcaatgattagtagtatttgctgcttcctttgtgcttttaccccatttaaaaccaattaaaattatcagccctgatctgtaaatgttgaagtgttaccttagaactcttctggaaacttccttgatgtggtgaaataagatgcatattattgtataaaatattaagttaaactcacgcaatggctatgtacatttgaggatgcaatgacaaatgttgagtcttattaaaagcatcagaaaaacaaagtcatgcagagatttgaatgtatctctaaatttgtgttgagctgtctagttttgttttgtgcaccagttcttatccttagacattaacaagcatgtatgttgatggttacagttgagggctgcccttgatccaaagcggcactacaa

SEQ ID NO: 24615 - DNA, 914 bp, Glycine max
  Intron number 1 from transcript Glyma11g02710.1 (locus Gly ma11g02710) derived from phytozome v7.0 (chr-ID Gm11; pos 1754232 to 1755145 reverse strand)
tcgccgccattgatcctcatcttcacggacctcaggttttattttctattcaccctcctcaagctcaagcagtttgaagctttgaatatactatttcatattagtttgggaaattatgttttctggctctgctatttcatatgggacttgtgctggtgtgagaattctatgttctgtttgttttcttatccgtgttagaggagaattctatgtgctggtgtgagaattctacgtactgtttgttttccagaaatgctaaagcagtcgaatttgcagttaatcttaaattatatgttctgtttgttttcttatacatgaacctgataacatgggacttatgcttgtgtgagaattctgccacagcctttaagcccccaattttttccaatagttactataaaatattataatctatatagcatgaattatgattgcagattgtcagattgctattttgatcggtagattggcagatttatattatgattgttaatgataactaattgtaatttgccatagccttaactgattgacagattactattattaagtattaagaaattgtttcttcttgattcttaaatataacggatagaatattttaaaaattgtatatagaattgttactatagttttttttattcatatatacttttgttttttatccatatatccagaatctttttggcccctctttttttatccatatatccatatctattttttggacactaccgcaaattacaaatagtccaccattaacttctatataattccaatgttgttttttgttatactaaacacaaatatgagaagtgcttcctactgcatatctggttgagattgtcattcttgtgcatgattattggatataatttttgggatctcattatacaattgactttgattcagga

SEQ ID NO: 24616 - DNA, 779 bp, Glycine max
  Intron number 2 from transcript Glyma12g01930.1 (locus Gly ma12g01930) derived from phytozome v7.0 (chr-ID Gm12; pos 1171110 to 1171888)
gtacggctctcgcccatcaacacaacgctattcaggtggccattattattatttttagattctttagagcttttcatgttttccatatgatgataagtgactttaccactatagttttatattttagagctttcggttctcttatttattgaagaaaggctgaatacagagatggcagatgcgatgtttgcctcaatgaaaggcatgcataatctgaaaagagaatagcaaccaaattgatacaataatctctcttgcttgcttatggacggtcttgtgctgattagttattacaccagcgcataacataaacataagctacacttaccattgctaccgtgcttttttatgtgtttcaatgtctatattagagaaacacctattccttgtgtcaaatatattgtaattcctacttatatcttaaccctcatttgtttttaaaagaacaataaacccttccaatatctttgcacgttcattgataccccccttcatatcatgagtggaagtggaatgccaaataagaaataggaacaactcttgctcatatagaatcctaaggcaaataaagtttatcctatgatgcacagatacaatagagtttatcctttgatttgagcattgcactgcaatcatgtgcaacgaatagtggcacataagtagcatacaagcccaaggcgatccccctcccgcctaccaaagcctctaaatgtaaacaaaacgaactgttggatactaagttgtttatgtaaaaattgctgccccccttgcaggtttta

SEQ ID NO: 24617 - DNA, 727 bp, Glycine max
  Intron number 1 from transcript Glyma12g36790.1 (locus Gly ma12g36790) derived from phytozome v7.0 (chr-ID Gm12; pos 39830804 to 39831530)
aaacccgggtaaatcaaccaatactttctagtttcttgcttcttttatttgcgaataaagctctaatagtataaacttctctataaacatagaagaaagtggttgtctaacttaacttaagtaaaaatggggttaaacaacccaatagatagatgttaatacctgcaaccaaccacacaattacaccaataatctataataggcttatttaaccccattttactaggggtaaccaactatcttttagtacgtaatagaattacacccatcatctataatggccttatttaaccccattttacttggggtaagttagacaattgcgaaaagaaaataacaatgcaaaattattcgagtttagtgaaaatttagttatgcacttgatggttttatataaaagctctcatttaacattttcaaaagctgaattgcataacttgattttaacttattggagaagctcaaaactttgtttgaataaacttttccgtaagcagaaaataagaaggtaagataattcaaacttctcccataacaactatgattttattgaaacatgatccaattaattttaccttcttattttctttttctgtaagtgctcacagggaaatttatccaaacaagcccgaatgaagcatatttaaagcttatgatatgtctttctacttgtaatacattatcattctgccttttttaaaaaaaaaatgttattgaatttgaagga

SEQ ID NO: 24618 - DNA, 739 bp, Glycine max
  Intron number 1 from transcript Glyma09g32240.2 (locus Gly ma09g32240) derived from phytozome v7.0 (chr-ID Gm09; pos 38789002 to 38789740)
aatcaaatccacagacaagcttgaaaccatttcaggtaaggcttctaacccgccaacctactccgttgttgttaccatttcattttagggcttttttctaatcaaaattggaaaatagaatgactgtgtctgtgtggttcctcccataaggtgtttgtgaaaatgctacaatgaggaaaatagttggatagggttttatttgtacttctattgttgcttgttgaagactgtatgagtagagtagaattctgtgttttttcacttacacggatggcttaggaatgctggaactttgttggattagaagagtgttttttaatttttttatttaggtataggtaataggtttggggtgggttatggtcatggtctagccaaggtgaaaggaaggaatctgtaaaacatttatacgtgcaaattgtttgagatgactcctatatatgcttctcaatcacaaaacagaccatgtgtctaaggcagcatgaggcaaaatgtatgaccatgctccagatttattgaaaatcataattttttgtaggtttcacttgttatttaatgagttttttttcctgattttgtagttttcaataattttcaatctataataaagtgtgtgttagaagagtatgttgctagaacttctcttatgagaatcaacattggagatctccaatccatgcgttgttatcttgtgtaaccaacaggtgctggggaacattatcaatttgtgttatcctga

SEQ ID NO: 24619 - DNA, 923 bp, Glycine max
  Intron number 2 from transcript Glyma09g32240.2 (locus Gly ma09g32240) derived from phytozome v7.0 (chr-ID Gm09; pos 38789829 to 38790751)
gaagtcttgtaaaattttgcaccttacagttacaggtatctattgatatatacaaatacttgtttcgtccctaattacaagacttttaattcatgcctctaaagaaaaatagttattacatgtcaattatttatactattattctaaaattatttttttattctctttttatccacttttttttaatgttggaaaagagaataattaagtaaaaatatataaaaaaataactaatatatctaaaaattaaaaaaaaatcttataaaaaaagacgaacatattttttgaaaataatcttataaataaaagacagagggagtaggaaattgtattttctcgttgcttttaactattagaattcctacctagttttcaaattcacaacctcctctcactaatggattcagattgcaagaaaaggctagacctacccagcaggggtaggatatggtctattgcctcctatgatgttataaatacctacctcatgaggcaatagttctaggctttattttgcataaaaatctgtactaaaaggtgacgaataatacggttcttcccttggaattagcagtggaatagtctgccataatttaaatcttgtaattctttgagtttccttgttcacacataagttagagagtttagtatggttgaagtgaaaatttacgggataaaaagtgaaaacttttaggataaaatagtttatatgtggtgttacacttgctgccgaacgggttgaaaaatgatcttcaaccaaagcacatatcctttgtcttcaaaaaagaaaaaaatgattcatatggtgattttgttaatttttcacagcctgagacatcaagaatttgtggtactcttattaattattcctgtttaccatattttcagggttttgttcgttctgatacgagttttcttatttc

SEQ ID NO: 24620 - DNA, 773 bp, Glycine max
  Intron number 1 from transcript Glyma09g02090.1 (locus Gly ma09g02090) derived from phytozome v7.0 (chr-ID Gm09; pos 1384883 to 1385655 reverse strand)
catccaaatcaattaagccaagtaagttgatatataagtcacacatgaacacattctttgtatctttgtgaatgatcatggtcagtgatgttggccgaaaagctgtgcatattgttaatcaatctttggtctttttaaatagagaaagtcatgttttgcgcaaaacccggatagaaagtgcaggtaacaaacattgagcattgtgcaatgaacataaatttatgcatacatggcaaagacagaagtagatggtatcatagcactttttagaccttaaataaagaatgatcataattgattctccaccttggtttatgttactacatattcacaaaactactctcagatctcaaattaacaatttgaaatccggctccacttgtttagtgtaaacactacctgcccccaccattggatatatgtagaacatagttccaacacaatagtacagtgagtgatcaaaagccagtatttaaattttaggcttcagggtccgctcattataaacctagtcaaatgagataataaaatatcaggtaataaagatgtgccctagtgtattgctggatttttcttttcatagctgaaaagtgaaaagtctttgatgtttaaaagtgccatgctggatttcaatttcatcttaaaaagtttcttgtttcaggctcataccattgtttgtgttatcgaaggccaaagcttataatcacttctgtgaccccagttctgtatattttgcaggtacagacttgaagttgggcactaactactggtaa

SEQ ID NO: 24621 - DNA, 319 bp, Glycine max
  Intron number 1 from transcript Glyma10g01160.1 (locus Gly ma10g01160) derived from phytozome v7.0 (chr-ID Gm10; pos 854200 to 854518 reverse strand)
attcgtagctagcaaggtctaatttttcttttcctcttgatgttatagattgttctttgttcattcttgatgttgaatatacaatataatataccattttgtttaaagataattgtattatactattcctagtttgttgtattgtaccacacaaagtatttactaaaaatataaaagagttagtttccgtacgtgtttttttttttaaattattaatcaatcaaaaatcatcttgagtataatttttgaaatggtcattagaagtaaacaaaattattatccatgtcaattttgcgttctgctttttggacagggttct

SEQ ID NO: 24622 - DNA, 618 bp, Glycine max
  Intron number 1 from transcript Glyma09g21070.1 (locus Gly ma09g21070) derived from phytozome v7.0 (chr-ID Gm09; pos 25936389 to 25937006 reverse strand)
gtaagcttgagcaagttcgcgtgtgatgcatcatgcatgagctaataatattgttaaatttaagagcatgtatattaggtgactgcaagttctcatgagatgcatgaactaataatatgcatgcttaatatgttatatctttagaagaagatatatcttaggtttcatgtcttgatatatcttttgttcttttagggtactaccattatcttatatctttaatctctctctctctctctttttttttttttagttttgccacaaaaaatatcttatatctttagtatattagcctagtactttgcaggtaagaatatttctaaatcaaagatcagagtgaggagtgagggtatcatcaactaccaacaaaccctaaacctacctttttaacggaaaaaattaatcttaagagacctaattcaatgttataaaaatgacttacaagatgaggaggccggattattttaatttgatcatatcaacagtgaacttaataattccaagattaattaattatgttacactaattttatgtgtcattttggatcgtatttaggtttttagaatggaggggaatgacgcggaaggcgtgataaagttggagtcatttcagagtgc

SEQ ID NO: 24623 - DNA, 653 bp, Glycine max
  Intron number 1 from transcript Glyma11g15840.2 (locus Gly ma11g15840) derived from phytozome v7.0 (chr-ID Gm11; pos 11499474 to 11500126)
agaagtcggatcaagaggtatattctttctgtcacaatttttttcctgttttgaaatgtgttacgtgatttctgcgatttacgtttgaactttgaagtatgtgtttaatcttagccttttaggatagttcaagacaaaataaacacagtttttatggaagttttggggagaataggattttaggatacagggaggatggaataaagtgatgaacgattctagaaaggaacttttgtcttcttgaaggatttctgtttggtatgggaagatgtgtttatttctctggtgcaaaattctcttctctatcgtagctgaaatagccctgcaaacaagttctttcacaaatgaaggaatcgcaagatttttaaaagttgactctaatagaacaatgatcctgagttcccaacatccatatgatgtgttgttatgcttggttctaacctcttagaaacaatattaaaggcaagttttactttcctgtatcaaacacaggctcttgcattttattaggaattttttacaactgataattgttttctttgggataatgagctcttgttctccttcctgtaattacctatgtatattatatgtagttttataactgttacttgtattgtatgtattctgtttggctgtaggtccggacaagg

SEQ ID NO: 24624 - DNA, 809 bp, Glycine max
  Intron number 2 from transcript Glyma10g40520.1 (locus Gly ma10g40520) derived from phytozome v7.0 (chr-ID Gm10; pos 47907800 to 47908608 reverse strand)
ccggggaaccctttgttgattcaatcccatctcaggtgaattctctcccctcccccctctttttgttaatttcctgtgtggttggatcaatgagttttaattggttccaaatctgatgtttattatctgatgactcaaatgtggtcatatttacttggattaaggtattgatagtcctttgtagggtaatgcttaatttggtatgatgtgaatctttcactcagatttaggtacaaagttcatctttgactttaagtgatgcatggtatttcacaattcatatttttcttttgttgaataaaatttggtcattaataattcatatttttgggtggtcatttgtatcctttgtttgtcaattgtcctgcacttgtgttataattaacaatttaacagaaactcatccgttgttggaggaccgggatcacacatgatgcactttttttggggaaggttgagtattttttttattcaaatctctaatgcatataggaagatatgttcattgttgtccaacatgggatcatataagtttgcaaatgtgagagatattggctctgtggaatataatttgcaattgctgggtacttggcgtgagcaagaaccaataaaagtagatacatttgattaatcaactcatgtagcattggtttaaaaatggatagcatcgggttgatatgaagactccaaataggaattgttgtttttttagttagtattactacttatgatttctccttaatttgtttcagtctgaccccgtactttttgcagattttaagttggagaccacgggcggttttctttcc

SEQ ID NO: 24625 - DNA, 877 bp, Glycine max
  Intron number 1 from transcript Glyma11g37590.1 (locus Gly ma11g37590) derived from phytozome v7.0 (chr-ID Gm11; pos 38641693 to 38642569)
gagacggttctcaaggtattgctccctcaagctccgaactcttcgatttgatttggttttcttgatgagtgaaatccaaactgcaatttgaattgtcaatttatcatcgcactggacggagcttgtgattctgtgtttggagagaatgtaattagaatcatagaatggaaaagtggaataagattatagctctctacagtgtgcaattattgctagttgtaggtaggatagggttccagtgcggttggtttgtggtattcgctgttgtagctgagaaatgcgaaatatcattatttccactttgattctagcgatttaatttcccgtactaggtctagttgccacagaaaggactttgaagttatgatgatgataacgagcatgtttggttttcagttcaaaattacgtttgaggcaaaagtaattctgccaaaggatcaggactcttgctcctgcgctcattttacttttattcgttggacttacattggaatgtgcaccgcaacattaccaactgcaaaccaaacatgcacaattttgcatagtaatgaagtaatttattccggtcaaatttcaccttgtataagttttactgtttgaagactgctaacttgacaaacttaatcaaagaaagttgcagtttattgttatcagtcatgcatgaagtattattcttatagagtagaatgattaacaggaggatatagcattgcttgtgatttattgttatgtgtgaattagattgctattttgattcaaaattgtacttttataagtacacacgggtctacttttgcgattacatactgtttcagtaattctgaggggaagtaatttacattttttcaggtactcaaggacgggctttctgctttgc

SEQ ID NO: 24626 - DNA, 1062 bp, Glycine max
  Intron number 1 from transcript Glyma08g45780.1 (locus Gly ma08g45780) derived from phytozome v7.0 (chr-ID Gm08; pos 45049299 to 45050360)
gctcccaacaacaggacgccccttcccaccaccaggttttactctttctttctcctctcttcttcttgttggaaatcccacttcgactagtgatatggccaaggccaagataatgtatgtaagtaggaacaatccttagaagtcagtttcatgggattgacttataagtagataaacccaaattctaaaatgatatcagagcctatcctactgagcctatttggccaatacgttatgggactatccgtagatgtctaatccagtaaagtacatggtttctttttatgtgtatcaaacccaaattcttagacttatttttttggtgttattgcctgattgctgtaattgtggattggtttggtggatggtgatattgttgttgttaattcttggaaccgtttatttatggtgattaagtttgttgtgatctttggtgttggagacaaatgtggctggtgcagctgtaattgctgttgcgatgcgattgaggagacccgaaaaccttgatttttacgaccattgtggaccaatctttgaaatcttgagtgttcttaatcatgacattttgttttttcttgggaaaattaagggtgtttttaatttctactttcaaaaattatttttagataaaaaaaacaacaaagaataatgacacccacactaagcttatgcctcaccatgtcccactttctgttttttctttaacaattgttttgaaaacaattttcaaaataatagattttggaaatcaaacaggccctaagacttcaatttggattccgtttctttgtttctattcagagtgaattggttgtgatgaagttctttcattggtttttttatgctgtggcatgacacttgtgcttattgctctttttctatcccaaatggttaatggcctcttgtgtgccgtgcttaatgaatgtaaatagttgcatacagattgtgagcatgttatataccatgatgttgaaatttgaggaattgggctaaaaaatgtgttgcattgtttcactttcatatgcagggtcaggttcaatctggaaggcttcggtataagct

SEQ ID NO: 24627 - DNA, 592 bp, Glycine max
  Intron number 1 from transcript Glyma11g14950.1 (locus Gly ma11g14950) derived from phytozome v7.0 (chr-ID Gm11; pos 10698105 to 10698696 reverse strand)
aacccaaccaacaccgtttttggtaagtactactttcaactcatactgtaaatccttgattctctgcaatttttcattgttccagtgaatttataactctacacgacgtgatttatatcagcacttgtagaaaattccaattatctgtaatctaaccctagctagtaatattctgtaacgattctttcgtgtttatttacaggaaaaaaaaaatcaaaacagagtcgtgaatgcttttgtgtggattgtagacgtttgttaattaggctgtgattttcttttcaattctttgtaactcgagttctatcattagttcaattgtctatggattttattaaatggctacttaattgaattttctgtgcaaaagaatccttggttatgcggttagattgcgaatcctttttggtgcatgcagttgctaaacatttgattggtaggctgtgtatacttgattgaattgttttatgttttggatgataaatttattgaatggatacttgctcaaataatctgtgcgaaagcttccttgattatgcgattatatagtgaatcgtttggtgattgtatttgtttgatttggcgcatgcag

SEQ ID NO: 24628 - DNA, 561 bp, Glycine max
  Intron number 2 from transcript Glyma10g43250.1 (locus Gly ma10g43250) derived from phytozome v7.0 (chr-ID Gm10; pos 50021153 to 50021713)
ggtaattgcttagctgttgtgaaacttgatgaacgttgctgtttgctgtgcatatttcctatcttttgtagtgctcatgctattattgctagctgtcctttatatgctcaatgtctttgttgttctatatatcctcactgtaaaaaatgattaaataaattgccttgctgagttgtaaagtgtaatgcattgatcaattgagaccttggatattatgcttgatttctttgacatttcaggaattgagacattggcatttgaacatatttggttgagatctttgaccttttcagttttttttggcctatattcttggagtggggaaaattaaatagaaaaaagttatgttaatttcattaattttgaatccgtgaagtttcttttttatattttgggttttgattaaaatgagtaaactgatacatgatgtctgctattcttttctctactaatcctggttttagaaatgttgaggttttatgttagattagtagatatgattttaattatctgattatcatttcaggtctgggcctctggtttctctgcagcgtttcttaa

SEQ ID NO: 24629 - DNA, 486 bp, Glycine max
  Intron number 1 from transcript Glyma09g02790.1 (locus Gly ma09g02790) derived from phytozome v7.0 (chr-ID Gm09; pos 1927777 to 1928262)
gccccctccaagatcttctggcgcaccgttcgtgggtcagtcattactcactttttttttttttactttaattccttttaaagtttataactttccaacacaagcgtgttttaatttgtcgtggggtgtttttgttttcgtagaatgattttttttatcggctgttaaatgttatttgttagtttttgttaacgggggatttgaacccacaacctattctttaaaagttgggaacttttaggagaagtgtggtttaatttgttgtgggggggttttgtttttgtagagtgattcttatataccccattagccgtatacatcttgagtgagaaaggaagagaggatagataagtgtttgatttgattgattgatggtgtagtgtggcagggagagggagagatagataaagagaaataagaggtgttgagagggagtttagaatttgtgggtgtctaaatataatcactcgtttgtgtttttgtaga

SEQ ID NO: 24630 - DNA, 733 bp, Glycine max
  Intron number 1 from transcript Glyma09g07080.1 (locus Gly ma09g07080) derived from phytozome v7.0 (chr-ID Gm09; pos 5928111 to 5928843 reverse strand)
gcaggtgttcaaataaaattgatattggagaaaggtgttttggaagacaactttccccttggaggtggccatctgcgtttgaagttgcaattcatccttagtgatgaagagcgcgacagaattcgttcattggtactgttttcttttccttgttcagtttgtaatgcacttatgcttataatctttctccaatatttgagattaaatgcatcagtcaatcattgccttggtacttagccaatggtataaaaatgaaatgtatgcaattggagtcaccactcacaagttgatacatacagatagtaatctttgaatgttattaacttatagagaaatcatttgaagttgtggttattagttcttccacattaacttctcatatcttataacttttgcagagacaatctgcattaaagaaaaaacatgatgagcttcttagttccagtagaagaggtgaagaaagcgatagtagaaccgtgattggaaatgctgcattgcccttccgcagaaatgatgaggtctcaggtttgatcttacttaactgattaaagaagcaatgaaaaattaaagcagaaatacattaataagaggggttaatgatgagtaaaacatacaaaaacttaatagttatgaatgcggtcctactacatttcctcaaaggctttttcctgatgttttaagtgctccatcttctcaagaatcaccaaagatacaacatcaacacgaagcagat

SEQ ID NO: 24631 - DNA, 583 bp, Glycine max
  Intron number 1 from transcript Glyma11g33620.1 (locus Gly ma11g33620) derived from phytozome v7.0 (chr-ID Gm11; pos 35470455 to 35471037)
ttgctggagagctgtccctaaactagcaggtctcctttcattgcttcttctcttggtgcatgtctttaactctaaggctctattattatggtccttgttattgaagccactcatttccttaatgggactagccacatatgcttatatgatagcaatttggctatgaaaaatcttgaaatgtttcattaattttttgcattttggacaattggttttggccaactttgctgcctgctggtgctgtgctcattctatttccattttgttcccattcaaagagaatgaaaagcaagcattcaaaaatggacatggacatattcttaacaccttttttgaagatatctttttgaatatcttttaagcattttgatttcaaggaagcaagaaaaataaagggttgtgttgtttctttaacatcattatatggggaaagggttaagtggaataaataaagcttaatgttcatttgcattttttttattcagactctcaaaagaaagtaataatcaatatggtgacttagcaaatttggttattctttcatgcagggctgttaaggtgtggcaaaagttgcaggctcagg

SEQ ID NO: 24632 - DNA, 441 bp, Glycine max
  Intron number 2 from transcript Glyma12g27400.1 (locus Gly ma12g27400) derived from phytozome v7.0 (chr-ID Gm12; pos 30975398 to 30975838 reverse strand)
ataacggcagcttgtaagtgccaatacacaactttgaaacactcaccttaagcttgttctctgtcaactcagcatccaaagagtgtttttttagtctgaacagagagggtgaagagatgaaaatctggtgtgatggctctttttggttctgaaaattttgattatgtcagtgtgtttggatgaagaactaaaagtgtgtttggatgaagaactaaaattaattttgaagtgatgtgatttatgtataaacgtttttattctaaaagcaagtcagtgttaaaattgtgtaaaatttatatccacggccaaagctgcttaaaattgctttaactcaaaatatggatccaaacacgcacaaaaagattgtatttttatttattgatttatggttttggttattgcttggttggtgatttaatgtgttgttaattttggtgcagg

SEQ ID NO: 24633 - DNA, 729 bp, Glycine max
  Intron number 1 from transcript Glyma10g08390.1 (locus Gly ma10g08390) derived from phytozome v7.0 (chr-ID Gm10; pos 7223863 to 7224591)
gggataggaactgcaactggtatgtatggaaactgcaatgtagcctccaattcttgatcttctatttgattcataattatgcagtgattggaatctgaagaagctcttgatcctctgttttgattacaaaaagattgtataatgtgtagagagtagtgtgattgtgtgatactcaaactataaatgttcgacggttgtacatattggctcatcagcatgcatgtccaaaaggaaaggatttatacaaatgaagtgatttttggggcatggctggcattgcattataactattttttgtatacccaacaaagcaatatgaagggtgtaagcatatgaaacaaaatactaagccagtgatccaatttttattagtaaggtcaagtactagtgttttattacaagcccaagtccactaatacaagcactagtatataaccaacccttaataactaaggaaataaaccaggaaacaattccttaggttgcttcctcatttacatgactaattgatttcacagtatattctgaagatatgctaatatattctaaagtaatctgaactctgaagatattcctaatattatgctgtaatggttaacataatacaatttttttacctcttctacaccactttctgtttttcttggcattctaatttttgagccacatatattattgaaatttatcacgtggcttctttttgtgtttaaggaaaatcaagggcaagag

SEQ ID NO: 24634 - DNA, 791 bp, Glycine max
  Intron number 1 from transcript Glyma09g01190.1 (locus Gly ma09g01190) derived from phytozome v7.0 (chr-ID Gm09; pos 717547 to 718337)
tgctttcacgtctcattcatcataacatagtgcaggtacagtgtttagtgaacatttaatcttattgtcctcatggtagtgtgtttgtttatcatggggttttgtatttgtggatctgaaacttggaggggggggggggggggggggggggtaagcaagaaactagttaagcttgtcacttaacacttgccactttagggaaagaaaatgatgaatttcataaacaactatggtctttttttctaagtaaaatagtttctgagacacaaaaaaagaggaaaagagggacctctacaatttaattaagtagattagctcaataacataaacaatgcacctgattgctgcccaatattgacttttctaactttctccttttgccatttttagattagtactacagtgatttatctttgtacttggcgttttgtaaagaccatgaggtacctattttgagtgttagacaaaattgatttggacttggcatgatcaaaatggaaatttcatatttacttacaattgacatgattaaaataatttatattagtggaggacaattcttttcccgtaaattaacttttgaaattgaattatgctcaaactaaaattctaatattctaatatgttgaagtctatcttagtagttgttattgggtcatccattatagaaccaactgcatattaagattgaattagatgtaaacccaaatttgagctgcaactgtgtttgaaatgcctctattaatggatgcataagcttaaatgactcttaatttacagtttattgcagc

SEQ ID NO: 24635 - DNA, 910 bp, Glycine max
  Intron number 1 from transcript Glyma10g31780.1 (locus Gly ma10g31780) derived from phytozome v7.0 (chr-ID Gm10; pos 40252133 to 40253042)
gggtaatttattgaaccctctcttatttctttaatttttactcctttttctctcattcagatcagattttctattgaatttttttgttgatacatacacatctttatataggcatttatgattgtttgttgtttgagggataggagaagtgtaagtagcacgttttctttcacactttgttaatgtgtttttcagttattattggtaataaagagagtactatagataaaaatgtaactctgacattatttggctgtgtttgtattggcgattaacacattgaaagctaatgtttccttttagtaaaattgtgttcaatgtgcattagaacgcgagaaatgcttaagccaaacacacacaagaggtgttggggattcaaaattaggctctgaaattgtggctggtataatgtgcttaatttgagtgctcccagagtcccatggctggtccatgagggtggcatttgtcttgtaatttaagctaaaatgtttgtactagtatgtcattttacttttttttttaacccatactttcgttttgtcggtttttcatcggtacctgtacctagatctcttggctgattgatgaaatagacagttgtacactttattatagcattcaacaaaattagctgcaagatgttattattatcgtttgttttctcctttaagtattatttgtctctatataacatagggtgtgtcaatattctgtttcaaacttatccctttgaatagaagatttgaaaatatcttgttttttccatgatttctaaaataaaaaataggtgtattaaaagatgtctttgctgaaaatatgttaagtgattccgtccaatgatattcttccagttaaattcatgaaaaagtgtatatatatggtaacacattacatgtgaattgatgatcag

SEQ ID NO: 24636 - DNA, 513 bp, Glycine max
  Intron number 1 from transcript Glyma11g04880.1 (locus Gly ma11g04880) derived from phytozome v7.0 (chr-ID Gm11; pos 3349559 to 3350071)
tggtggaaactggattgccttgccccagaaaataggtatatatggtccatttatatatattcatcaatcaacacatatcaattaatattccaaaatcaaaatacttctccatacataatgattaattttacaaacatatacacataattcttaacttaccaatcatattttagaacacaaattcaattctttatatatgttgcttcttatttgctttgtatgtgtgtggtttaattaggccttaagaggtgtgggaaaagctgtcgtcttagatggctgaattatcttcgcccaaacatcaaacatgggggtttctcagaagaagaagacaacatcatctgcagcctctatgttagtattggaagcaggtagttaaataagttccttatttattgatctacaaaacttaattttaatttgttattgaaattaagcagcctctatatatgatatatgtttaactgtggattttacttaattgatcgcttaattagaattccttggaatacaaac

SEQ ID NO: 24637 - DNA, 899 bp, Glycine max
  Intron number 1 from transcript Glyma11g10350.1 (locus Gly ma11g10350) derived from phytozome v7.0 (chr-ID Gm11; pos 7437017 to 7437915 reverse strand)
ggcattgggttttctggcttggacctttcttggcctgcataatctattatagtgtctccattaatctaccaaagaaggatttggatggggtagatggagaatatgatgtcttaaaattggctttgggttcttgtgggactatctctaacaatgttgttatcaatgatcttccttgactctcaagtctgaaaagaaatagacaacttcgtgattttgatgccattatatttagttaacaaataaatgtgggtttaagtcactttagaagcgtttgtttgattttatttttttaaaacagttaatgtgatatttatatgttcgcggtcactcgactgattgcgtgcatttattaatatgtaaatagtataaaatttgattgaggggtttaacaatcccattttcacattcattgctatttgctactagaagaaattatcacatgggatataaatcaatattacttcatattatatagagcagctaggatataatcacatcacatctgaaaatatccataatggtttgataatgtatgcattatagtaaaataattaatcttactctttttaggttacgatcaaacagcctgaacgatgactcaagtacaacaccatttaaatttgacagctcaaaacacaaattatgccagtaataatttacatagaataaaaattttattatattgctcggttcttttacccatcatatacttaaacaactcagctatgctgctgtttcactaggggatggctgcagaagtgtagaagatgagtctagtggctcgtgtactaccgaatttgaagaaactgatatgggatttccctccaactgcaacattatgttccccagtatttcagttaatagtttcttgaattcgtcttctttcaccaccttcgcat

SEQ ID NO: 24638 - DNA, 822 bp, Glycine max
  Intron number 3 from transcript Glyma10g35510.1 (locus Gly ma10g35510) derived from phytozome v7.0 (chr-ID Gm10; pos 43742519 to 43743340 reverse strand)
ctggtctcttctcatattgatactgttatttctacgtatgttttcttcatctatttgctcccatacttctgttttgatcaatcattgcttttttctttgttttttaaaatgatgtttacagattactgggatgcatttatcgttgtgacctgatttgccaacataaatatgttgtacatgggggcttgtgtctgtatgtaattttgtccatctatgatcaataattgacctcttatgtagaactctatgttggtctgctgcaggagaggggattggggatgatttcatagtggggagtattgttggagccctgatttttatggagaaaggttaaaaatatacataatcctgtgtatgttgctttgtttgaaatcctcacattagtggttttaaacaaaggaacattcaattctttgatcagtaagagaaggataatatcaataaaccactgattgtggataaaaattaaactcataacattatgaaagtaggagcatattggtcctgggaaggatatttgaggaatgacattgtactactaattggaagtcgtaacagggacatgaataagaattctaaaagtcatagtaagaaatatttacaatctcaagcttttttgttaaaaatattcatcagcctctccttatgctatttggtgctattctggaattccatgcaagcatgcaaagtgactgctctaaaaaattttgcttttgcaatttgaatatttgaatttttttttaattagttaagtgcactctattatttgctgctaaaaatatagcattgatttaacagagcaggggctggagattgtagttc

SEQ ID NO: 24639 - DNA, 656 bp, Glycine max
  Intron number 1 from transcript Glyma09g38370.1 (locus Gly ma09g38370) derived from phytozome v7.0 (chr-ID Gm09; pos 43747733 to 43748388)
tgacacttttggacagagaacttctatctaccgtggtgtaacaaggttttttattttataccctaaacaaggatgtgtatgaatattttttatttagtttatgcatataaatttgagccgtcacaaatctttcaccactgcttcatatctcaattaaaaagttcctctagtcagttctcgttgttttttttaaaaaaaaaattgtgaaatgattatgaaattagggtttttgacttaattgaaggcataggtggacggggaggtacgaggctcacctgtgggataatagttgtagaagagagggacagactcgcaaaggaaggcaaggtatgatgatctacaacgttcctctattttagggctaattttttgccaatgtttttcttcatttgtcccctttgtgtgcgttttttatgactaacatccatttgtagtataatattaacttgtgcgttcttcatctccacattcattatatggcgtaatgtctttcttcaacgtacattgtcttgcagtttacttgggtgagtacaaaaagatatatattcttttaaattataattgtattattattttttttgggccaaaagtaagaagagaacgttaaaatttgtttacatttggttatcatttgttgtcactacttgcaggtggtt

SEQ ID NO: 24640 - DNA, 358 bp, Glycine max
  Intron number 4 from transcript Glyma09g33400.1 (locus Gly ma09g33400) derived from phytozome v7.0 (chr-ID Gm09; pos 39872091 to 39872448 reverse strand)
caaattaggattgttttcaaactcgacgaaaccaggtaagtggaaaaatgtcaccatgagaaaagtcaatgaaaaaaaatattttcctttgatttttgaaaaactgttagtacttttcattgactgtggatggaaaatttcaaatttttaaagaactaaatatgaaatggcttgaagaaaagtatcccaacaaataaagtattagtaaacaggtaggttaatataaatagattagtttgagaatacatatatgatatatgatacatccttgtaaagtacaattcagttttaaaagtggaagaataaaacaagtatgcttataagtaataaacaaccaataatatccaggttccactac

SEQ ID NO: 24641 - DNA, 529 bp, Glycine max
  Intron number 1 from transcript Glyma11g13470.1 (locus Gly ma11g13470) derived from phytozome v7.0 (chr-ID Gm11; pos 9562883 to 9563411)
ggtgatacgaaggtagtttaagtttaattgattctgttcttcgttgcaattttgttttttcccgcagaatccgtgaccgtgcaaagatgtgttgaaaaaaacggtttccttcttctttacgcttcacgtcgtcgttttgttggagtgccgtgtgagaatgaatcatctccgtgttcgttattttgatttgctgaatttccgtgtattcagatctcttgagtgcactgtagatctcttacaaattggaactgtatttgccttgttatttggaaaatgtttgattataatattttagtaattttatttatttaaaggtaattcggtttaacttaatggccttttggcacgtggttaaggttttcctgagtgaaattagcatcatctgctatggcattagtattattcacactgccattgatagttttgttaacgtgctcatatttgtatgcactttgtattttggttatctgcaataggtgttgattattctctatcttttaggaaagaagtgggttttgcgtgtggccag

SEQ ID NO: 24642 - DNA, 710 bp, Glycine max
  Intron number 2 from transcript Glyma10g10460.1 (locus Gly ma10g10460) derived from phytozome v7.0 (chr-ID Gm10; pos 10216580 to 10217289)
gatagctccgttgactattttgacatatttggggtgtaagtttctgtttctttatttttttttgttctgggtgttgaaattgatggctaagttttcttctttataacaaaggagaaaacttacacccaattgtctaggtgcttttagtactacatttaatgttctctgatcagaattagagttttacttcgttattttgtgtaataaaagtttgcattaaaggttagcctagctcaggtgattgaaattccaatttggattgaagaatttcacaccaaaaaaaaaaagaaaatataggaattgtataatataagttttgtccttataacaattcatttgtttttcaccctggttggtcagtactcaatagcaatggaaaacaagtatatatatggattatggatattgttaagtcagtctgttttgatgaggcataaaactagtaaggtgaaacttaatattttgggtaagtaattgttgtttttttagctttcggttattgcttgcttcattttcaagcaggaagaaaaattataatcttttatttgtcataattgattcttatttgaattttgagtttcattgatggggctgggaatcagtggtttagtttttgtgatggagaaaagagaaatatattgatttaatgaatgagtataagaagttaaaaatcatttttttatatataattttaaacagggagaggaagt

SEQ ID NO: 24643 - DNA, 446 bp, Glycine max
  Intron number 1 from transcript Glyma11g19490.1 (locus Gly ma11g19490) derived from phytozome v7.0 (chr-ID Gm11; pos 16207760 to 16208205 reverse strand)
agaaagaggtcagaaatcagaataaagattccctgctcttgtgctttgtttttctttcttttttttcaactgattttaattaactcaaactcaaattccaagacaatattagcattcactcattactgttcgtcctgtcagattatcattgtctgactgaccatcagttaatgtctggctggttctacaaatttcacgctccaatgtctggtgcttaacttatattgaagatccaatattgatttgtaatataaataaaataatgtatataagtagaggaaaattcttgaatttgagttaagtttaaactgttacaaagttttgtgcctttctggatttatttgcgctttaaaattggtgcttatgttataatgtattcatctgggttggttattttttttttggattcaggtgtacaaggtgtcgattggagcagcttgtaatct

SEQ ID NO: 24644 - DNA, 849 bp, Glycine max
  Intron number 2 from transcript Glyma11g33240.1 (locus Gly ma11g33240) derived from phytozome v7.0 (chr-ID Gm11; pos 35027710 to 35028558 reverse strand)
acgaagagtatgtcatgtttcttcatttttataagtttcaaccatttttgccttctttgcattgattaaccttctaaacaacttctgtcagtgtcacccttctcccctcattttcatttattttcttaacaatgcttaatcaccccaattcagataatgcattattatttttaatcaatgataataggtaatttaaagatattcactagttattgttatttaagacaatctagtagcattgtgtagtagcctaatagcaatttatgaacttaaaaaatttctgccacttaatttctcatcaatgattatctatttccacttttccctttgtatggatattaaagctacacaactgaaatttcctctaccctgacaagtgacaaccagcagaaatgtagctttgattcttaaaatgacgtgaaaaactacacagaaaaattctatagtatttccaaagttggtccagctcaatatttacggacaacaaataataaattgtaagcaaattcttaagcaacaatttacaaggattgagggggaaaatagaaaaagaagtctcacaggtgattagattagtaatcataatttattttatactgtaattaacttaaagctagtacgctataaatcatatatcacagcaagtaataaattgaagtatgtcattgtcatatcatattaatatacagtgttttctttaagtgtaggactagagatgcactagcccaatataacaactcaagtgttcaatatttgtaccttgccacatgaaagtagtctacaacagctagatatgtttcggcaacaatctattgatcattaacttgggtttatgtttcagggcaaacg

SEQ ID NO: 24645 - DNA, 526 bp, Glycine max
  Intron number 4 from transcript Glyma10g31920.1 (locus Gly ma10g31920) derived from phytozome v7.0 (chr-ID Gm10; pos 40426254 to 40426779 reverse strand)
tggtggcactcgtatcgttggtcgtctttgtgttggtaaagtttttttcccctagttgttaaacactccttgccttggactataaaccagtttgaataaatctttcaataagcacttctaggaaaagaaaatcaagagataaaatgaatcaaacttctcccataagttaaaaatagcttgtgcacttcagctttttgtgaagttagatgagagagcttctaaaaaattgaggtggataagttgattttaacgaaaaaaatttgattcatttaacttcttattttctcctactataagtacttctagaggagtttattcaatctggatctctgccattgcctttaagtgatggttccacacactctttttctgtcagtggcatattcttcatttagtaaaagaataaaaaacagttacatcaatttattttatttattgatttattagatttagacctgtcataattagcttccctatttattggtttgcaggaaacaagaacgggcttctcttgccccataccacc

SEQ ID NO: 24646 - DNA, 566 bp, Glycine max
  Intron number 1 from transcript Glyma10g31920.1 (locus Gly ma10g31920) derived from phytozome v7.0 (chr-ID Gm10; pos 40427236 to 40427801 reverse strand)
accctacactctgttgttgtgttgctatacccccggtgagcggtgacctcttccgctttcatcttcttctgtccaggataactaatataccctaatacccattttctgttttgtaatttcaagtgtaaatttattatctttttgttgatatagtgttcggaaatgaggttaaggagtttcaagtttgaaccttatctatgtgcctgaagcttgatgctttagtcgtatagtagaatcagatagcattggttctagttctacgtgggcctttaacctatcatacaatacaagtttgttacttgagttttagtttgttggattggtcacttgttttatgttgcttgcagagtcaaaggagtattttgcagaatagtaaggcaaagtagtagtagtaattgctttcttttcatttgaaactgaaatcttcattatcaggattctcatcatcaactttaacattgctacaatttgttctcatgtgaatcatggttcctttcttttgttttcctaattagataactaatgctgcagatattaagctggttactttggtcaaagatttccgg

SEQ ID NO: 24647 - DNA, 1036 bp, Glycine max
  Intron number 1 from transcript Glyma11g02190.1 (locus Gly ma11g02190) derived from phytozome v7.0 (chr-ID Gm11; pos 1361185 to 1362220 reverse strand)
gaggatccaccaagaccctcggcaacttcgttaaggtttgtgtatttttttaccaatttgttacttttcatattttagattgccgacgacattgtaaaaatttagggcaaattagggtcgtgcttcaaatgtgacaattaattttttcttatttatgtggattttaatttttatttattttaaattcattcgaggttttttgcgattattgtctgcaatgcgtgagtgttgaaattggggaaaaaattgtcacagttgcaattgcggagttcaatttgaaacctttgtgttttatatttttatgtgaatttttatttatcgtatttgagtgtttctgatgggctttgttttgattttgtgttttggattatctttgtttaatggaataattcgttttctttttgtttgaatgtttcgttattgattgttgatgaggatgttttagactaccgaattcatgtatagttctactgttctaccttttgcctgtgtttctaacttagaagacagtctactcttcaagagaggtagttccattgtatggctttttgtgtatgaatgtgtttgaataaactaccaattttgtctctgaagtattactgtttcttctaagtagtttctaaagcaataaaactatttgagtaattttctaagtattgattattgaataatcttcacccagtacctatgttaatgtattttagtaaagtttggagccccatttgaaagatcttttaatattcgaggcactatttagtattgattttaatgtatttgaggcactatttctcaatgtaagttagtctatggtgtctttgctgcaattgaaggcattcaaaatgcatcatggatcacttgtgtgatttgttactcgtgtgtctatgtgcatgatcctttgttagagaggccagtgtgtatctatgtgcatgatcctttggtatagaggctaatgtccatgaaagaattgctctaatattgttttagtacccataatgatgttgctttgtatttttgacaggctacttttgattgcttg

SEQ ID NO: 24648 - DNA, 701 bp, Glycine max
  Intron number 1 from transcript Glyma10g34350.1 (locus Gly ma10g34350) derived from phytozome v7.0 (chr-ID Gm10; pos 42509133 to 42509833 reverse strand)
gtggaatcctttataaagaagtaattcctgctttttgttttacagattattgaatttgagtgtttaattattttatccatacttccctgttaggaatggcttttggaggacgtggttgatttttaccaatttcttttgttattgtttcttactttgctacctgttatgatcaatgcatattgatgaactctaagggagattcactcgttttgtcaaaagaaaggacaataacgatgcttattataattgatattttatgcttgattaatcccaatatgactactttgtggcatctattcttggcaccagtttaatgtgggagtgcaaaattgatatttgcttcctgttcaattttaataataaaactggtgcattgatttttttaatgaatatttttaccattactttgttaaacttctaatcacagatgagaccttttgtatttgtgtattctttctgctatttgatatcaatcgacttctagttttctcttccaccgtgctgttatatcacaattcacatgcttacagggttgaatgcttgaactatttagtatgttcatattattctttgcagttgttgtaaacttgtaatttaagtcaaactttagggaactgttttgttaatgatttgttaaatgcatcacttgtatttaatatttactatctatttacttgtctccaggtaccaagagttgaaca

SEQ ID NO: 24649 - DNA, 997 bp, Glycine max
  Intron number 1 from transcript Glyma10g34610.1 (locus Gly ma10g34610) derived from phytozome v7.0 (chr-ID Gm10; pos 42801440 to 42802436)
agatttctaggtatatatgatatatttacatgtatatatatatatatatgtatgtacactcacatatacttatatacttaaaagaaaatgaaaaaagaaagaaaaaaaaaaaagcgaaccactgtacatgtttttgctttttgtttttgtcttgagactcagaaagagtaggggaaatgtatagtggtggtgactagtgaggagtgaagaaatagatggcttcctggcctgtcttttctttctgtcttgctggtttagcaaaatttatttttgggggtggtgggggggctaatatcctctttgcgtttgaaaatgacaggccattacttacagataactgagagatccatgtggcttttgttatccatttctagttttgtccaagatatcccactgactgaatgtgtgtgtatacatgcacttgtttttctgtgaggaaataattatgggtgcaaggatattttttcagcaccctgaaagcctgtccttgtttttagtactactattaaacctacctagctattttgctcagctagctagggctatacgttggagtttattttgttgattcaaactcggataattgtattcatgatgtttctgacatctttaatgaagagagaatgtttccattattttattttaatccttcaccacagcatgtttaatatacaaatattcttaaggaagagagaatgataaatataagaatgcttaatggagagatcttacattggtttataactatactaatgttaagtccatgcatgcatgactaaaaaataaaattttatgtggtgttatgatttataaattaattagtacggttttttaaccagataatattgtctgtgctatttctctcacccctaattttttatctaagagaaataggtgggaaaaataaaagaggaaatatgatttgtgattaatgtgctaattaatctctccctccttcatattaatagctgtgtgatccacgtgtttaattaggata

SEQ ID NO: 24650 - DNA, 717 bp, Glycine max
  Intron number 1 from transcript Glyma11g02670.1 (locus Gly ma11g02670) derived from phytozome v7.0 (chr-ID Gm11; pos 1736762 to 1737478)
tcaaagggcgcttcttcctcatagctggcaaagtacgtatttgattatcttttttctcttcttttttgcatgtcatttaagcctattagctgtataacagttgttgctgctttgagaattatcctgctgacaataattgtgttcttcttaccttccttccactttttggaaaattcggacaatcgacctttgaatgccaatattatcaccgattcatattcatatcatatggtttctttgtatatactatattacagttgaatattttacatttcatataattaggattgttttttacgtatgatgatgaaacttgagctctgagacattaattaaactggaaattttctatcaaagtaggagctgatatgatcgataatgtctaggagaatgaaaagccatttcatcatgtgcatgcaagccccctacaacaaatcaacgattttcaaaagatgataccaatttaaaactttctatgtttcttaatgtctcatgaaggttacgtgttttacgtcctcttaaaaatgggaattggaacacaatttgggaaacagaactacagaaaaattctaaattctcaccttaactcaaaacaacataaaatttgcatgttgtgacctgtgacaaagagtgaataaaattcttgaattgtaatggaaaaagtgtggaacaacaaatgattgaatcatttgatgacaaaaactatgggacaggcaa

SEQ ID NO: 24651 - DNA, 1016 bp, Glycine max; identical to SEQ ID NO: 23340
  Intron number 1 from transcript Glyma09g26610.1 (locus Gly ma09g26610) derived from phytozome v7.0 (chr-ID Gm09; pos 33151893 to 33152908)

SEQ ID NO: 24652 - DNA, 414 bp, Glycine max
  Intron number 3 from transcript Glyma12g04920.1 (locus Gly ma12g04920) derived from phytozome v7.0 (chr-ID Gm12; pos 3259574 to 3259987)
agcaacaaaggtgcctattgtattgggcaggttctatttttttcttcaacctccatttccttgttaaacataataaaattgatcaacagattctttttttgttagtattaatttgattggtgttagtgatgcatgctaaattgctaatgcctttatgatgtgtagaatacatatatcgaggtcacgggttaaggcttacgaggactattccggtgtattttgattccttgtacaacttaaagaaaattttggttgtttttttcgtttgaagaattctctagttagtgggatgggagtaactttgtgctcttttataatctgtgctattataatgatttactttgatgagttcattcagttgatggattcgtccgcacgtgtgttaacacggatctctcttgttgttttcagctt

SEQ ID NO: 24653 - DNA, 612 bp, Glycine max
  Intron number 1 from transcript Glyma12g18950.1 (locus Gly ma12g18950) derived from phytozome v7.0 (chr-ID Gm12; pos 19641882 to 19642493)
agacttggtttaagaaaagagagtttcttcttcatgtacggttgagtcgtagctattcttcagttttcaattcattttatcttatcttttatttcttcccacctactttccgtacacactttttctccattaaaaaaatgcagaaatgtacataggaaaccagacaattgttgcatatatgatatactcttctatcaatttcgattgtttttgtccaattgatgaatgacagctatggaattctattttatacattatgtttagcaaagaaacaagtcagggtagacttttatgaaataacaagcattagactttacttttgaatcttgatttttcgtgttggttagaatgactaatattcaatactacttttttggggttgagtgttgttcaatattctttgataaggagtgcttgtatggaaataatatttgtataattgcttatttttttcaatagctgaagttccctgttactgctgcaaagttttgtttttcttttttggggtagttgtgagtttttgagatctatagggtgatttcaagttggttctcaattatctattttacatttacagaactagggttgatcaattggaggagcagggttact

SEQ ID NO: 24654 - DNA, 638 bp, Glycine max
  Intron number 1 from transcript Glyma11g01120.1 (locus Gly ma11g01120) derived from phytozome v7.0 (chr-ID Gm11; pos 618820 to 619457)
attttgtgtttttggttctcttttaggtgcgattctgattctcttctcttaaatcattggctttgattgtattcattggtgccatggcgtttcccagtttgattacaacaatcattaagtcgtgtttggttctttgattttctttttctttttcatgtattgttacgataagtcttcagttttttcatatccttacttgcagccagttctgtttgccttcagtttttcatatccttacttgcagccagtcctgtttgcccaaaattagagaccctgtgatgttctgcagctaattctttgaatttatatatcttccaaatatcatgctgtcatatacactttttaatagggattgacttcaaagactccaagtgctgtgtactcaaaattagaccaagacgagagtaaaaagacaactatcttgacacttaaataaactggcaatctatatctaaaagcgtgtaactggtaatttaaatcaataaattacctatatattgttgaacacatcgagatttaacttaaacgattagtctatgcaactgaaaatatacttttccgttcaacctaaaatttaaaagttcattcattgtgggttttaaggcttgtacaggttggaaatcttgggcttcagctgc

SEQ ID NO: 24655 - DNA, 922 bp, Glycine max
  Intron number 2 from transcript Glyma09g39340.1 (locus Gly ma09g39340) derived from phytozome v7.0 (chr-ID Gm09; pos 44447838 to 44448759 reverse strand)
ggaagaaacgcctgtctctctactttatcactgaggtatcatggattttatttatttttccttttattattattggatttctatgtctactgtttgcaaatggaaagaaaatgcctgtctctagtataaactgctctaatgttttctgaactagacagtttatgcaagttataggcagcagagtttgatcaattatagtttctataaagtggctgaatcttaatacctgataaaaatcatctgcttgttctgtgggtaccgtatgaattggttgtctctattctctagggcctgtgtaatctataatgtcaaaaatgttttgggaaaagggagaaaatttgagaaatataaataattggaggcctgggtaaacatgatgtatagacatttttacatagaaagcattctaactgaaatttctggatagggaaggtctctaccaattgttatgttctttcccttaaaaagaaaacatgaaaaaaattgttggccttgttttggttctagaggtacaactctacagaacatgtttattttcctacaatggactacccttgacatatttgttaaagcaagatagaacccattggattaacttgatttctagatggtcgtatacttatattaatgaagaacatttataaattatgaagtgtagtcaactattttgggttgctttcaaactacagttcatactgagtgtttttataataagagttaagggtttatctcatgaagttttagtggatgcaaacctggaatagctttgtagtgtaatagcatttctttagctaatgatttgtgattataaatgctgaatctgtattctctaatgacatctttgtttttgtctaatatatgctaaaatttgaaattgttccctgcaggctgtgttgctgttaataggagtgacacttacata

SEQ ID NO: 24656 - DNA, 298 bp, Glycine max
  Intron number 2 from transcript Glyma09g34370.1 (locus Gly ma09g34370) derived from phytozome v7.0 (chr-ID Gm09; pos 40762483 to 40762780 reverse strand)
tttaggggaccaaaaagtactattaaaccattattgtaagtattacctgttctatataaacaactacaagcacgtttggaaacctgtttgcatcattacaagacgttcacacatctcaaagcatgaattgaatgtgggtttagttggacggaactaattaccaaacacacactatgtatcattttcgtttttttgtgaaattgatttagcatttagtattcttctccaaattttggattaatgtttttttatttgtataatgcagtttctttaacgtgcttttagcattgacactgtg

SEQ ID NO: 24657 - DNA, 717 bp, Glycine max
  Intron number 2 from transcript Glyma11g37980.1 (locus Gly ma11g37980) derived from phytozome v7.0 (chr-ID Gm11; pos 38958249 to 38958965)
gccacttcaagtaataagcgccacccaaacccctggtgagtctgactctcagtctggcaacaagattaagttgtatccaaaattggtcaataattactttagaaaaagacttaaaatatgattaagatcttgataaatgattgaattttattacagattcctaataatttttttattattttgaatccatgatatattaaatttttattttaagtcttcgtctgatgatataaagactcaacaaaaattttaatattaagaacttaaaacattgaaaaaaattattagaaactcaaaacaaaattcgatcgtttagggattttaaatatgtttaggccttagaaaaatgatgaaaacacactttttaacacattcttttaaacatactatcctgaaatatattatgaatttgatcctcattacttatttaatgagtctctttcgtaaactttaacaaataataaaatgtgttttttttataaaaaattccccactaaaatccttatgattccagtattattagtgatgaaaactatatatattttttcactaaatttgttctttgatttttctgtagggacggatgattatgggtttaccacaaaagaaagtgtagaagagaatatggaaattgaagctgagctagaaaaagagctgttcggtgatgaggaggaactaaccaaggaggaggccaaaaccatgcttgaagaactgaac

SEQ ID NO: 24658 - DNA, 905 bp, Glycine max
  Intron number 1 from transcript Glyma10g00560.1 (locus Gly ma10g00560) derived from phytozome v7.0 (chr-ID Gm10; pos 321534 to 322438 reverse strand)
acttctccagctttgtcagacaactcaacacctatgtatgtatattgatctttgcatgtttatagtatgtacataatatgcttataaaaaatatggtatatacatatagtatgatccacatgacatcatcatattgttattaattgctcctctctctcatgtagtagttttaattcttaagaatggccaacaagaatgatatgtatatacacaacagttttttttagaacctgtgttgtttccatcaatgaaaatagtataatattaacttcattcatgttacaatgatgaatcagtgctgttttaattaaactctgagttgcctgcattgtaatttgtaaaattgtagaatattgcatttacaagtacctgctattaatattgttttcaacattggggttgtgaactgctattgaaaaccatgattgtatatatgaatgtgttagtaataatttgtcaatcttcatttccagattgcttatatgtgatagtttgtaattaaatttgatttgttttcggtatacttttatttcctgacctccgatcctgttcttcttctcgtttggtttgttaatttaatgtcttgaaaagggaccatagcttcgatcatttgtttaatctaactgacctcacatagttaggataagacatttgttgattctgtaatgccttgaaaagggagaggtacaaattaagattgtagagtgtgtgtaaaagttttatatgaaattgatgtgtaacttttatatttattatcttctttgaatgaaggggttcttaagatatgcctctctcaattcttttttgccatagtgatgataagatgttatggatttgaaaagaaggaataacttggtgttgtacttgtaggggtttagaaaggtagatccggataagtgggagtt

SEQ ID NO: 24659 - DNA, 836 bp, Glycine max
  Intron number 1 from transcript Glyma09g33940.1 (locus Gly ma09g33940) derived from phytozome v7.0 (chr-ID Gm09; pos 40410867 to 40411702 reverse strand)
ataggtgggcttcattcaatttactttgttgttattttcattcaaaattgaaactttgcggtcatttcacaattggcatgaatatgatatcctattagttattagggtgaaattcatctaagggtctctttctgataatttttttttaatctttaatttttattttattatttttcagtcttcctaatctcgggttacttcctttgtacttatctagcattgcagttattgagattcctgagttactctcagttatggttcacagctgattgattttagggtaaaatatgttttccccgtactttaactttactttaacttagcagtggtggtttttatccctttccttagacacttatcaccatgaagatggaagaaggatgaaaaccactgcttttgtaaagttcaaggaccaaattgatcgaagttgaagtttggggactaaaatcaagtttcaccaaaaatatagggattgaaaacatattttaccctgattttatcgttcaatatagattatttgttttttgttttttttcatgttttcctttgggtttcttgggtttggactaaaagtagccttaaattgtattctggttaggattcatatcagagagggatttctggtctggttttctatgttgaattcaccatgccttgattttgaaaacaatgaaggggaaaggcaaatctttggtttaagaagaatgcagcatctttctatgtaattttggatccaaaatataatgtattctgttctctgttcttcctgaacttacacatgaggcttggattgtgacattctgctttcctatttttcagttttaaaatcagatctc

SEQ ID NO: 24660 - DNA, 1014 bp, Glycine max
  Intron number 1 from transcript Glyma12g10500.1 (locus Gly ma12g10500) derived from phytozome v7.0 (chr-ID Gm12; pos 8424677 to 8425690)
gccatttcttcctttctcaccaaccaattacaaaggtactctctctctctctctctctctctctcggtatatgatactgatttctacctccgtaatctgatgctagtccttttatacggtctctatgtatctcgatgtgtacatgcatgaaataaattgaaaaaaaaaaggaacttgtttgacctataattcattcacacataaattcctcaacaattctttgtaaccaaataacaattctgggttgtcttttattatcttgattcataacttgatctatctgtaatctattgtttattttgggcgaatgagtgaattttggttgataagctcttcaaactttgctttgaattcgttcagagatctcattgagaggaaaaattgatatggttttgtttgaatcttctcacccattcataaccccctatttttttctttacatttgagtaatcgtattgattatctgtcacaatcgacgttaacgcgtgtacttgccattaatttgaccgcgtgggacttatattagattaaatgcaatttttttgttgcccccgatttttgtcctttaatatttgtctcttaatttctttttcaattcgccactatatcatgttgtgcctctagtctctgaactctgattgcttattagaaccagtatatgtttgggtgagtgcttgtgaaattgattcttaattttgtaaaattgattctggtttgaattgatttcgaagggaagtgatttatatttaggggtttttattcttgaagtaagttatcagaaaaattcagtataatgttttttttattcaacgcaaaaactatctagagtcaagttaactcaaaatcaattctagactcaaaataaattcttcaatctgacaccaaacatgtaaacatttacctaaaatgagggtagctggtatttcactgtaatcttgaatggttcaacgtgaaaccaaacatgcactcgatttacactcaataatgaattgaaattttttgaaggctagagat

SEQ ID NO: 24661 - DNA, 695 bp, Glycine max
  Intron number 2 from transcript Glyma11g01220.2 (locus Gly ma11g01220) derived from phytozome v7.0 (chr-ID Gm11; pos 708455 to 709149)
ctttgcaggtatatggtatgagtttaaccacatcatcttcttcttccctagtctctccagtaatgagagttttctttccccccattggccattataatgcaatgataggtattgcttatctgaaattctgaatcactgagaggatgagaatcaagatgtgctatttactatttagggtgcatttagaagagttaatttatagcttatttgaatacgctccctaggatagcttgttatgatcataagctatctttagctcatttcatatatcaaaaacacaatttaaaccttagccaatcgagctaaacaagtttttggcatgtggaatttctttttatttgttttctcttcaattgtaggaacaacttattataaaccatttactctatttacctaaactggctctcacccaccctattatgacataagcacttcatctccatttacctaactagtcaacacccaaccaagaacttatcctaatatgtttaattgtgaagagatttttcatacaaaccaacattgaaacactagtcaatatggtcttgtgtcatttgtgtacaatctcctgcccatgggaaaaggaaactaataagaaagccatgtgatgttccttgcgagaggagaagcatagtgtactaggcattggtgaactaccaaaatacaaatgtaatcatttctttgatctatgcagg

SEQ ID NO: 24662 - DNA, 866 bp, Glycine max
  Intron number 1 from transcript Glyma12g07730.1 (locus Gly ma12g07730) derived from phytozome v7.0 (chr-ID Gm12; pos 5349005 to 5349870 reverse strand)
tgcagcgcttgttcgacttcactcactcaatctctgtaagtcattctctccgataaccatagttgattcttttcgttttctttatttttttattcttttcatatttattccaatgcattcaagcttaaattccaacatcactgcaaaattaggtttgatatataataagattttctctcattctccgaagttgcaggttaatcatttacccccaaatttacttttccgtcccgcaatttcagatgaaaataaattaagacaagttttaataagtagggaacgagattactcatcgtttggactcgatcaatcaaatttaatggtaaaaattattagaaacattcctcactgatcctgttctacttgattaaactatacaacgaaagtttaaggctaaaacagatctatctgatgtgaattccttcttatgcagtacttgatgatttatctcatcttatgattttgttcttggatttgttttattttattttctcttttgctgcggttgcagattcaaggtaattggttataacatcagaaattttgatctcttaagaaagcatttttcaactttgaactgaaaatttgacaactaggcttttatgctaaataatgtaatcattttatgcatagtagagtaaatcccaagtgacacacagatcttttgagcagtttgcttattccttttactcataaacatttgagaaggcattgtatgttgtgttatctaaactagaccattaaatagcataagtactggctctgtgtgcgtgcatgcccttttattctcctttggaagttgcataggtgatgatctagctaagcttgtcctaatttgttttcatcaggctagcctatatactggg

SEQ ID NO: 24663 - DNA, 433 bp, Glycine max
  Intron number 2 from transcript Glyma09g36190.1 (locus Gly ma09g36190) derived from phytozome v7.0 (chr-ID Gm09; pos 42014925 to 42015357 reverse strand)
gcagttcgacaccgttggatacgtcaccgtcgctggtattcgctcttcatccttccacttcttttccgtaaattatatacattcagttagttagatgttactgttagtgtttattgcactctgatcaattgattcccaaatgtataaaaacaacatgcaaagctcatttggtaatcacatagtttagttacaggtgtgtgcatttcaaattatagagttgtttgattatcggttcaaatttccaattcaataattagtgaatccgtgcttcaaacgtcctaaaccaactaatcggtaattgatcaattacttttgattagtgtttctcacttttcttctctgtttactactggcttgggatttctggtactaattactaattatatgctttttattttataatagactacaacaacaacaacaacactgaaat

SEQ ID NO: 24664 - DNA, 717 bp, Glycine max
  Intron number 2 from transcript Glyma09g02280.1 (locus Gly ma09g02280) derived from phytozome v7.0 (chr-ID Gm09; pos 1511249 to 1511965 reverse strand)
ctctaggattagggttttctaggatcacttaagtgtggaaggaaaacaggtaaattttgatttctagttgatgggttttagtacaaactagaacaaagtccgtgtggcagcacagcagagacctacaaatcccaagtcgttgtcttgttgtcgttaggttttcaggaaaattataagcttttagggacctgtagatagcagttgtcaagcttgacacctagcactaagttggaatgacttctttgctgtgctgccacatggacttagattgacatcttcatgaatgggaaacacagcatcaagagcttgccacctagcactaggttggataattttaataaggcaagaaacttttagggacatgatatggggattttttgaggagtttgccaggaaaatagcaacaggtaaggcttgtaaataaaaaaaaacaaaaaaagtaaatgagaagagtacaaaaataaacctaggattccttaggcattatgccttgggcttgtttgtgttagtgtcacacagccagtagatagcagtttgtctgaaagaaagcaatatagctaatttaagtagacatccaatgtatctcatgcttgcattgatcttagtgcactcttttttccaactgcattttatgtaaacttcaagtcatgttactttggcttgacatttttatttaatttgtcaggttattccgtaaatctatatttggggcagcag

SEQ ID NO: 24665 - DNA, 1040 bp, Glycine max
  Intron number 1 from transcript Glyma11g14590.1 (locus Gly ma11g14590) derived from phytozome v7.0 (chr-ID Gm11; pos 10416982 to 10418021)
ccatttgtggacaatttgatttgggtaagtatgttcatactctgatttttgtttttgtagaatacgatgtatttggatgcagggaaaactagaactgccgagaccttatgttctatgcaaatgtagagtctttaattagtttctataatttgatgatctctcatctcaataattgaaatgtgagtttcgtagctgttattttttcccctatttctataaacatttcaggcattcttgatatcaagggttgatttttttcttcttcttattttttccctgcacttttgatgattttgttttgtcacatctcctgtttttacgcgccgatcgaatttgtgtgccttgttcctcaaattagcaagagcatctgaattctgcaccaaaatgttattcactaaaatgtgaaaacacaccctacttcctcagaaatttccaatagtaaattgcaaaatacatgggatgagagagtttctaactctttttatatacctacactttttaatgttggactgggaatgatgtacaatccatgataccatatactgatcctcaaatcagtgctctgaatctctaccactctccccagcgttcactttttgtttacacaagagaaaagaaattgtctaccccgccatcttcaaaagtggatctggttagcttcaaattgtagttttgcaagcaatgcaccttgatggaactaatcatttatttttattttgtagaaattttagtcaatatgaggtaagggaatgtgagatgtgaattatgatccaatcttcaaaaaataaaattgatacctgttgcatttaatcaccaatctataaaaaatgatttttgctgcgaataatcattcagtcttcactcttcagaaattcgtgtgtggaattttgtttatgtgctttatttgattcttgaatggattagtacttgtttattctttcataattagtatccaaattaatgtaaattggtgtaataaatcaaaggcacaaacaatacttccaggtggtgcctttgcgaatagttggttgaacgagctc

SEQ ID NO: 24666 - DNA, 975 bp, Glycine max
  Intron number 1 from transcript Glyma08g45380.1 (locus Gly ma08g45380) derived from phytozome v7.0 (chr-ID Gm08; pos 44790649 to 44791623 reverse strand)
aagctcttccttctgttgctgttgttggtggccaggttcgtctcaagtttcaacctatcgttttttttttcttttacattacatcatttttaatttcaaagctctcggtttttgtgacggggaatggaaatccgaaattcagaaaaaaatggtgcttttttgctttctgcgtttgcaattttcaagtaaacttaaaatttggcgtggttctgatttttctttttcttttgttgaaatttgatttgagcttagagagtgttcagttttgacttttgaagagtggttttggcggtagccggtaggtatttttttttgtgtgttctgtttagtggctgtggtagatatgaatccttgaaatttgcggcagagaaagtagaatcgattggataattggaacttgtaattgagtgcttttcgtttttctgttaatagtgtaattttctcggtgtagttctaaattttcgtcatcattgtttttttttaatagtgagtagaacacgagacagttgttttcgggtgcctttttattttcatgttttagttttcttttttcttaacggatgagtctgaagcgtgaattttcctttttcttttgaaaaaaaattgtagagttcgaggaactgttcagtttatattttcaagttgattagtcttttaacaactgtattttgagtgtgggtctgaattttagtttttcaagttagcagcgaggaataaaaaaatatcgactttttaggatttttgtttttgttaacggcatgtgggtttgaacttactttcttcacctaatgagtgtaattcagttggcaacacaccctgagttttttgaggaggacctaagaatgaagaactttaaatgtgattaaactccgaaatgagtgattacagttattaataaaaaaaacttactttttttttatttcttttaaaatttgagcagagttcagggaagtcttcagttttggagagcattgt

SEQ ID NO: 24667 - DNA, 849 bp, Glycine max
  Intron number 1 from transcript Glyma10g07050.1 (locus Gly ma10g07050) derived from phytozome v7.0 (chr-ID Gm10; pos 5758053 to 5758901 reverse strand)
tgctatctgtctttgctttgcattcctttactacggtatatatttcaactacattacacttctcattttatttccttctttgcttatttgctttacttaatagacgcgacttagacttattacattcatttatttaagaatataatgtagacatatttctcatgttaattggtattatgcgctatccgtcagcctgaatcaaataattaagttgttaagcctgctggcaatagatgaaatctcttccgcagcaagtaaaaagaattatgatattttcgtcacgttattttaggtggtataaaccctataaactttgtcttactgaaatctatatacaaacttaattctttaaatcctaaaaaattctctttttaccttctttatcttgtatgatattacttattatatttatcactttcttttttcccttaattatttcactcttccctcctaagagggtttgtctgagagtaaaattttgatgaaataattaatttttttaaagttaagagaattatataatattaatttataaaagcgataacaaattgaaatatatatgtaaaaatgttattttttaattaatcattttaattttttattttaaaatgttatcaaattaaaggatatttattaaaaaaaaaatgctcttttcattcttttcccctatataaaaactcatttttaagcatagtctaaccgccgtctcaaaggatataaaaaaatctgcaaaataaatttatatggaatttataacattatggataaatataaatatgtttgtagcagctgatgattttggttttgtatgcagcggctgaaggagccaaggttagtttcaataacaag

SEQ ID NO: 24668 - DNA, 1020 bp, Glycine max
  Intron number 1 from transcript Glyma09g02240.1 (locus Gly ma09g02240) derived from phytozome v7.0 (chr-ID Gm09; pos 1495036 to 1496055)
ctctccaacgatcacaacaacatcgtcatcccgtcggtttttttctctaatttctctcttccttttttcgttatccgatttgttctcacgcatcaataactaaatccgcgaatttctagcgtttttttttttgttgaatttagtggcgtcgaaatttctgagctggattcgtatttgatctgatcgtttaacttgaacggtgctttttttattttttgtttaaaataaaggaataaatcgtggcgatttcagatctgatttcggtgcttcggttgagtttttcccaaattcatagcttattatgatatttttattgcggatttcagtttacaacagcttgtgatgtgtgatgtgtttgatctgcgcagaaatcggttgtgatctgacatgtggattgattccattttatttattttattctaattttaattttatgagcatgttgatttaacttcttttatgtgataattatgcgtggaaatttcaattaaagcatatattcttgtctttttttttgtttttggttgcatatattcttattctttcattagatttattttaatgatgtttctatattagatttattaatgaataaatatgattttattttgggactgaagacacgacaaacgtaacacggttttcttaatttttattgatgtttacttgttttggcactaatcactgtctgcttctatccccttgatttggaagataccgtgtttgtggaagtattatttacttatttagttggtcgcatattcctataatatttcattgttatcaatctacgaatttagtcttttttttttggtaagcaatttgatttactttatggcatatttcaacccaattatgttaacaagttaacaaccctttgttttttttctttcccggagtaacaatttaaatgggaaaaaaaaaagattaacaacatatttgtgcacaattacttggtattgatgaccatggtggtgtgtgtctgcaactgcaattctataggcaaacgccgcatctggt

SEQ ID NO: 24669 - DNA, 517 bp, Glycine max
  Intron number 2 from transcript Glyma12g19010.1 (locus Gly ma12g19010) derived from phytozome v7.0 (chr-ID Gm12; pos 19732870 to 19733386 reverse strand)
ttcagaggcagataagaaagggaaaaaagttattggtgagatttatgctttttctgatgggtggttaaagttcatatgctgctttatgtaactttttggtacaatcaggatttcagtttatgtggtactaaaatgtatattctaagaaaaatgcatatgatttaatttcttacatacaggcctttctttttatgtctatcttagtgtcttcttcattcttatttaataaaataatgatttactatggtgtcactgatcaagtctctcgaataaaccccaatcttaatttgttcaccagaattatcaggatttgttgattctggtgctttgcattagttgaaaatcaaagtactaaatatatttttcatatggttagagtccattaaagaaattctgaaattccatttggtaaacatgtgttttgaaatggattctcaatttcccccctgctaaagtatttaaaaaggccttaagtttttgcctcacaaaacccaagaggacgactctgaatctgaag

SEQ ID NO: 24670 - DNA, 793 bp, Glycine max
  Intron number 1 from transcript Glyma11g07110.1 (locus Gly ma11g07110) derived from phytozome v7.0 (chr-ID Gm11; pos 4998210 to 4999002)
attccgtccatcgtcccgtcagagattgttccattgtaagaacatatacctttttttctatcctaggagaaatagaaatagttactgagttaagagcaacccgatcaaacttcaatgaacacataactcaattttattaacttttctctaataagttaaaaaaaccgattacattatagggaaaattagccaaagctatgcacagataatgatttgaatcatgtgataatttcttcctaggaaaaattgttgcattcctttaagtaattttaacagttaaacatgcatgtcatgttaatgtaaacatttttacaatataaaaaagtgtatgattgtgatgtttaacataattattaactttattatttaaatgtgattagaacttagaattttcattctcaagtactgatgcatgtatacaaaagaaacatacattaacaacgtcaattccttatatgaatcttattgtcttgacggaattattattacctcactaaattgattgatttttattagaagaataataaaattatttcatttcattcaaaagaggaacatagatacaatcatgaatttgatcaaaagcatgattgctagtaaataaccttgatgttctagctaacttatgaacaagtttagctcgtctcctacctgttttacttgcttaaaaaaataaatattggataaatacatatatacttaatgcacatttgttcttaatttgatttgtaagtattgattgattgattgggttgcaggaagcatcaacggcaaagtatatagtgcaacaata

SEQ ID NO: 24671 - DNA, 374 bp, Glycine max
  Intron number 1 from transcript Glyma11g16070.2 (locus Gly ma11g16070) derived from phytozome v7.0 (chr-ID Gm11; pos 11767112 to 11767485)
ctcctcctttcattaaattaaaggtagagattccataaacaagtcaatttttttggagcaggaagagatttttttttcttttcaatttgaattatttattatctatgaaaagcccttgactgatgcgtcccaaatccaaaattgctatattttctgttcagttctggctagtggctacaaaatctttgtacaaatttctggtaatgcattcattgctttgtttgctagaaggaaaaaagaaatcaatttgtacttcagaactacgaatttttcattgttaaatttgactctccttgtccatcacagagaaaatcgagttgaattttcactgaatcatttgtttttttttggttagtgcagaacagtttctaggt

SEQ ID NO: 24672 - DNA, 1012 bp, Glycine max
  Intron number 2 from transcript Glyma10g40670.3 (locus Gly ma10g40670) derived from phytozome v7.0 (chr-ID Gm10; pos 48013140 to 48014151 reverse strand)
tgtcagtgcgcgtgcttgctgcgaactgtcccgtaccttccgtcgttcttgtcaagatcgctaatagtctctttgtgagtcttgctggtttggttctaggacgcatgtaaaaatgttcttcaaatggtttatccttgtttttaaccattttcatttcaatgccccacccccccaaaaaaaacgagttttaataaaattaccacacaaatacttctggattatagaaaatcttaaattctaggcatgatagaacttaaaattaggtaatgtgaagagatgatgagatgggtaggatttgtgagtttgtctagcttggttcataagaaggtattaagattcaaatttatagggatgaatggaaaagatgggtgatgcgcaaggacatcgatcatccaatggcgagagaagaatgctgcatagtaggttccctttttttttcctttgttcaaaattataaattcaataatgttcagttaaaccatacataagtatgtaattggttattcttggagatgaactgaaacagtagtcagatttcctggacattgagtgttctttttctccccttgggcatacattttgtcagtccatttaatgtgatactttattattaactttagcattggaaaatctatgctttgggcagttattgtatccttgcttattttgcttttgctgtcttttctttattttttttttgtaactgtatttaacttttaggtttttaagtttctacatcactctgaaaatgctgtcacctaaatataaaatattttatggttcccaacaagtttttcagaggcttcctacaaaaactaacttgaatggaacaatttgagccttttcttccatgcatccatttgcttagtttacctgaaataaaatccatgccagagtcatccttgaaagggctgtatgtacagtcctttcatcagttttctagtactactaatgagtaaactacattcctttcacaggtgatcctgattcctgaggtgaggttctaaattcc

SEQ ID NO: 24673 - DNA, 622 bp, Glycine max
  Intron number 3 from transcript Glyma10g32550.1 (locus Gly ma10g32550) derived from phytozome v7.0 (chr-ID Gm10; pos 41010476 to 41011097)
aaaaagggtaaactttaaatcaaaagccattagtttgtggtaaatcacattcaatatggtaaaataatttgtttatttttgtttaaaaaagtttattttacaacagaggttaaaagttgagagataatgaaaatgcatattagggtggaaactgaaagacaagaagagttacaaaaatgtcaaggtgttaggtagaaaaatggccatgtaaggttttaaatgtctgtagggaaaatattttaatattcttcaatattgatattgatttaatgatgcttatatttcaaactaatctaaccacatagaagagaagagaggtaacagttctgatgcttatattcttcttatgtgtgtagttggatttttttttccaaagccaaagtcaaaattcattaatcaagaaaagtccagcacaagttgtgtccgagcatcaatataaagcagaaaatgatgctgcatagttatcgtttatgagtagttggattaccttgccatgaaataataaattgaaaacattggagctagttgattttcatatatttctttacagtataatttaaatttcttataagtcatgatttcgattttcattatttatttcaggtttaactgggggtcaaga

SEQ ID NO: 24674 - DNA, 747 bp, Glycine max
  Intron number 2 from transcript Glyma09g34760.3 (locus Gly ma09g34760) derived from phytozome v7.0 (chr-ID Gm09; pos 41059062 to 41059808)
tttctggattcgtagtgcttgggatttaattagaggtagagctatcgtattttccgatgttctctttcccttgcttatggttttcgtccatttggatggtttgagctgttattgttttggaagatgtaggactctgaaaactgctttgattttccgtacagtgtgataataattatactaagatatattaccgttggtgtgagattagcctctcgagttgtgtggctaatcttgctctctggaaagatgttagctgagaactgtatatgtatttagtttgttttatcggaaaatcttagtttactttagcaggggactcaaaccaacgacctatccctccctgctcctaatttaaccaccaagccaaccttatatctcccgtacatgtatttagttaactagaccatacgctgttttatggaaatgttgcaaaataacagttttgattgtatatgtccaatgatcctgtataaagacatgcattttttgttttaatgtttgataaatgttgtaaattctttttggtttacacttccaactagttttttaaggacattattgcattgtatttcttcgttagtattgaatgtggttatgtttagccaattcagtgactaatgtggttattgtatttgttgattgttagttatctgctattttacactatcttgtgcttatcctattaccttattacataatctaacctgttgtcgtggttgactttaatgtgtaaggtaagccaaaacc

SEQ ID NO: 24675 - DNA, 469 bp, Glycine max
  Intron number 1 from transcript Glyma09g07730.1 (locus Gly ma09g07730) derived from phytozome v7.0 (chr-ID Gm09; pos 6669862 to 6670330 reverse strand)
cctctgcaaagcgtaggttcagggataggtccaaggtacgttaccttcaatccattttcttcatataaaacttagatgcatgtttttggtgctgttcttgaattagattttgaaattttacttcgcctaataaaataaaatttatattcgaacagaagaatagtataaaaagcacgaacaaaaactgtatttatttatagtatctttggaaactagaaggaaggaattacgtttgattgagatacagaaattataattatttgcttttgaaaatcacatccagaacgtggaaccaaacacgttattaattggtgtaataagttttgtttctttttgtttttcaatttaatttccatgcatggctgcatctgttttttaattttatgatatgggtttaatttgttttttgttttttgttttggctgaaaatgaaggaggtattgtccaaacaagccgttaagttagccaa

SEQ ID NO: 24676 - DNA, 886 bp, Glycine max
  Intron number 2 from transcript Glyma10g32350.1 (locus Gly ma10g32350) derived from phytozome v7.0 (chr-ID Gm10; pos 40840726 to 40841611)
ttcagcatatcaaggcaattatcaccgctgaagaggttagttgatcacctttttttatccttcaatatgttatgtgtgactgcctccatctccgaaggagcgggatttgaaacattattatggcttcctgtttctgggaaagaacatgaataagaacattatgaaattagtatggggacacaagctttggatttttgttttgggctactcataatgaaaagcttagactgattgagaaattaggaaaggaggaatggcagatgggggtggggggtttctcttagcatgtttttttgggcactgaaaagtttaggtgagttgggtctcggggctcactaggcaaacctcaagctcaaagagtgcttacaaactacccagcaacaaagtcctcacatcggcagtgggaatggaacccatgtccttttgggatgagtccgttctcttagcattttatcttgctattgcattaaatggcacaactagtctgaggatggattgaattccggctatggaattttgttttcattatcaagtttattgaataaaacgggtaggaagacaatgaactacatgttggatcaggaccataaccgtcttgtacaagaatatacctacatgtcattaatttgtttctgactttagttatgatggctggcaaaggacatattttcatataactagaatattgtagagccagcttcaataggctaattaattaaccacgctctcttacctagtttgtatatttgtgaattcctgtatccaacctttggtcctttttagaatgcatgattgtttctagagattgagatggcatttgcttccacatcctgaactcctgaatgtatctaaattgtgggataggtattgctgagagatccaacag

SEQ ID NO: 24677 - DNA, 444 bp, Glycine max
  Intron number 1 from transcript Glyma11g36730.1 (locus Gly ma11g36730) derived from phytozome v7.0 (chr-ID Gm11; pos 38085626 to 38086069 reverse strand)
ctggcaactctgccggcactgtcactgcttactacgtatgttttattattagtattatagcagaattaattaaactcctctaattaatttgattcctttcttctcttccaactcacactattcttctcttctttctttttcaaaagctactttagtagtatgacttattcatgaaacaacttactttacccactcatagaatacaaccattattaccacgcttgcacatttttggcatcaacctttcaaacgcaacagtacagcattcattgtaacccctacgacaagttattttactttcactagccccaactatttatttatttttcactccatgatgatgctttcaattaaacatagactagaaaccaaaaaagaacaaaacctcattagccatttatttattttccatatatatgcagttgtcgtctcaagggccaactc

SEQ ID NO: 24678 - DNA, 419 bp, Glycine max
  Intron number 2 from transcript Glyma12g34650.1 (locus Gly ma12g34650) derived from phytozome v7.0 (chr-ID Gm12; pos 37828767 to 37829185 reverse strand)
gccatcattcagttacacagtgttttgggaaacaagtaagtgatgaattcaagtactgcattattttgcttaattagtattctaacttctttttttctctagttggtaaatgggtatttctcacactactttaaaaatgcattaaaaagagtacctttttgaatttgaatatatgatatacagaatcgccaactaatgcatggactttaaatgcattaaaattcatactatagttagagaatggtagctaggcaactatgcaaaaagtcaatgatatattattatatacacaataacaaacaataatattattttcttgtcacattgtagcacagcaatttaattattgctatctaattggaaaattttgtcctgcatccacaggtggtctacaattgctgctaacttgccaggaagaa

SEQ ID NO: 24679 - DNA, 631 bp, Glycine max
  Intron number 1 from transcript Glyma12g34650.1 (locus Gly ma12g34650) derived from phytozome v7.0 (chr-ID Gm12; pos 37829271 to 37829901 reverse strand)
caggtaagtgcatactttgtgctagctagctatttctggctctaacactagccactttatttatcataaaaaggttttgttttgtttttgtttgttcacaagtttttttttttttttttttttttatcttttcatgccactcaaacgcataaaaacaaataatcatgtactttaccatatcgaaatccgatcttactttaaaatgtactttatcactctagatagttaatgagattcagtacaataatagtagcaactttagtgcatcacttaattaaaactaaaggttcattgacataagtggttctgttcttgaacccttaacaaattggagtttcactttgctttaaaacgagttgatccggaggaagaaagattaattagatgtcaaatacatattttatgattacactataccacaaaaaataaaaattcttaactcattttcaacgtgtcttatcatgccatatttgaaagtcagaagctaggaatcttaagtaagatgtacgattgtttacttgcacgaatcaatgaatagttcttatatttgatgcacttaatatttttttttccaaagatgcacttgacataaacctttgtttttcataaaacatataacaggactaaaaag

SEQ ID NO: 24680 - DNA, 691 bp, Glycine max
  Intron number 1 from transcript Glyma12g12960.1 (locus Gly ma12g12960) derived from phytozome v7.0 (chr-ID Gm12; pos 11327008 to 11327698)
atgtaatgtctcattcattgccatgttgattacttgttctttatccattgtttggtaccaacaacaatgttatgatattatctcattttgtttaatctttgataattagataattatccattacttgttctttatcgtttagatttgtttgacttatagattctgttagtgaatctcgttggaagagtataatataatgagcaaaacgaattgagcttcttccataactcttatagaagctctcccatctgacttctcttaaagttgtggtgataagttgattttaactcatggagaaactcagtttattttactttcttatttcttcttcagtgcttatgggtgaagaaatttatcctaatagatggtattagtttggttgcattaagagaaggataagaataggctcaacatgttttctattattcgtctttgccacttgcttttgttcgacttgtttcggttttttgaggatgaaaaaaattgaagataagttggatataagctgtagtaaaaatgaaaaatgaaacaccaaatgaaaatttgggctgttagttgatcaatgggaaattctgtgtggttagtataatacaagcaaaatgatatagcagaatgatgatgatgaatctttgacactttgactggatttatttcagtatcacataggaagaggtcatattggagcaactat

SEQ ID NO: 24681 - DNA, 978 bp, Glycine max
  Intron number 1 from transcript Glyma11g10810.1 (locus Gly ma11g10810) derived from phytozome v7.0 (chr-ID Gm11; pos 7707401 to 7708378 reverse strand)
ctttcactaaatcgaagaccctcgacaataaatatgtacgccattttcctcttcactctcctccttcgatctcaatgttttctcgtaatgctgctgtgaatgtattggatattcaaaaaaataaaattaagagtcataattcgaattctgtatgatatttacgtttacggcggatactatatagaactaaaggagactcccgtttcagttacattcaattcaacgattgaccaaaagagaattcaaaaaataacatttagatcacccaaattccaatatttctatgaaataatagttaaatctaacgaatttatctgttttttcaactccgtgttattgctctgagactcttgaatatagcactgaagatcaattagtggaagctttttagctttaggttcgtgttgttgtgaatcaatgaagttaaaggagcttgggtgattgttttgctttatgcttagtgtgaaaagatgtgtaagtatactatgaaatgaccttagtgtagggaaggctactactatagttgttgaaatcggagattgagattactgtggatattattaacattagtaattttgcaaggtgatggtttggtagttggtagttgcactgggttgggctggagggagtgttagggtgcaggggtaatgttgaactgtgtgtgatgcattgaaatgaaaatagtggcggggttgcgaaaatgaggtcgaaggaatgcttagatgttggttttgaaggtaattttgacatgacccagaggtagggatgctgaattggatggttttagttgcttaatgttttctgatctagagattggaccgaatgattttaattttttatttatagttgaatttcatttgcaaatatttggcgtttctgtgttgtttttattctttaaattgtatatggaattggatcactgaatagcttgattttttaatggctgattgctttgtttgtatgtgagatttggagcag

SEQ ID NO: 24682 - DNA, 596 bp, Glycine max
  Intron number 1 from transcript Glyma09g32480.1 (locus Gly ma09g32480) derived from phytozome v7.0 (chr-ID Gm09; pos 39006316 to 39006911)
cgtcggcgtcgcccccgcatcattccggacgcgaggtgatctcttccccccaattagggttttgaattcaccaccgcaattcgttttttattcctcttttttttatctccaattcgctcaatctggactctattgaatgtgctggggttggagatttacttgaaagtttctcccttgacttggattgaggtttttctggggatgaaccagttaggaattggggaagtgatagtttctctttgataagcagtgtgtatcatgattcatcaaattgtattcaaaatgaaaagggatagcgaaattggctataaagtgaagctatttatctagtgctaattattgtaagctgtataatggagcaataaaaaaaattatatataagtagaattttttttagctgtatatatttgaagtgaatgttcttttttgttttcgtggttttgaattaggaagaagagttatctcattcttttagttgcatatattgagaatttttactctgccttcatgactatttgtctcacaggttgctcattttttcttgtttctgtctatttgtagactttttacaaagttattagaagctgggcatcaaa

SEQ ID NO: 24683 - DNA, 608 bp, Glycine max
  Intron number 1 from transcript Glyma11g07570.1 (locus Gly ma11g07570) derived from phytozome v7.0 (chr-ID Gm11; pos 5301866 to 5302473)
tcgcttagccttcactttcttcttccttctgccaggtattttttttatttctctcgtcttcacacgttttttttcttctatgttgatgttttcttaacattggtatagttgtttggattttgaattccgtttctgacaccagtttaggtatcaggtgatttcgtttgggtttctcgcgacacggcttctgttttattattgtgttacatactttgttttaaatatgttcaaggaaggaggggagatggcatgatactttgttattaggagtttctctttaacaagagaaagaaaatttgtatttttcctgcgtatatcaactttgcgtcaaatttgattaactgggagattttgcgttttggaattattttcgtctcacctgaatgtaattttttggcatatggtggtggtttgggttgggggagacaataatcctccccttgcctctcttattttctcattctctccagaagaataaagcaaaattcaatttcgttaatttagattgtattcaattattcaatcgtgagttagtgatagttattgcattagggatttggatagattgctaaaattctccatatatttggctttatgtttgtacagca

SEQ ID NO: 24684 - DNA, 794 bp, Glycine max
  Intron number 3 from transcript Glyma11g07500.1 (locus Gly ma11g07500) derived from phytozome v7.0 (chr-ID Gm11; pos 5255706 to 5256499)
cagtggaaccagtgagtagcttcttcgagaaaaaagtgaaaatccgaagggcaattgaagctgaaggaattccatacacttacatcagttcaaattcctttgctggacacttcctacctaacttgttacaacaaaatgtcacagctcctcccagggatgaggttgtcattctaggagatggaaacatcaaaggtaacatacaacaaattaaaatagacttaaaatacatttttcgtctacatcatttaacattttttttttgttcttgtaaaaaaaattattttagttttaataaaatatgttgttttattttcgtagcgtttcaaataatgttttttatttaaaatatttttagatatgcagttttttcttacaagtagaagataatagacttatagacatgcagttcaattcaattgcttcaattgtgcgcttgaaacgaaattcttgtttcaggagtttatgttatcgaggaagatgttgcgacttataccataaaagcagtggatgacccaagaaccttgaacaaaactctgtacctgagaccccatgccaatgttttgaccttcaacgagctcgtgtccttgtgggagaacaagattaagagcacccttgacaaaatctacgttccagaagatcaacttctgaagagcatccagggtcagtgtatattcattcatttatgactttcctgatgtcacaaatgcaacttacaataagaatcttaggtctccgttgtgattttttatttttatttttgtatctttgcagagtcttctttccctgccaatttc

SEQ ID NO: 24685 - DNA, 1041 bp, Glycine max
  Intron number 4 from transcript Glyma11g09660.1 (locus Gly ma11g09660) derived from phytozome v7.0 (chr-ID Gm11; pos 6885465 to 6886505 reverse strand)
gctggtgtgcccgcaaatttaatcaaggtataaactttttttgttgatgtcagatcacaatacatttatctgttatggttttcttattgaattcacttataatgtcattgtcaatgctcaactaagaaaaatccttgaccacaatttgtctatgtccacaatggacactattgcatttgcaattttgcatacaccacactaaccttcttgggcaaaagttggtcaataaattgagggataactaattaactttgttttgactcccttgtggtttatagcattctgattatgatctgcattaattttttttgtacccttagcttccttctgttttgtgagaacaggtaaagtttggttttttgccgactcttttaccaattattgagtccttcaaaatcatctggaactttaaatctggaaaatcagtttgaaactgagggaatgccaatatatgacagctataatttgcttagatatttctttgagacacatttacagtatgaatttgaggtaatactgattttcacacaatcctaaggtttatgctctatgaacaaatataggtatttttctactacttttcacttaactatgggttatttagcggcaaatttagatgaaaacataaagcatccaccaaatgtggattcatcttgtgctgattgccaaggttaaggatgttttggtttgttcccgtgatagcattttgttgactgtttgactttcacactttttaataaaacactttgtaggccataagaagatagaaggataatatggcatataggctaaagagggttggcttaattggtatgatcacacagcatttgtgaaaaggttgggtgcaaattttctgccaagctcgtagcatgccctaaatggaattgggataattacccatctccctaaaatcctaaattatttatttttattttgaaaagacaattattctgtataataaataaatatattaatctagcactttttattttgtattgttatttttttgattcagtgtcaacctttggagctgtgctggac

SEQ ID NO: 24686 - DNA, 1034 bp, Glycine max
  Intron number 2 from transcript Glyma09g37750.1 (locus Gly ma09g37750) derived from phytozome v7.0 (chr-ID Gm09; pos 43251688 to 43252721 reverse strand)
aggttcccctggatcaaaaaggtttcgaaacgacggtacatatatgatctttatggtgcctaatactgcaagtagcttcttttcctttccccgtgtcttgttttattatctgggcttgcaacaatgttttttttttttttttgctgcatgaagaggaattagcactatgcttttgtattctggactgtgtgaattcaaatttatgaggtgaaatttgtttttggttaggcacaaaatgtggtgtaatcaaaggagagaatttgtgctttcatactcagtggtagtgtataagttgattttaacttagataaaagtttaattcattttatctttttattttaagtacttagtactcactgagaggttatattcttcttctatgaaacttgctgaaaagtttatacaaataggaccacagagtagtgtctcagaaaaaggtgtgctgcttatgatgtcattcatttagaagttgaacctggttttgtagtcaaggggaaaacctgagagggcctgttttattgattgggagaagctgttttatatttgaaagtgaattttgtttgccaagagaagttttcttgatgagagaggtcgagaaaaggggaaagaaaacattctcttccaaaataaatgtaaaggggaaaatatttgcacttaaagggcttgtaatttgataggaaatttgatttgacagtgattaaagagtgcgatgacaattacaattgtaaactactttgcttgattttcttttggttttaaccatgaaatccatgttcattttcattgctccatgtactaattaaattgttgctgccatggagcggagagtaagagagaccttctttttagcttatctgaaaagcattaatactgtcccttttgatgacccttattttctgtaggagatgacctcatgcatggacctagtgaaagtttacctatttacgttaattcaatgctcctggcatatgaatgttcaaatgtttataacacttagattgttctttttttattggaatcagcttcgcgtaaag

SEQ ID NO: 24687 - DNA, 936 bp, Glycine max
  Intron number 3 from transcript Glyma10g35140.1 (locus Gly ma10g35140) derived from phytozome v7.0 (chr-ID Gm10; pos 43338742 to 43339677 reverse strand)
cgtttctggtactattctttttgcttatttggtttctttgctatttaatggctttctacttttctttgtgagggaggggggcgcctagctgaatagtgattgctcatgctttttgtttcagtagtgaggtttgtactgtttatctcgttaatttaaatatattcgctatcctagtcttgaagacaatagagggatggcttaatcattcatggggtacttgtccagttatccctgtcctaagaatgagtgttagacggtgttttgattttagattttcttttaaattttctgaagggtttgctatatgcaagaagtgtcaactaatactaggaaaaatcattttgataaatatatatttagggatccatttctgttgtatactttcatggtttaatccttcatgctattttctatttcaattgtccttgttttccattttctgtattaccgattcagaatatgtattacatggtgaattacaagtcaataacagtgcatctactagtaattttttttgtgtcgtttctgtttcttcctcaaggctagtcgaaatgttagtatgcaaatgtttgatcctccaagaggttacttatgcccctcctagtaatgaggatctggcaatatttttaattttgaatctttattaatttctatagaaagtattttattaacggtagggtacatgtaaatagtgtcaattaataataagcttgttttaatattttatgggtccatatatatgcttttaatattttatatctgcaatgtttaatccccaaaactgttgatttcaaataggcttgttttccattttctttgtttttggttcaaaatgtggtgaattctttgggttttatgcatcaataactaaatgtgtactagtcatttccttttcttttagtttctcaaggtttttgactttttggtaattttagg

SEQ ID NO: 24688 - DNA, 1051 bp, Glycine max
  Intron number 1 from transcript Glyma08g43410.1 (locus Gly ma08g43410) derived from phytozome v7.0 (chr-ID Gm08; pos 43233745 to 43234795 reverse strand)
gcatttggtcctacatcaaaacaaataatcttcaggttccctccttttccttaaagttttttagttttgattttttgaaaattaaattaaattttatcttgttggaaagttgaattttgccttcgttttgaaattttgtaaaatttatgtcaaggttagttgggatgacagaatgatataaattgtttctttaagggattgttgaagagggagagtgtgaggtatgccttttgagctaagtggtttgttagacaattcaaagagttttgctttgaaataaaggctgctttctctcctttgtggagtggtagtgatgaaataaggtaggaagtagaaataatgaatgattggaatgggacctttataaggtagttgagtcattcaatattgatatacctaggccattttttaatatgtaatggtgaatggaatggattggaataaagttatcattttattgtttggatatttttttaagatggaatggaaaaaaataggtgtgatcctgttctcccaaattttaagtgaaggaaaagaagggtgtttgattgaccggaatggaatgcattctgtcatgttccatcccatttcatcctattttatataatgcaaacaatggaacctagtattatttcatttcattttactccatttcattctttaacatcactccaaacatagccctatatttgactaaggtatgcttccttgcagctttaatggtacagtagtactttgcaaaatattgtgcacttggcaacagaggaaatctctagtatatgttctgtgttttgtttatgctatacacactatcaacatattattccaaaatagagatctccttctgatgtttttgaactgttatatgatcttttataatacttaattcatgggttataaatttgtaaaatgcttgtatcaccagttgttgagttggtggctatgatgttttatgggttgggtatatttattttgatatattgatatgcagctaccttgggctgattaagatgagttgcttctttaattgagcaggatcagaataacaaga

SEQ ID NO: 24689 - DNA, 790 bp, Glycine max
  Intron number 2 from transcript Glyma11g31830.1 (locus Gly ma11g31830) derived from phytozome v7.0 (chr-ID Gm11; pos 33180349 to 33181138 reverse strand)
aagggttgcagaggacttcagctggtttgggcagcgtatgttggcggttattttcttaatcaattttactactattattagtacagtttaattttgactttgtgtagaaaaatgtcaaccagaaatcaatacaaatttgacttctttagtaattactacaatcaaagttttcaatttcaccatacaagacaatctatggttagatgatttaaaattcataccaaaatgattttttgattagttaacagagttataaatttttacctgcctattaaactctaataataatagtacatcctcctgtctttattataagcaacaaaaatcacttgtttttctgtctcaaatataagcaaaagttaattaactttgtcttatttgatgagactatttttaaaatattcttcatttaatagggtcaaagatttttttatatttgatatcaacttccaatgaaaggtagtttaggaaaaaaaaacttatttttattatggaattaacacaatttaatgaaattaactaattttttagtaagtgtgaaatcattttttatggcttataacagagattggagggatgatgatgatgatggacgatgtagtttaatgttgaaactagcgaaatttctctctgtaaaatgctgggagggaatttgttctgagtgaactttgtgttgattcaaattctactttccaactctgacagcaattattgttgcttgctttgattgtttaccgcgggtggatatattgcagattataattgattcgcagcctttgactgtggctgt

SEQ ID NO: 24690 - DNA, 454 bp, Glycine max
  Intron number 2 from transcript Glyma11g37230.1 (locus Gly ma11g37230) derived from phytozome v7.0 (chr-ID Gm11; pos 38410213 to 38410666)
aattcatcaagaggagggtagacactgagtggtaagttatctagaagaaggaggtagttttgattacaaatttataacatgtgatttgtatcatctgtattaatctcctcatctaaaagtcataaagatcccagttggccggtttatttaaatttttttgaaggaaaatcccctacatattttttatgaacctagggtatctaaccgtgagataaggattaatctctcaaaatactaaaatttatttaattaagcgactaatctctcttaatatatgtttttcttccctacacgcaaacttggagattaaatccctgatcatgctgacatattctcattatatatatgtcttcacttgtagtagtgcattttgaagttgaaacctgaaacattaatagtatttagttcataacgcacaggtttctagaaggtgactttgatacctatacagtac

SEQ ID NO: 24691 - DNA, 570 bp, Glycine max
  Intron number 4 from transcript Glyma10g41420.1 (locus Gly ma10g41420) derived from phytozome v7.0 (chr-ID Gm10; pos 48481474 to 48482043)
caagttctggttgattactatcccatctggtaaagcccctttccatcatgattatttcaaggaggacattaatgaatatgaacatttgcacccttccgaaaattttctttttttgttggaatatacaaatcaaatttataaagttttcaactcacttgagacaattcttgtcaaaattgttgtactatttattgaaggttttcctagaagttttctccgtatgcaagaacttttgtcctatactcttttggcagcagaaagctatacaaaaatctacctcttctaatagagttacatgttgactaagacatgcatagaatttcactaaaatattccatatttagatccatcatgggccatggccatttcaaacacaataaacaaagaaagtaataaggacattatcataagagtcagaataagttgtgatgggccataatcgtgacaaattttcttaagagttgtaacaattttaatgaaatgaaattttagtttcactatcatgacaaaaccataataactagaaatgaatttaacatgtgtcaggggagaggtagttgaaattgacac

SEQ ID NO: 24692 - DNA, 973 bp, Glycine max
  Intron number 2 from transcript Glyma10g02880.1 (locus Gly ma10g02880) derived from phytozome v7.0 (chr-ID Gm10; pos 2074768 to 2075740 reverse strand)
ttggggtcatttcttatcacttatagaacatttaggtaagtagtttctttcacccttttgtttctttttctgcagtcttttcattgctatgtgtgtttatttcctatgcaccagttgtagacatacaatatgaaacgtccactgttggcctatgaatgtcatctcatgtgttctaatgcaactaacactgcaatcttctttgaattgctatttgtgaaagaaaaatatcttggttgattgacataaaggtggactttatttgaagtatgctttgcattctaatggatgagatgctaatcttgtggtcaatgctttgcatgctaggccatggaactttatatcacaggactacacttctttagttcttttacttctctcatctcattggatttgggtaatggctctcatattaaattttgggtggataatatactaatatccctctttctcatgctttttctagattcatctctcttcgttgtccaatgcccctgttattcagttttattctttatcccgctctactgtttcctgtaatttttacttctttagaatttaaatgacaggggattctctgaatttcagtttcttttggtgttgttgaactctatttatctcttttaatccaaataagaggatttggtccctagacactgggggtgtattttcttgcaaatcctgcttccaatttctcccattaatgcttcctttcctctggataactgtattttatgctctttccaaagtcaaatcctttgttggagtgctgtcactaataatattgataaggctttatgttgtacctttttcatccctcatactatttcctcagctatatgtttatttataatttatttataattgccattcttttgttctgacacctgtatcttgatgcaaataatgccattggattctcctgtttttgtatattgaaggttctcatcttcgggtggcatcttgcttgctattg

SEQ ID NO: 24693 - DNA, 737 bp, Glycine max
  Intron number 3 from transcript Glyma11g05940.1 (locus Gly ma11g05940) derived from phytozome v7.0 (chr-ID Gm11; pos 4186421 to 4187157)
aaggttagccgttgctttccatttatctgttaagtgtcgttatttttcatgtgctatttatgcttgtctaccatgtcgataataaattatttattatttatatctattctgtatatttcaattatccgtttgtttgtaatataactcaatcccatctatactcctatttgtattgaatttaataaaaactacttgctgcttgcaacttttcaagaagagaaaaggccaagtgggtgagtttcttttgatgcccttgaagatgtttatgttcatccagctgacatgtacctcaaagtttcattaatatgaatccatttaaagtaaacatccattttggtatttaaagatacaattagtttagttttctaataatactaaatattaaatacatcaaaatggttcctcattgtcaaaatttgatgtcaaagggttgtggtcacttttttcttctccttctgcttattactgattatgaaggaaatgccttgtacaatctttatagttcattattcatggcttatttatcacaagtttgggtgctacaagcgcacagagaaatcaagagaagaaatatcaagctggttatgctttattacttctgttgaatgtgaaatataattgtcttgtacaggatcatgctagattgcccctacactattaagttttctggaggcacattttaatccgctttatttattttaggagcggtcaactggacggtctcgtggttttggata

SEQ ID NO: 24694 - DNA, 657 bp, Glycine max
  Intron number 1 from transcript Glyma09g32390.1 (locus Gly ma09g32390) derived from phytozome v7.0 (chr-ID Gm09; pos 38924247 to 38924903)
gccgcagcagcagcaaccgccgcggggacctaaaggtgagtgagcattagctacaaaaaagtgtttttttttcacctttgatctaatgttagtgaaaaagccttgcatgtttttgcttattttattaatttttttatttttttatttttaaggtttgagtaaattatgtgtagtttcaacatgttttcaatgtttaatcccttagtttattctccgactcttgctgaatctcgttgcttatgatgccacatgattaaccatgtaaagctagctgctattattttcatatgttattatttgttttaggtttttttttattagttaagttttgttctaattcttgaagaaatgaatggttccttattttgtgtctttgtatgatgttcaatggtgtattcaaagtctaatgataactaggctttgtttggataaacttctctataggcacttagagaagaaaacaagaaggtaaaatgaatttttgaaaagttcagatgagagtttttataaaagctgaatttcctaagttgattttagttctaattcttcaagaaatgaatggctctttactttgtgtcttttggtgatgttcaaaggtattcaattcaaatccaatgataattactcatttcaagctgttttcttcacaattgttag

SEQ ID NO: 24695 - DNA, 1008 bp, Glycine max
  Intron number 2 from transcript Glyma12g35340.1 (locus Gly ma12g35340) derived from phytozome v7.0 (chr-ID Gm12; pos 38457316 to 38458323)
ggtttcagatcacagaagcactgaaggcaaagcgggtgagttgagaataattctttgtggttgcttgtaaaaaaaattagctgcttttagtgtatttcaaaatgaaaggataatcatctcaaaggcgcgaaagcaaggccccagaagagttcagtgccttatgcgtgtcatagtcgtaactgtaaaaatccctgaaactcaggcacttttagaataatttcattgtggttgcttgttaaaaatttagttgtgtttagtgtatttcaaaatcagaggataattgtctcaaaggccagcgcatcatgcgtgtcgtattcgtaactctaaaaaaccctaaaactctagctgtctaacggcctgtttgtttttgttttaaaattccccaaccgcaaacacgtgttagatagaatgaagattttttcccttcctacaaaccagtattgggaagtgtaatttttccttgataattgtgtgaacttccgtgtgtgtttgttagaatgtaaataaaaaacctctaatttgctaccatgatgtttttggttgatttgagaactatggtgatcctattatgctaatggagataaaatggtcagaatattaagaaaaaaaactaattttcaatattttggactctttgctgcaagcaacttagtgttttacaaaattaaacatttaatattttattttttctataaatgttatgcttgagttgctactttatatggacaattaatgcaaaaaaatcaaataatttattttctaatgttgacatgtttctttcgtgaggcatgtatgggttttgatgcctcttgactgagattgatgggacctagcacctaaagggtgcatttttgcctttcactcaactatggattgtccttacaatcaaagttttgtatttgcagagtgacatgatatgatgattccttctctatgaacatctaacataattacatatcttgtcttgctgcaggctgaacgagtagagttgatttctcaggtcaagtc

SEQ ID NO: 24696 - DNA, 828 bp, Glycine max
  Intron number 1 from transcript Glyma12g04210.1 (locus Gly ma12g04210) derived from phytozome v7.0 (chr-ID Gm12; pos 2750568 to 2751395)
ccaagcttcgagaacaggtcgctcgccagcagcaggttcgttaccgcagatcctttcgctttcttctttgtttctgtctaaatcattataccttctcacggttttttttttcgtttgctacgcttcgttgctattttgcgatgcaattttcgtttaactcctcgcagcgtgttcataaccttgtagtaattattgttctcgtgaatatgataccgcagagtattggatctaatcgaatttcgcacttgcatttccgaaatcaattaagaaaaactgtagatcaaagttgagttttaaatcggtatcttatcttgcttacgctttgagctcggtagctgattcaaaatcttcgagatgtgtatgtgttttcgtgcctttaattgtgatgattaagcttaaattagtatataatcaatattagtagctggatttaaaatcaccgagccgtgcgcatgtctgtgtttgcatttcgttaatgaacaaaacttagatgatgcagtttcgtaggtggttttggtgtttcatcaataagaattggattttatatcagtaatctgcataataaatgtttctattaaaggtcaacatagattactgaggtgaaactccaattatgattggaggacaacgccaaaaccacctatggaattacatgtaggtttgtctttccttaattaattgttaagctttggttcatttctttttttgttcctgtttctcaaaatttccttccctttgattagttcctttctcaattatcggggtgctaatgaaaatttagaagtgttgctatttaggctgttctgaagcagtttgggggtggcggtt

SEQ ID NO: 24697 - DNA, 839 bp, Glycine max
  Intron number 2 from transcript Glyma09g12970.1 (locus Gly ma09g12970) derived from phytozome v7.0 (chr-ID Gm09; pos 14065225 to 14066063)
tcagaaaacaaaaggtataacaaaattaataccaacaagtttttttttttttttacacagatctgattatctgagtgaagcagccgtggaaatataatagatatgtaagactagtgtaaaatttttacattatcaatcaattagaaattatgtttgctacaactcttaacataatcattatacaagttaataaacttatcatatataataatatgtggatcaattacaatataaaaattcttatttgtgtgtatttgtcaaattgtttgtgttttcaaaattattgatttatgtcctagtatgactaaaaagttcaatttcaacataagatatatgatctcatgcattgtattaagttcaattttaggttcaagttgtatctgtctaaggtataattgtaattcttctttgttgtatcgagttgtgtccacatctgtatccaataccttcttttgagtgtcaaggggagagtatctgccaagatactccgatgcttaagttaaaaatcactcaatataataaaataagaacaataataaaataatgaacaaaaggataaaataaatagttcccttttatctcaaaattctcatcatatatatactatttcaatgggcttcgcatacataaacctcattattttggtaaggtaatattatctttattatataataattattattattagaacaaggggaacatgagttactctttatgttaagtttttaaattgttggttcatgacacctagatgaagaaccccacatcagggagtgatattttatctattttgtttttgaaatttatgatcaattaattgcaaggcaaaacaacacaaa

SEQ ID NO: 24698 - DNA, 1010 bp, Glycine max
  Intron number 4 from transcript Glyma12g05480.1 (locus Gly ma12g05480) derived from phytozome v7.0 (chr-ID Gm12; pos 3652210 to 3653219)
gtttttcaaaggtagttttctttttgcacagaattttctttttttttggtttgtagttgtacatttgtagcattcatttgtcaaatcgagggggggggggggggggggggttgtttttaataaaactgcgtaatgtaggctttgcaaaaaatatgtttttgcattcttataatcaggttgtaattaacttatgtcagttttgtcgaacacttgaaaagatattatttaacaacttttccctttagctaattttccctctcaaaagttatgaccaatggtagctgattttccctcttgaaaggtcatcggtcatgaccaatggacagattttggattcatgcaacatcttggagttctttgttatgtacctatttgaataaatcccaaccgccttcctcctctcccccaacaaaatagtgttgtttttctaagcataggaggtaaagatattaggttctgaagaaagcatttaatagttgttttctggcttttgttttttctaaaagctatttgtttagaaaagttttcagaaaaacctttacttcatactaaactttacttgaataggaaatgtgattgatatttctatgccatatcttttctattaaattttggacttggatctgtctggtctgaagctcatttcatatgtaaatgataatgaacataattccatactgacactgaattgattacttgagtcagtcacttaaatccacaattatgggtccttgattagttgtgattattggatatgctataaattctttcctgctccttatgaagctaagttcaaaatttcctattagtttgttctataaccaagttgaatgatattgtgtgatttatgtagcttacctcacatagtgggataacacttttgttattgttgttgttttcatatatcatttgattcaaattggttggcattgctgacttcaagtcttattttagagtaacaatttctcatttcagtttatcatagggactggtgataatctttcagattt

SEQ ID NO: 24699 - DNA, 563 bp, Glycine max
  Intron number 1 from transcript Glyma10g44110.1 (locus Gly ma10g44110) derived from phytozome v7.0 (chr-ID Gm10; pos 50579369 to 50579931)
accgtaaaccctctcatcaccttcgaacacaagaggtattgttcgttattcacttcattccacgcgtctctcgctcctccactctcgctttatgttagatccgtcaattaacacttcattatcctctttcattcgctttatgttttgctctgaatttcacttggactaccatgcgacttgccgttgaattagtgcattttgaagatcgatctcttccctttgagtttgagttgacgctgattgcgagtttttctttcttcattttaattttttgttacttagtagtattaagtagcgaatagtgataattgggaatctgcgctgaggcaatcaatgccgagtgccttgggaagtgcgttttgtgcggaatgtgtcgtcgacgggcaatttgagtagcgtctttctttaatttgttgtttcgtctcgtacttgttgtttgtgtgcagtttattatttttgagtctctgctgtttttgtttttttttttatctgtttattattggatttttttatttttatttttttggaaattaatgagtgtttggtgtgaacactgaacaggg

SEQ ID NO: 24700 - DNA, 718 bp, Glycine max
  Intron number 2 from transcript Glyma09g38580.1 (locus Gly ma09g38580) derived from phytozome v7.0 (chr-ID Gm09; pos 43919764 to 43920481)
ggacaaaaggttgtcaaaggaaatccaaatcctaggtagtgatcttgcctttctttctgcaattgcaggcctgtttatacttgtgctaacttgattgaaatataactctgatgtagtgtttctctctttaattgaatattctaaaatagttttgggatattgtacccaatggtgtcatttgtccaatgataatgtgtcattcatgtagccgacttcacctggtagggataaggtttttgttgctgctattgttgttgtttttgggctattgggctttcaaatgaagtttcaagttttcaactatttgtagagttttaatagatttaaggagatatacatatgaatcagttatactagatttttatttcttaaagttgaacgctgatatttttctgtttcttgttcactgctcgttttgttaagtagtcaatttccattctaaagttgactgtgcttgtttgatattgtttatagatatttgtatctgtttattattctattccatgtcttcctcattgtttattatttgaactggttttattttcaaagcatatcaatggtttattattctacagattgtgtcgattcattctctatatttttcactcgctcaatatgcttgtaatgatgtcaaagtgttatgatatatggttatatacctatgtagcattcatgcattgaacattttctcatggatctcttccaggagctactacaa

SEQ ID NO: 24701 - DNA, 1024 bp, Glycine max
  Intron number 1 from transcript Glyma10g03980.1 (locus Gly ma10g03980) derived from phytozome v7.0 (chr-ID Gm10; pos 2975692 to 2976715)
agaataaggtaaatagagacgttttataagtcacaaccttttaatcttatgtttctaattatctctagttccactttgtgaagttcaagttttaaaggattctcgatatttcaacttccttcattttgtgtttttgacatgttatttattgttttaagaaacatatatatttgcaatgatttttgaggaggatcttgcccttaaaatacttagcaaagggtatgctagaaaactttgatatctgtaaaataggctctctttaacattctctgtcaacatctttagtgcatggcatcattaatccttatttataaaagaaagacttaagttacatgataatttttctctgttcttatggaatataaggatcttactagttaatttgcacatcctatttaagagggatagagaaatgggtgacttttttttcttcattttccagttgactagcatctatggtttatagtgccctccccaagtttctaatatattttcttttctctagtccttctctttgtgtggaacagttagtttcagagcttagaaaggtagaaggggatggcttaaacagtgcaagaaagaaacgaaattctaagctgttgctccattgttatattagttactgatgatttgagaaagaatacagagacaggctgtctcgtatttgaaatgcttaacatttcattttctatctctattagaaatgtggttgattttagctatgagaaatacatatccaaggactttgaaaacattgtgcttatgcgactcagaattatgtcacttcttatttctttaagaactataagtctataaaaatgcaaactaagttctttggagacatctatttaatttcttatttctgtcaatagacactatgcctaatgagactaagaatgcgactgattttacattactttagcaacattgctgcacacacatgtgctcatgtaatgtggactaattttcttctattctgtttccatgtcaccaggttgtttcccgtttgtcaaaattatatccc

SEQ ID NO: 24702 - DNA, 639 bp, Glycine max
  Intron number 1 from transcript Glyma09g34940.1 (locus Gly ma09g34940) derived from phytozome v7.0 (chr-ID Gm09; pos 41208928 to 41209566)
tctctcacacactcgcatctcagatcgaaatcgaggtcactgagtgagtgagtcgtgtttaattttctctctctttctcagcttcctctattttcgccatcgctgttcctgcaattctggcgccggattaatttactttgattttatgttttgcgcattcaatgcttttgatttcgattgaatttctctttactctactgtgtgtgcgaactgcgaagcttttctagctgtttacctagtgtgcttccgtgctactttttattctttcgctatctagatagaatcgtgcttgtgttgctgagctgaaatttttttaactgaacttgaagcatttgctcctattgttttatagtattattgattttgttcgtatgcgtcgtttttaattacaatatagaaaactaattttgtgtttttatttactcggtgaggttatgttacatgtttactggtttttttagtgttatgtgaataactgccgaaacagaatttattttttgtccgctgttattaatttccgttgatgagtttgtaataaatgatataatgatgattcttgtctgttgtaatctcagcatagttttttcccccccctttttttgttgttgcaggaagtgtttacgttattctgcgctgttg

SEQ ID NO: 24703 - DNA, 452 bp, Glycine max
  Intron number 3 from transcript Glyma12g06160.1 (locus Gly ma12g06160) derived from phytozome v7.0 (chr-ID Gm12; pos 4194536 to 4194987 reverse strand)
tggtatgcaagaccgatttagctacttatgtctaatattttattccctttccctttaataagcaataacattttctgttatttacattctgataattttaagctgacaaggccttgtttggataaacttttgaataagcacttataagcaaagacaataaaaagataaaatgattaagtttcccccgtaagttaaaattagtttatgctaagttaaaataagcttttatggaaattaaatttaagagcttctataattttaacttatttgacaacttagttcattttattttcttattttcttctcttataaatgcttaatgagaagtttatccaaataggaccaaaatgtattctaattgcaatagtgtaggtctctgctgccacttatttgacttattactcacctgcatatcaggtttcttacctcattgaagagtatagtagtggccg

SEQ ID NO: 24704 - DNA, 929 bp, Glycine max
  Intron number 2 from transcript Glyma11g31530.1 (locus Gly ma11g31530) derived from phytozome v7.0 (chr-ID Gm11; pos 32803148 to 32804076 reverse strand)
taccagactccttaatcaaggtccgtttattccatatgtattcaaggattctgctatgaattttcccctcttattttttcattcattttaactgatcttcatttgaactaggccaagtcataacataaactttctggttacatggtctagtgtttcactgctctttctcttcaaaggttttgaattgcggccgcagtttcgtcaatatgtggtcacaattgtggtcgtagaaactctaaaaaccttggtgccgcccttgaaattttggtggcggaccgttttttaaaaccttcatttaatcttctttcaaatgcactggattgtgtcaatttctgaccttctcaccggtctgaaccagctaatgcttaaatcaatcattgttactaaattccttaggaattaaaagtttaaacatatatgatttgaaatacaagcaactgaattcttagctatggttctctagaattgtaatctgttgatcaatcatgaaaaggaaacatatactttttggatgacccacaaaaagaatatgtggtactaaaagatggtggcaatttagtcattgcttccttttacacaaggcaaaattctttctaacattggttctaggcatcctctagtctagaaaaaaaatacttaggcattgtcttttgcatgactagagcaaaccttcagatgatcagctttattattaatgctaccattctataacattctgttttgaaaattaagttgttcatatagatagcatccactttatgaatgtatatgtctgatactacacttcctagacataatttacagttggtttactatctgaaaggttgcattaacaatatttatgttctttgattcagtagcttttgtacaagttcttatagtcactattaccttattattatcagagattttaagggttaccggaaaga

SEQ ID NO: 24705 - DNA, 286 bp, Glycine max
  Intron number 1 from transcript Glyma09g40130.1 (locus Gly ma09g40130) derived from phytozome v7.0 (chr-ID Gm09; pos 45086750 to 45087035)
atcctaactcctaaggaactagtaaaagcaaagaagtaataaacgtttttttttcttcttattattaattactaatccttttttctctctctcaaaataagagtgtgaaaaaatagaataaaagacagcatttatttaattatattttgggctttatccttttgtcccctttatcttttctctctattatttatttatttatttattaatttccctggtttcaaaaggttcgtttttgattgccctcacaggtatataaggcagattctgagagacccatttcata

SEQ ID NO: 24706 - DNA, 751 bp, Glycine max
  Intron number 1 from transcript Glyma11g15900.1 (locus Gly ma11g15900) derived from phytozome v7.0 (chr-ID Gm11; pos 11564613 to 11565363)
ccacctccttgctcttcgacgaaactcagacacaggttccttcatatttcagtgttttttttaaagcttagtcaaaatgtttggcctttttcatctgggttttctagaaaccacggttattagtaattggtgggtgaaaaatggagtcttgattgaagttattactatatgatcaataaaataagaaaaatgaactatttttttttttactcgaagaagtatattttattttattttactttacttaggtgcatcttctgatggtgacaattcttctggatacatagttgagcactaaatgtggacggctctggttaatctttcatttctctctttaactcatttcaattggtctgtcaaggatgtagaaaaggaaaatccaatgacttttagcatgatgttttgacctgggtatgtgctatttgtcagggaatgcatgccattggcttaagttactgtattttggcaagttacacaagctagcttgagaattttggttggctgaagcacaaccaaacacaaatttaattgtttggttttagaattttttagtgggagaataattttgagatcctttttcattttaaagattgttttctgcatcaaaacattttaaagaatgtgtttattgcgtaagatgatattgtgtactagcttctaaaaagttgagccatgtcatgcttgtaatgattggaaggttttattgaatggtgcagtttaaggaaagtgttgctcaatttgcaacggaaaa

SEQ ID NO: 24707 - DNA, 451 bp, Glycine max
  Intron number 1 from transcript Glyma09g12440.1 (locus Gly ma09g12440) derived from phytozome v7.0 (chr-ID Gm09; pos 13240927 to 13241377)
agaaaaaaccttcatacaatagtcttttcaatcaggttatgacaagtttttttttttctttcttcaatacattttttaatcactaatttagtttttttattttcgtttttgtaaatttttttcgttttagtttttttaaagtatttttgttttattttttgtctttaaagtgctttagataatatttttttcattatttcaaaatatttttttacttttcaaaatattatctaaaacattttaagaataaaaaataaaacaaatacatcttgtaagagctaaaataatttttttagagacaaaagtaaaaaatattaaaatacagaaaaaaaatgtatctaagttttttttatcaacagatcttaattattaataagaaaaatcaaattcacgattttttttttctttttcttctttcttaacctctcaactaatcttatatgtcaaggtt

SEQ ID NO: 24708 - DNA, 481 bp, Glycine max
  Intron number 1 from transcript Glyma09g12900.1 (locus Gly ma09g12900) derived from phytozome v7.0 (chr-ID Gm09; pos 13998935 to 13999415 reverse strand)
ctggaccactgcttcagacacttttcttagcaggagtcccacagtggcaacaccctcctccacaactcaaacggcttagttttaattaaaaggctactgttgtgctcgtattaattatttttcttaagctgttggtttctttgcttagtataataatgatactactttactatgagcgaccaacaagagcaatcatgtatcttccaagaatttttctttcccatcaagcacacttcattcaatgttagtgtctgccattaaaagagcacctaattagactccccatgatgaagaatgcatgtttgccagacccggctatataactaaaaaataaataaactgcacactacttttttattaaaaaaaattacaattcagtaatgtgactactaaacattctataaacctagttacttaaattggggcttctgattttttgcttgtggcagaccatgactgattgaaacgtctgtgtttaaga

SEQ ID NO: 24709 - DNA, 693 bp, Glycine max
  Intron number 3 from transcript Glyma10g44440.1 (locus Gly ma10g44440) derived from phytozome v7.0 (chr-ID Gm10; pos 50802109 to 50802801 reverse strand)
agacaagggattttgtctccttggacacgaaacaggtggcattttgttggatattcaattttatggcctgtttatctgaattctcacttttctcagtggcctgaacattttaattagtgtgttattggttgaatattgataacacctttatggtcaaggaggtcttgatacttgttctgcgtaactttgaaatgatctataaactccaaattgtatattgcttatcaaagatatgcttggagggctctattgtctctggtttgattgatactccactttttcctttccagtcagtgtctctaaaatgatacttttggactttccctcatctttgtagcttttttcttctctctgttggtatttctttcatcttaacaaaagaaaacttatctgtactagtttagtttagtaaatgtatacactatatgatttatgtatatattttcaaattcatgtcagcaaactcctaaagttttaatccgttgtgtactcattttgtttattggaaactttaacagaagagtcaaaattgtgattcctgattttaatttagggaaggaaatcacttccttttatgaggtctcaggttgtgttagtgcttaacaaaatgtaacaatttatatataaaagaacacaaataataatcaaagttctatgaaacatattagtggtgaattttcaacaaaagaagca

SEQ ID NO: 24710 - DNA, 710 bp, Glycine max
  Intron number 2 from transcript Glyma13g00500.1 (locus Gly ma13g00500) derived from phytozome v7.0 (chr-ID Gm13; pos 250463 to 251172 reverse strand)
ttcaggtaattttctgctttgtcctgtgatggcttgtgcgattctgagaagattgcaaattaatgttggttaccaccctttgataatattgtctagctatttgaagtacttttatgtgggtgaagcgatttcatgcattctataactaatttaattctctgccacaatgtattgaaatggttttatacttacatgcaattcaattatgattcttagaatgtttattgagagaaatttgtgattggatgacagtataaaaatgttttactaagggcataaatatcaaacaattgaattaatattgtttttcagggaattggttgctacttgctaataacagaagttattttagtagatgttgatttctgatgtttagccatactttgactgtagtaacagaaaataatattgctactacagagataataatatctttgctaactttttctcgaaatatactcctgtatttcctgtactgttctgctaaaaaagaagttatctctatcttgattttttccccattattttggatttgctgaagcatattcatgaacatcatcatggtcggtgtgtcaacaatacctattctaacagctttctgtccataagacgaatgtcatagtcaaatctttttttaatctatgttcattacatactttctgtatctcattttattcgttttctggtgcagcgctcattctttgggttca

SEQ ID NO: 24711 - DNA, 564 bp, Glycine max
  Intron number 2 from transcript Glyma12g36870.1 (locus Gly ma12g36870) derived from phytozome v7.0 (chr-ID Gm12; pos 39904614 to 39905177 reverse strand)
ggacaccttcactcatagccacccaggtttgcatctcctctcttctttatttctgttatctttctttcttctttttttccaccttatttctttgtttgttcatcttaagtagcaatgtttcatggttatttccctttgtcaatatattttaagtagcaattttaactgctattaaaccgatcaataatacccaaagagttgaatggggcgagcttaagtgaaaataataataataataataataataaggataatgctaaaatatatattgggttagcattgaagaagatttacttcaatgaccccacatttcatctatttgattgaccgaattgattttggggggctaatgtgtgggaagagaaaaacaatgactatctctgtcaacaatataagcaatgctgcttcttggcaaagcgaatttcatggtatttttctcattttgaagttggtttatacaaggtactttaagatagaacagagttggtttattggataatgaaaaaaactcaaaatattgagacatttttctcggttgtgcagacagaatatcagaccacagta

SEQ ID NO: 24712 - DNA, 371 bp, Glycine max
  Intron number 3 from transcript Glyma10g10000.1 (locus Gly ma10g10000) derived from phytozome v7.0 (chr-ID Gm10; pos 9467889 to 9468259)
aagaagacgtgagttattttattttatttatttatttcccttttttaatttttaggtttttttttctccttatatgttgtgtgttgatcgttttttctgtatttatcatattatgatatagcttagttaatgggtgctgaactgctgatgcaggacgcatcattttttcattgttgatattttgtattttttatgccaaaaagtatttgtggttgatttcttgaatctggatatttttgaatgatgtgttttgtttaaattattggtaatcagctagtagcttttcttctctatggatttgaattatctatgcgatgtgaaatttgagatagttataagttacggcactgttctgtgtgaacagtttggct

SEQ ID NO: 24713 - DNA, 846 bp, Glycine max
  Intron number 1 from transcript Glyma11g06400.1 (locus Gly ma11g06400) derived from phytozome v7.0 (chr-ID Gm11; pos 4536605 to 4537450)
attcagataccatcatcaaggctacttgcctggtaagtaaaatgctcagctattttttttcatggttgctacatgcttttacaattgatggagtccaaaaggaatctaagactttgtgctataaaccatataatttaggacttgctaataaggatattcgtaagacgcttttacgcctttggttctaagagaagagaatattatgccgaatctagcgttgcactttatataataacgaacaattgcaatcttgagtccatcaaaaggaattattccaacagaaacggaggagtacaagacataaatttggaaaaagttgatacataatatcttttgaataatgattcgaaaattctaaaaagtaaaaatttgtgttgacgaaaaccattacccttaccactgtgatttctgtcaaattttcccttttactttttttatttcgttgttcaacctcgcttcttattatttcgtactaggagttttcgtacgatgtaacaaactcttaataatttggctcgtctattcaagtcttttcacaacgaacaaagaatatattgcgaggccacaaaggtccacttgtttagaagaaaatttcttttcttttaacatccttcagtattaagatatcaaaagcaattaacacccacaacaggagtccacttctccaaaatttacgttgtgttttacaatctgattcggtacgacaccacccttctgttttgaagaaaaccttattgtctcagcttttggtgcacatgaacgttcagtttgacatctaactttgaattacgaccatgaacttgtatatctttgcagaatttgattttagcaggaactgaccccacc

SEQ ID NO: 24714 - DNA, 718 bp, Glycine max
  Intron number 1 from transcript Glyma11g19290.1 (locus Gly ma11g19290) derived from phytozome v7.0 (chr-ID Gm11; pos 15998624 to 15999341 reverse strand)
gccttccaaggacaaaatcgcttacttctacgacggtgcgttttcctcttctatttcacttccatcctctctaaatcgatttccttccttcctttttttcttttctgtttcctccgattcttctttcgcggaattgaactgtttgaagttcgtcaacgctcttcgtttcgactcggtcttctaattcctagctcacttcgttcctgactatcaaaaccctagctagctaaccctattcctatgctcgttgtgcttgttgctgcgtttggttgcaagaaaattgtaaaataaagaaattagtttgcgtttagaactgttttggatttcagattctgctccttgattagttcaattcgtgttctgtaagctttaacgctgtgtattttggattgttgctgaaattttagttttttttacattttatttatattcgctctgttgggtaagaatatcagcatctctaatagcaggcgagttctgtgaggagatgttcaatcttgtattccaattagttctaggttttaaattgtggttacatccgcaattgtggctgcaatatcatggatttggtgcattagccgtatttatttgccaaggattgcaggtaactgcaaccgtaatgtaaaacagttgctgcaatattttttcgtatccgctagtctttgttttttgcatgttttctgtatactcaaatacttcaatcttcatattgcaggtg

SEQ ID NO: 24715 - DNA, 737 bp, Glycine max
  Intron number 1 from transcript Glyma10g02790.1 (locus Gly ma10g02790) derived from phytozome v7.0 (chr-ID Gm10; pos 1989652 to 1990388)
aagtcaacctcagtgaatctaaggtaaaaaattactaaaatccatctgggtttttgtttttcactttctatttttttttaatctgaaacctggttgtatatgtgtttctgtgtcttccttggtttgtttcttctgtttcttttatgtggggtcttgttgatgaaggggggttgcggggatgaaagggggtaaatcaattgcaaggctaaggacggaaaacatatctgaatttcagagagttgtctctatctattttttttattacctttctgggtttagttaataatggcggcacctattggatgatgctcttttttggggtttgtttactttttcttgtactttgtatttcttcccatgtaggtctctggtttctttttctggtaagttggaaaattccagtttgatttggtgacacaagttgaaagttcctctcttctcatgaagatttatattccttggttttgctctaatttgtcaactttttcctttgataaattagttgcttttttaaaaaaaatcttttattaatctgctaatagtgctatctctaatactctcagcttagtagtgccctagttttcttattagaggaatcaatatgcagtttttcttataagtactacagtgttagattagatggaatgaattgttcatatggataaggttataacttgtaataatatcttcaatcttttgtagagtgttgttccactcaacacttgggtgcttatctc

SEQ ID NO: 24716 - DNA, 767 bp, Glycine max
  Intron number 1 from transcript Glyma10g40410.1 (locus Gly ma10g40410) derived from phytozome v7.0 (chr-ID Gm10; pos 47844635 to 47845401)
taggggatataaagttttatctacacaaggtatgattcagcccagtaaacttatctagtctccaactgggaatttccatattggcatttagtgattctacgagtctcaaatctcaatatttatggcaatttttggatagttactgtcagaaattcatactttgatattcatttcccaatatatttatgtatggtgaggatgatttgctctttgatgttatttttccataggactcgtgtaaaagaacaaaaaaatagcattatttatggtttttggattttcaagatatttaggggccgtttggtcttcttttatcatgtaattggttttgttttttattcctcaacatgtacctaaagggcacacagtaacaaaactcatgtgacaaatttaaattgataaaatatttgtttacatgtacattgttgctctgataaagtgagtagtcattcatgcatgaccttaatggagagcagaacaactactgacctattgttaagttgttaaccccattgtctaaggctgaattgaacagttttaagattcattttttgtgagttaaaactcagaatttaaaaagaatctcgctgggccactattacttgaaaattactatagaggttggggaaacatggttcatattagttacaacatccaaataaacagctaaatcaattttgcttcaagttttcattttatgtttactgatatatcaaatcctttgatgtgtagtttcctcttctatcgaagagttctcgcttacagac

SEQ ID NO: 24717 - DNA, 944 bp, Glycine max
  Intron number 1 from transcript Glyma12g33200.1 (locus Gly ma12g33200) derived from phytozome v7.0 (chr-ID Gm12; pos 36552407 to 36553350 reverse strand)
cttcccctggtcgttttgacgaacaatctttccaggtaattttgtttgttcctcgtcgttttctagttttctaacatgttgctacgagaatttgggtgattctgttttggtgtgtctttttttgaatttcatatcggataccgacacaaatttgtgtagttttgggcgtgcgtgtgtggagtggtgttgtgggaaattgctttttggtttttggggttgttttttcccttaatttctttgcagccttctcagtttttgttcatttcttttttaattggggttgaatgtttgtgattgtgtatatcttggtgtttgcataactggggatcagcgcgtggttgtgattgtatcattgtgcggtggaggctaccaaattagcatcatttgtgaaaggaatgtcttgggttgtcatagttgtaaagtatgacatagttgtgtgtcttcagagctgagtattatagttttaactttttaagttaatggatcgtgggaagcgatagaataaaaaagaaaaagtagtgcgcagtatccctttgtggttagtatctataagcagaatcaaatgaaaatataatagtcttatttatttatttaagctcctaaaactgtgttcattggctagatgattcaataagaacagggaaattgtcccaaaaatggtgtcggtggtgtttctgatttttgacaaaaaaaaacaccatttaatgagacatgacaaaattgaaaggtatctgaaagaagctttggagatgtatggcttacttaatctgctcttgctttatgcctgattaaatgaaaaatgctttatattgtattacaactggtaattctttttgctcatgtggaaactggtaagcaagttgtttattgttcagtattattattattatatgaatgaaaatcatgctgaggtttgatgggtgattggtgacaggccttggatt

SEQ ID NO: 24718 - DNA, 873 bp, Glycine max
  Intron number 1 from transcript Glyma09g38650.1 (locus Gly ma09g38650) derived from phytozome v7.0 (chr-ID Gm09; pos 43963902 to 43964774)
cgcgattcccgtgtcccgagagcacctccctccaggtcttttgctttttcttcttcttttatatgctttctttcaatctggtaattcgttccgatcacgtgtgttttcgtgatcctgttgttatcgccgatgatcatcgatggatgatcgtcgcgcttattttgttgttctgcggtctgattctgagatctgagatgctttgttttgtttcactttctttttttacgtaaggtactaacttgcaatttttttttaattggattccactgtgcttgtttgtgtgttgatgatgttttcttaaccgctttgggaatgttctgtgttcatgtttgttcatgcaatttttgttgttctgcttttttaactggacaaaaaaaccgcaatcaaagctgttttttttttttcaagttctcttaaatttaaattggtaatgaatataaactttcctgatttcgttttgcaattttaggtttagatactgtggagtactttcgggataaattgttactattactgaagtgaacactttaataatcattaaagttaaactaggtgcaatttatggaatttttgtaaactttttttttatgagtattttacaatttaaacctttatcgccagcttttttgtttttaatttttatttttgaaagaacctgaagtttagagaccatggcaaatttggaaaagtcttgggctcataacaaacggatttttgatgtggtttggacaaaataccaaacagtttcatacatattcataagtcaaagccaagtttgtagtacactgagataaataaagtgagaaatagaagtctaaattaaaatgatgtctctttttgagagatggacttgttcatatgatgttgtttcag

SEQ ID NO: 24719 - DNA, 533 bp, Glycine max
  Intron number 1 from transcript Glyma11g07660.1 (locus Gly ma11g07660) derived from phytozome v7.0 (chr-ID Gm11; pos 5353945 to 5354477)
cttaggtctcttttccttcctatgcttttcgtgattgatccggattctctgcattctcatctcaacgcattcacacattcagatgaagaatggacgcctcatattttatcccattcaatcaaaacttatagcttgcttggtttcatgatttggatgtgattttttcacgcttcaaatgtgattttcagatgctaatagatatagcttccgcatctcaaacgtgattcttttattctcaacgtatttacaaacatgctattaaaacacatttgaaatctttgtcgtccaatcttcatctaatggttataaatgtgctgaatgcatgcttgcaaaaatgactacactgaatccggtttcaatttatcatatggcttgcatgctgcatggttattgcttccgtgtcctagaatggatatgcacttgcatatcatgtcatgtcattgattaaaataacaacttgaaacttttcttccactatttttgtattttgttgtatagattcctgaaggctaggaaatttgatatcgagaaaa

SEQ ID NO: 24720 - DNA, 252 bp, Glycine max
  Intron number 3 from transcript Glyma09g32900.1 (locus Gly ma09g32900) derived from phytozome v7.0 (chr-ID Gm09; pos 39440336 to 39440587)
aagttagttccttcgcctgacttgactctcctttgatttgttctgtttttgttggtagttatttaatccttgatggaggttttatattcactgcttattgttttgattttcatgtgcagaagaattgttctttaactattttttcttgtcttctatgtgccttgagtgacaaatacattttatgcatctttaatttttttaattttttttttcgtttatgtaccagccatcctccctagcagcacttcgaga

SEQ ID NO: 24721 - DNA, 975 bp, Glycine max
  Intron number 2 from transcript Glyma10g35050.1 (locus Gly ma10g35050) derived from phytozome v7.0 (chr-ID Gm10; pos 43233008 to 43233982)
ctcatcatcaggcttcatagcctcttaggcaataggtacgtctttatatattatatatgcatttgcttgatttttcttttctttttttggggggacacgagattatacgagaaaagatatataataaatagtctatataccgataatataaaaaagaagtttatcctgtcatctccttataaaattacttttatatatgataaataagattattaatttttacagtaataatcttaagtcataatattttttcagggtcagaaaaaaaatattatatatatatatatatagccgggtataagcattcccaccggtggttagaccatatttataatcatatctgtaaagagttttatgccaaaaaaataaagtgtatgcatattaaaaatttgagttttatcatttaggtttagatgacttaaatgtaaagtaaagatttcattttactagatgaaccttagttgaatggatgcattataagttatttttgtttcaactttcaacagagtttatttattatagttgatagcaatctttattataaatgtagaatataattagtggagaaacacaaaacatatgaagtgagagtgtgagaacagattatgtgaaacaaaatcactatgttgagagaaagatacttttatgtgagtgtgttatcatttcttgtaatcattgagagagatacttgagtttgtagagtgacacactatttctatgatacatctttgttgtgttctcacgattctttgtaaaaatgaataaattttatttgtgagagggttgattatctaataaaatgtaaatactaacaacaatgtttaagttatatttttttttcttttacatcaatagagtatatatagccattaaattcttaaagaatatatctaatattattaatttcccttcacatgtatactgatttgatatattacaggtggtctcttattgcgggacgattacctgggcgaa

SEQ ID NO: 24722 - DNA, 688 bp, Glycine max; identical to SEQ ID NO: 17633
  Intron number 2 from transcript Glyma12g30800.2 (locus Gly ma12g30800) derived from phytozome v7.0 (chr-ID Gm12; pos 34424519 to 34425206 reverse strand)

SEQ ID NO: 24723 - DNA, 950 bp, Glycine max
  Intron number 2 from transcript Glyma09g39400.1 (locus Gly ma09g39400) derived from phytozome v7.0 (chr-ID Gm09; pos 44503011 to 44503960 reverse strand)
gccacggccaaccccagtatcttgataaactgcaggtactctttgttgctggaaatttcaattttttcatctgggtatgctttttagcaatgttaggtgaagtgggtattgtccaaaaaaaataattgagaaagtgtttggttagctatatgaggtagaaataaacagtcggttggttgaagagatggaaaaataaacaatttatgcactgaaaatgtaagatgtcattcaatcacaatgtaataacccaatcgtgtagctcagttggcaatacatgctgagtttgtgggggatcgaacctccccgccgaatacactcttgtagagaggcgaggaactttaagtgtgacctagaccgaggattagtcccatagtcaacccaaaggattgaagcttgtggggatacctcggagtcccaccggggaaccaaaggccctaattacagtggttgaaccaaaaaaatcacaatgtaaaatgtcattaaatcacactgccatgattaactaccttagtgtgaaactgctttaattttaatacactgatagtgtaaataaaatgtactgattggttgaaagtgtgaaactgcttggttaaaagtttacattgaccaatggcgattaaactcaaaaaaataatttaattttaatacactgatagtgtaaataaaatgttttttacaccttcattaagtagttgatttctgagtttggtatagttgttaacggttaattactctgaaacctatatatgataatttcagattgattgatattgtaaaaaatatttacactgacaatttatgtaaactgaactaaagaaaattaaaattttagtggaatgcattatatttcttgttttttattattatatgtttttgtcatgtgttgcttagttagtgaagtttataatgtcttaggtggagagagaaagaggaatcacagttaaagccca

SEQ ID NO: 24724 - DNA, 1008 bp, Glycine max
  Intron number 1 from transcript Glyma10g41000.1 (locus Gly ma10g41000) derived from phytozome v7.0 (chr-ID Gm10; pos 48206773 to 48207780 reverse strand)
ataagcttctgcacttccttctgattccacttttggtaatataagcccctcctcttcttctcagatctgaaactacttgttttaactttttctttcttcgcattgaatgatttttacgtttcttaaacatgattgcacgactccttttccgaattccaatctacgctaaattgtttggttttttatgttctattttatttgtttaattgtttactttagttggaaattgaaaatcacgaggttcaattgacggaaatcattctcctgaaatgcttttagatagatgtttagttagggacatgactgaatcgttgagaagtgttgtatgtgcttccatgggtttccggggtagttttttttatgctgattcctcgtgcaagtgaagtggatttgattttcgccatttctgcttccagtataaggggataggcatttatgaagaaatggcatgtgatattgctattgtttttttgtcatttaaatgttacaaaatacccccccccccccacacacacacacacacacacacctaatcattccgaaattttatagaagctgagatgtaatatctattgtgaatctgtgatacaacggttttcaaattgtaaatttgtaatggctgacctgctttaatcttttaaggagttactacattttcctctagttaggcgaaatgaatctgtgtggtcatggataaaaagactgccagctaaagtgaaaggcaaattcaaagatagaagagactacgagagattctcacataataagacacattttagtcacaatcacaaatgtacataccagtagtatgtattatgtaaacacattttctttcttccacccagtagtatattgtcatgactgatattattgttgagaatacaagaatgattaaatgaataggaaaaatataaagaagtattatttgaatgttttgtcatgtgttctattaaaattgtttctgtatgtgcagcttcaactgggaagatactgtagggcctgggccac

SEQ ID NO: 24725 - DNA, 606 bp, Glycine max
  Intron number 1 from transcript Glyma10g29910.1 (locus Gly ma10g29910) derived from phytozome v7.0 (chr-ID Gm10; pos 38658346 to 38658951 reverse strand)
ctgggagtaacgagcttaaccccaacgattctaaggtgaacgcactctctgcatcgtactttttgattcaaatatgtttttttttatacaactttgtattgttgaaccgtacgatgtttcgtgattgcaatctttcttctttcggttctgattgattctcttttctcttctgttctgtttttttttgtatactatattacatgactttttgtgtgattttttttttgtttttttgtttaaatatcttttaggtagtataactgaaatgaaacgaaaatcactcttgtattggtgattcttcgtcatcgttttgggatttgagtttggatatgttttggtttcattgaagagttggttaagctttgttctgttggtgtaatggttttcaattttggttggatcaatttctggttctacctaacacggtttcactgtttagggtttgttacttaatgtgctggttttggcagtttgattcatcagtttcccccaaactatggggtttgtttggatttattctctgtttctaattttcctcagtttttatttttcttcttcttattatcctctatttttcatttaaaaatgaaatgaaatttggtgtag

SEQ ID NO: 24726 - DNA, 996 bp, Glycine max
  Intron number 2 from transcript Glyma10g30190.3 (locus Gly ma10g30190) derived from phytozome v7.0 (chr-ID Gm10; pos 38889387 to 38890382 reverse strand)
ggatagatttatccctgtggaccaggagggaccacgtaaagaaacctgatattacactttaatcaaaaatcttaagactcaaatttataagtcttcttcttacttatatggtgttcaatcttttcacttctattcgatgcgggaaaaattgacttacattatgtatgaaatatcaagtttaatttattgttttatgtattgtgatgacggaattttcgtaggctagtttttggtgttttgtctacaaagtcgtacaaggagccaccgactctataaaaatttccacatttattgttttaaataatattgcgatgactttcacctcacacttgatgcgcaggccagatcttgagctcttgcatctctttacttgttttttgtttgtgtttgcttctattttcaagtgaaaacctttttactatcagtcacttgctattttccttgtcctctttttcgtccaatcctaataccatcatggaggatgctgctacttctaatggtaaattttttcataattctcgcttttgcatctagtaaaaaactgttcctcttcaattgttgtctatgcaatgtaatatttgtcaattcgtcactcacttgaggcaaaagagatcgtgctttgactatggatgaaaaaccagattgaatgtttacattaacgacgtataaataattgaacaaattccaaacgcaaaataccatctaattttttgaatccaaattccaagtgcatatttttgcttcaaaatttgatcctaagtctcgttatttttaaattatacaccaattccaatttgctcttgtagctcactgaatagaatatctgaaccgaagattatttgttttccaaattcgttttcttccttgccctttttgtagttatccaccatagaatccgttttccttattgaacatgttcttctgtagattaccttatttgtgttattttctcttgttataccagctgcagaggatagagaaaacaagttcctaact

SEQ ID NO: 24727 - DNA, 748 bp, Glycine max
  Intron number 3 from transcript Glyma11g36580.1 (locus Gly ma11g36580) derived from phytozome v7.0 (chr-ID Gm11; pos 38006082 to 38006829)
tggttggtaagttcagcttgctttcattgttatcacatggtgtccaatttcagccacccgtcagcctcactttaccatatgttcttcagtttcctttgatgtcattataactttgcaatggcattgtgtaaatccttcaatctgccattgggagtccactgtggtgcaacatctatgaatacagctattgcagtctcaatgggcttcacatttttgtgaccggaatgtgggactacacatttatgtctttgagcaattgaagtttcagttaatattaatgccaaaatagctgttgattcatatttgcatacagcttaatttttatgcatatatatttgagattttatttgcccgcaatgctatctgctatagaggaatatcgtcccccattccgccattgatttgtgatgcacccctagatttttgtttgctgttggaatttgtgtgcaaaatatcattttctgtctggccattccacctgtgaatacttttcttaaaatcacagcaagcatagtatttgtatctcattgctaaatagctataattttgttttgtgctggtgtattcaatggaaaatttcttggtttcattattgacaaaactggaataaacataaacatgtggctgatgagatttcatgcctgcattaataaatgactgcctggtcctatttttggttctggcatacttatacttgtgggtctgttacacagcaaaagttataactgacagagactctggaagatca

SEQ ID NO: 24728 - DNA, 596 bp, Glycine max
  Intron number 1 from transcript Glyma09g35330.1 (locus Gly ma09g35330) derived from phytozome v7.0 (chr-ID Gm09; pos 41523420 to 41524015 reverse strand)
gcattgtacaagtacaaccactgaaatttaagtttccagcagcttgcaaatgtgcaaatatttatttatcaacaatgaaagcatataaaggtgtgagaaactgaaaatgtgagatgtctggtgcatcttgaacatttaaaacagggcattaaatagcttaaattataattaggttttttgctgtacatgcaattctcttccatcttcaagcaataactgtatcggccactcttctttaaagtgggccatttactacttaaaaatcttcagcaattaagtattgataaagacatataagacaacaccacatggttcatgatcccttgtttgtcactagacccaaatagcacaataacctttcaatttggtaagcaaggtgatccatacaagcaccatatatatatatatatacccctcattccactatcaactatgccatagagctagcatcaaacacttgtttgtcatacaagttcttcaagatcattctatagttgtgttgtgtgtgtgaagtaacaaacaaaaaacaaaaaccatgggttttcgtttgcttggtgttagaagagctagacaagcattgtcaattaagggtgcag

SEQ ID NO: 24729 - DNA, 680 bp, Glycine max
  Intron number 1 from transcript Glyma12g02270.1 (locus Gly ma12g02270) derived from phytozome v7.0 (chr-ID Gm12; pos 1416222 to 1416901 reverse strand)
gctccaagcaagctcaattcctcggtaattatattcccatcttccatattttgatcatctccttcttaatttcagcttaaatttgatcttaattgttggttggttggttgggttcatgtgttttttttattgctagggttttttctttaccaaaaggctttgttcattaggatggtcacttcatgtcccattttgaggtttggatttgtgctcctggaatttgggagtttgggaacagtttacttcactgttgcaattgaccacagttattcatactagtaaaattcaacccgaagagaaaaatgaggatgcccaaaaatgacttacagttaaagttgaccttgattccctcattagttgtaggatcaacatccagtaggattgcttgtatgaacaaaatttctgaattgttaggtgggattgattgtaaaccactatacttcatctcagtttgttctaccttcgtatctctttgacatagagccatagaggatatatctgctaaaatgaatatctattagtcattcatatgttcatccaatcatgcttttaaaacaaaggacaaacaaagtcccaatgtatccactgcttcacagggcagcagtttcacatatatcagtatcagtgataagtgtatttcttgttgtctgatttcctttattcaacagggaaatactagt

SEQ ID NO: 24730 - DNA, 577 bp, Glycine max
  Intron number 3 from transcript Glyma11g33320.1 (locus Gly ma11g33320) derived from phytozome v7.0 (chr-ID Gm11; pos 35109001 to 35109577)
caagcataagttgttgcaccacgactcctctaaatgttagtaccttctaatctatttattattattcatagactatgtttggcaaaactagccaaaaaactacttggaggttggaaagtggaagctgaaaaactagcttattaaaacataaatgttcggtagaactagctcttgaattagcttaaaaatgtaaaatgacagaaagataataaaaccatgatttattcaaaaagggtaattaggaaatttgataaatatattaatgataaaaatgaaagaaaatataagaaactagaagttagcattttaaaaatgctacttcaagaaacgttttaaaaaatgttatttcaactcttcaagtaacgtttcaaaatatggtaaaagctactaaaaaaaacttgtttactgaaccatcaaataggcttgtttgctagtataaaaagctagaaattagctgaaatgccttgttgaacattgtcatagtaaaaaaaaattgtgatcataatcataatgatataaatatattgaagttcatttgaatgaccgtctaatatgtgagagatttatttacttttag

SEQ ID NO: 24731 - DNA, 659 bp, Glycine max
  Intron number 2 from transcript Glyma09g25810.1 (locus Gly ma09g25810) derived from phytozome v7.0 (chr-ID Gm09; pos 32042864 to 32043522)
ttcgtgccttctattcccctccccaactagtttcttgtctctctcacatcatcacatgattacacatctttaaaaatatgggcttcatcaaagttttttctttcaattcatattccatattatttaatatcatcagattacaaacaccaaatataattcctcacataacatatgttgagacaggtgacaattcagaatgtggaaggggttcatgcagatcaaaggtgaaaaagaaccatgcagccagttaatttaatctctacaaatttccttttgtttcttgattttacttctctcctttttacttacctgttgcagtagtttcagaaatggggaagataatggaaatggaagctcaagacacctacttagcatttgcagtgcagatgaaggttcacataatgttgataaagtaaggtttcacatgatacagtggctttatacagctagcaatttctattgcacagagttgaaattttccttaacagaaccttcttatgaggataaattaagaaaataaataatctattttatgaaatttcagtaactattaatattttaaaggatgagaacctgatcaagaccagcatctaatggcgtcacttctgtggcaacttcatgcaggattttccccagctattaccacccttgagacaaaa

SEQ ID NO: 24732 - DNA, 537 bp, Glycine max
  Intron number 1 from transcript Glyma10g36040.1 (locus Gly ma10g36040) derived from phytozome v7.0 (chr-ID Gm10; pos 44224931 to 44225467 reverse strand)
catcacttgccacgcttggagccccgatcaatccagtaattactttctcctattttttttttctgtttggattccgagaaaattgttactgtttccagagagaatagaataggcctttcgattcttcttttttcttttacgaattttaggaaatttgattcgacggtggtttcaatttttttatttcttccgttccttgatggattgtggaagttgctcgcttttgtagatgcgattttgattggatctaattttttgtttccttctatgcgttttaagtttttcacttgtaatcgagcgaagctgtggcgaagttggcaatctctatgtgttattgctttgaattatgaatcgtttggattcctaaaattcggaaaattgttgatgctggtgtgtttaatcgtctattaaagatttgtaacttgtttgattgttttgataatcagtttgagtaatttcgtttctgttttgaatctgatttgaatttcgtctaggaaatattgtaatatatttatctccttctgtagtggttgcttt

SEQ ID NO: 24733 - DNA, 678 bp, Glycine max
  Intron number 2 from transcript Glyma10g06070.1 (locus Gly ma10g06070) derived from phytozome v7.0 (chr-ID Gm10; pos 4802451 to 4803128)
tttacaggagcttcaagtggtatgtgttctttcttttcaactttcactttctaccttgcaatgtgaattcaaagaaagatttagtgtctgtttaatttcaattttcaaaaactttttttgttttaaacaacaacaataaagaaatcatatactcacaccaagctagacgattcacacccttgagtggttgagcctaggcgccgaggaccacaaaacagaagaggatcagggaacatcttctagctgtttctgtttattggttttggaaacaattttttcaaaagtttgaatagattttggatgagaagttgattgttgagtagcatggaattattttagaaaacaatttttaaaaccaacaagtgagaagaaaatcaaacatgtctttagcttcaagttttgtgttatgatttggttggtagtgcttcacagttcacaccttagccttcttaatttgagtaggtagtaacagctaacaggtttatgatatatctgcaccaagataatagagtcggcactcaatgaaacagacttgtaaaaatcaatatttatttttccaaccaataaagtaacaaatgttccttcctttttttttatatctttcctgcaatgaccgtataatcgtgtgtgtgtgtgtgtgtgtgtggcagtttcaggagtcctctcagaaggggcagg

SEQ ID NO: 24734 - DNA, 672 bp, Glycine max
  Intron number 3 from transcript Glyma11g06260.1 (locus Gly ma11g06260) derived from phytozome v7.0 (chr-ID Gm11; pos 4447387 to 4448058 reverse strand)
tgctaagaagatctgttgggaccctcaagtcaaaggtaactctcttccctctcttctcattcatccgcataagactttgtttgaattggtagattacatggctttaaattgcggtcacggttgctgtggtgaaccagaaaacctttatactgcagctgatgcggccatatttgtggtcgctgtgtggttgcatagattcaaaataccttgacgttgttgtcgcaattgcggttgtggaccgctatttaaaaccatctggaaggtttaattgctcatctaggtgcataatctttacgctttagtctctacactagtcgttttagtctttacatatatactttttaactcagttttagttcctacacatgtactttttaatccattttagttacggtaaagaccaaaatagactaacgagtaatttctaaatgtagaaactaaaacataaagattgtacaagtatagcaaccaaacgagtaattaattatcttgatcatcttatgaggtgttattgatctaaattattactctcctggtgaaatcactagctcgtgtagtgagtgatgatgtatggcatgcattgtggaattgtatctcaaattctcgttggtttagaaagctgttttgttttgaataggaaagtttgagggaaacatcttctttgtcaccgtc

SEQ ID NO: 24735 - DNA, 616 bp, Glycine max
  Intron number 1 from transcript Glyma11g11870.1 (locus Gly ma11g11870) derived from phytozome v7.0 (chr-ID Gm11; pos 8474583 to 8475198 reverse strand)
agctcgttaagaccgcggtatgataataataataaacaacttcctattctctcgcataaactaaaattaacttatgcacttaacttttatatatcagcctttctcatttaacttcttcaaaagttaacaagaagcataagttcattttagcttatagagaaactgaatatgttcaatttagcttctcaagtactaatggaaaagtttttaagattcaaatattaaaagcatcttgtaacaaaacttaattgaactattcatttcacacccataatccattttcttcgcgctgctgagttatttttgttttcacactggctttgtaggaatttagtggataaagtgtagttataattgtcacaattgagattatgattaaatacatgcataagtatagtgattatgaaaattttctaaccagcaattatacacactttatttgctgaagtatgtttctctttatctaagaagccaaataaatctttgcagctgtccttgtttgtcccctaagtaatggttttcacattgttgatgcaataatattttgctgtgtgttttcttgcttgtttgtgtggaaacagaaaacagtggcttcaccagggaggggtattttggc

SEQ ID NO: 24736 - DNA, 816 bp, Glycine max
  Intron number 1 from transcript Glyma10g38820.2 (locus Gly ma10g38820) derived from phytozome v7.0 (chr-ID Gm10; pos 46598338 to 46599153)
tcgtggctcgttttcgctctcaagctttctctctggttcgtctctctcattcgaattctttttctctctagttcgaatttctcgctcggactctctttttctctggttcgtctctctttcctattgtttgattagggtttgatttaggtctaattcacgatgttcctcttgttatagaaaatctaagcgattgagtttttgaatttgttggcttatgtgcagggccagccttgaacacctgtgtgttagatttcacccctctgtgtgtttagttaatttggggatttgtatagatttctgcaacaatgattattcatgctcatcatgatctaaaataatattcgctcgaatggaattgtaaatatttatgtcttcttccctgtgttgatgcattttacatggctttataaattataaacaatatcttttcttttttgttagatatctgaatctgatacacagcacaatattgtgaactttatgacttgattaaattttatgaataaactccttacaattttgtagaaaaaattatctgtaggctgtcatattatcatatatgtctaacattatgctgatatatcaatctagatcatatataactttcattatgcagattaatggagtaagataaaatagttctggatttccttcatcagtggtgattttgctttgagatgtcatttttgagcataacacaattatgctagaaagtggcaggcttttctttttcttttattttcttcttttgctttgcttatacatttctcatattttgcaggttgaagctgaagagtaacctgagatatccaagga

SEQ ID NO: 24737 - DNA, 632 bp, Glycine max
  Intron number 1 from transcript Glyma12g13430.1 (locus Gly ma12g13430) derived from phytozome v7.0 (chr-ID Gm12; pos 11887960 to 11888591 reverse strand)
ctcaagggaagagaaaagtcaaggtagctagatagtttgtattttgaacttgtaagtgttttttttttcttttctctttcctaattagggaattagtttcagtgaagctagcaatggttcatgtcatgagacatgagtcatgtgccactgagctaactcttaaggttctgtcactgtctcaattatgagtcttgacaaggttccttggtgtcaaaagaacactcacgggtaccctaggctgtagagagagagaaattgaaagaaaaaaaaaatagcagaagaatagtagtactagtgttaattagcaaaagaaagaaacttagatttaattctataaggtgcttttgaaattattttcccatcagaattagtattttatctggataatctgcactgaatcttgatgcaaatttttatacatagattattattaaaataaaacttcaattcaaattaaaaaaaaataatgaaagtactaaaaataacttgcatctaagttttgtcaaataaaaataacttgatctgaagtatagtcatggggtatagtattttatgtgagtacgtatttatgcttctttttctgggttgtgtgtgtaggtggattggaccccagaattgcacaggcgattcgt

SEQ ID NO: 24738 - DNA, 981 bp, Glycine max
  Intron number 3 from transcript Glyma11g35650.1 (locus Gly ma11g35650) derived from phytozome v7.0 (chr-ID Gm11; pos 37284878 to 37285858)
cgcgaactctggagagattaggggcctgtgattatgtgagtactttattttgggatatcttttataattagtgcttcctttcatattgtttgttatcatatgatactatgatttaggtttccatcatccgatcatagttcttttatgtccttgtgtagtatgtatttttataatttgttaactttgaaattgaaaatcactgacaattgttggaaatctgggaaatgttgaatttaaaacagcaaggaatgtgattgaatttgttggattttccttttcatctatcttgtagaaacttcataatattatcaaatgatattatggtccacattccattagtgtggtatatcctctgatattggctttcttttatttactattatcatgttagtttatcttgctggcatcctatctttgtctctctttttctgtgaattaatttaccagttgaaagagttatataatttttttttcttatttttccttttccagctattttcttcaactaccatgtccctcaatgatgtgaagacatttattgttctttactcatgtccctgtattcttgtcgatttgagttttaattgtgaaattaaaagctcaaagacaaaatgttttttttcaagctatagatgttgcatatacatggcaggaaagttgatagatttcacaaaattgcagcacagatctaagctagcaagctctcggctctaataaacgagataatgagtctttttcttatgtcttcaattcttttttgttcaaaatggagaaaacttgacagaaattcaatctcttattcccctgcattgatatatatatctaatggaacctgaaaatacgaatggtggcaaggcaaaagttgaaaacaaagggcaatatgaaggtgatatgtctttttaaacaaaagaaaactattatttactgttgtaattttctcaagcaggttacagagctaaagcacccatctggctgtgccat

SEQ ID NO: 24739 - DNA, 587 bp, Glycine max
  Intron number 2 from transcript Glyma09g32540.1 (locus Gly ma09g32540) derived from phytozome v7.0 (chr-ID Gm09; pos 39064508 to 39065094 reverse strand)
agggaagggtgtggacgaaataatctgtatcagtggtgagactctaaacacatcataatttccccctccatgtgtgcatggctgtatacttgttggttattgatttgggatgtcagcataagaagatgaagggggtgtacttgttggttaatttgacttgggatggtcgattgttcaatcaattgataatgatggtggccaagtgatgtatactgtagtattgttgacttgtgtttgaaaattcttctcaattgttgcatgatttaatctaaatttccaaggtacttgccttgaaattcaccatcctttttctacttgttgagcctccgggttttttctggacatggattcctaatagcctgttgttgcttgattgtttatttaattattggctattgattgttgatttgcttttatcatgggtataattctatatggattgaactggccttttgtgtggtgtggtgagaaaccatactcatactatgacctacaaaagaaactactcatggtgctagtaatagaagtcttgaagatagatcgtttgttaaatggctaatctgaaattgcctctgattttgtagtga

SEQ ID NO: 24740 - DNA, 826 bp, Glycine max
  Intron number 1 from transcript Glyma12g33940.1 (locus Gly ma12g33940) derived from phytozome v7.0 (chr-ID Gm12; pos 37129064 to 37129889)
tacttcgattgttcttccacgactgtttcgtgaacgtaagactgcagttccttaagccacttctatttctaaatctgtatgtttataattacatgtaaggagtgtatcatgtgagagagtgaacaaattaagctaacttttcactactcaaagttataagagaataattaagattaaatttaaaccaaattaatagtatagttattcagtatgttttatgtatttatggttaagattagttcttctaacactcacttgatacatttataaaaaagaatcactcacttgatatacgtacattgtatatgcctatatggctgcttaaagcaaaaaattacacgttttagctaggtttaagtttatggcttttgaaggagccaaaaaatactatagtactgtaactacttgaataagccatcgaatgaaaatatttgtcttttatttattttttttctctaagaaaaagcacatggatattatcatattttctaacactaactatttaatacagtatttttgttttgcatacacattttttctcagatctagaggaaatatacacgcatgatgaatcatttgtataagatttttttttattctgatttttttaagaataggacgcctcccgatgtaagaattaaattgatgcaaatcttaccaaaggaattgaaagaaagtaaaataaatggtatgaaagtatcatttattttctaaaaataaatttcattggcaagaattaatttagttatatagctcttgacttatggagatagataacattaacatcttgattttatttctttgtaattaaattatcagggctgcg

SEQ ID NO: 24741 - DNA, 819 bp, Glycine max
  Intron number 1 from transcript Glyma09g00510.1 (locus Gly ma09g00510) derived from phytozome v7.0 (chr-ID Gm09; pos 240914 to 241732)
ggttctggtcagtttattttacttccactgttttctcttattcctcattgtggtttctaacacatattaactttatttcttccgcaaacgtttggaaataaaatcaataaatatgcatatagttgagtgtgttagggatgtgggtgccaacatagctgggatgtaactcccttttaacgactcctcctagtcttttcaaaaaaaaaaaaactgtttcttccgcaagctattgactatttataagcgcaggaagaaatagctgttggagggaacttctgtttctttaagggagactaaaatttgaatgttgaagttcattaaatgttggaaaatattgagcggtaatctattttgtattgagctttttgttctctgaccatgtaacagcgaaagtttccaatcctatgactgatgcactactgactttttctaaacacgcatcttgtctgcttcttcttttgtgtcagttatgttaaaatcaatcctgttctttaatcagaaatattcatatattattgatatgcttgcatgtttttaattatctcaatttggttctgtaccaatttgatgcatatgactggactatactaagttgaaataaaaagtgtaacaaaaaaattgataaaattagactaaatggctaaactgagaaaatgcatatattttaaggaatggtatttttctataaatttgttgaagcgtgtatgcccttggccatgctgtcctagttggttacttttatgccttttcctttctctaaaaaatctttatgacggtgatgcagggtttgtaattctcggtagaaagattcttacaaat

SEQ ID NO: 24742 - DNA, 563 bp, Glycine max
  Intron number 1 from transcript Glyma10g41770.1 (locus Gly ma10g41770) derived from phytozome v7.0 (chr-ID Gm10; pos 48786268 to 48786830)
ttttgcgcgtggtgtacacccagacattctcgctggtaattcagctactttgtttttttatgctaggaatttgcgttctatcatctatgttttgcctactttgaatccgctacaagtttctccttttttatttttgaaaaaaaaaatgtacttgaagctcattgttcttcaagctcaattgaggccaaggttttaaaaaactttctgccagcgtggtttcagcttcaattgtggtcacattcgtctgtaatttccgtctcaattttccgcaatgtgactgcaattatggttgtatttgtctgcaatttccgccgcaattttctgcaataccaaggaatgcgacgaaaccacgactgcgattgcaatttaaaaccttgatagttgccaaaagtgggtcaaacaaattgcataatgcattgtgatttgtgaaaactaaaaagttgcttctgcactttgttggatttacatgttttatttggttgttattggagatgaatagttaattgctgatctttgtgatgaatgcagatctagttgggataaagtgtctctttatattgcca

SEQ ID NO: 24743 - DNA, 664 bp, Glycine max
  Intron number 2 from transcript Glyma09g39130.1 (locus Gly ma09g39130) derived from phytozome v7.0 (chr-ID Gm09; pos 44285118 to 44285781)
gaagagttctcctacaccaacaaacaccaggttttttaccaaattttgtaacttttgtttaatgttttttctaacattgtttggctgtgaaagtttgaatctttgttggttttgggttggtggggttctgggagtttggtatcatgtggcgggggaaatgtgatgggtgtgtgttaagctgctttggatttatggggttttaatgtgaattttgttgttgttttattttattttttatggtttgggttgatggggttttgctactttggtttcacatagtgggacaattgagatgaagcatgataagttgatttggtttcatgaggtttcacagtaaaatttcagttttttgggggtttgattaggggggagggggattaatggtgtgtttggaacggtgggaagattagggaggagataaaagttgaaatttcaattgaagagaaaatggaagtgaagaaaattttgaattgttgtttctatgagttgttatccgtgttttctttcctatcttccaaacataccataagttttggtgtcaaatagtgttgaagaagaaatgggggcatgatcatttggtttgccttcaatttttgcaatgttgggttttatcttttccttcatttcaggtgcctaaaattgagaagattgtggtgaactgtgg

SEQ ID NO: 24744 - DNA, 831 bp, Glycine max
  Intron number 1 from transcript Glyma08g42650.1 (locus Gly ma08g42650) derived from phytozome v7.0 (chr-ID Gm08; pos 42630976 to 42631806)
gctctcagctcgaagatttcgctcgcaaacacaaggtgaattcgttttttttcttttatcgatgcagcacatgatagttactagttttaattggtttgctagtttctgaataatagtaatatttgtctgatttatcatcagtttctttgtaatttgtgtgtcaaattgtctcattcttctgctgttccgttttttttattatttttatgttggggtgttggaaaaattcaactgggttttatgaacttgatgcttttagtgggaaaggagttttttttttttttggttttttgggacttgggcttggctgattttgagtgaaagtaataaaggacgaaactttaatgtagttggttctattcttcaattaggaaaagagttttattacctcagtaagctatgctgacgtttaatacaaacatttattacgcggattactgaggtgaaactaattttgataagagaataagaccaaaagcacttaacgaattgctttaagttttgccaatattcgttaatgaaagttgagaaatgctagcaatgtatgaaatggaaataggatgatatgggaatagggtgagtttgaaatattttagctatgttgctgattgctgacttagcatgtcagtggagttctgttcaggggcatatgcttgactaatttgatagccttgaaacttcagagtagtgtttggctaacaagtaacaacacacattgttcatggtttctggtgttggccttataatgaaatcccactttagttatcactttttttttggcaattcatgattaaattaaaagattctaacagttgatattgcctgttcaga

SEQ ID NO: 24745 - DNA, 691 bp, Glycine max
  Intron number 2 from transcript Glyma12g13060.1 (locus Gly ma12g13060) derived from phytozome v7.0 (chr-ID Gm12; pos 11431733 to 11432423 reverse strand)
gctgacataccacctcttcctttgccttagtcctggtaagttttctgttgttcacacctaacttatatggatttatataatcatcttgttttgtgatttctttgattttttatcgtataatttatgtatttatggcatttgatatatgtgttgaatttttttccttgtgaatctaggttgaatgtagaatttatttatgtttacttgattttcgattttgctaaattgaatatgatattcatttctatgtttggattggtgaaaagtgatggaatcaagtggatgctttcttgtattgatagctcatgacgcttgaatgcaaatctactcaataaattgcaacctttggtaccattaactacatcttactaactgcttccaagtgatagtgggaattgtttgccgtaactaaattttcatggaaactaagttcttgtttgtgcaattttgatatatggcaagtgccacatatgatggtcaaattcttttctgtggcccacttatgagtttcttgtggttatttattgaagtttatgataatagctaatggtttaccaagttactctagtattgggtgtgctgatgccacatcatgcttaattgcttaattgcttattgttattgttattgtcttttggacctgttttggactcataagtcagttctactcctacagtcttgcttgttgaaa

SEQ ID NO: 24746 - DNA, 718 bp, Glycine max
  Intron number 1 from transcript Glyma09g24660.1 (locus Gly ma09g24660) derived from phytozome v7.0 (chr-ID Gm09; pos 30455128 to 30455845)
gtatgctcaatatctgatctcttagttatatcatgtttatttgttatttcaactaatgttgtgtagttttacgaatttatcgttttgctctttgttgtcgttgctgagggacagatcttgcaatgtctcattttataattacttgtctgagggggcaaggttttgtactgttctcaaattgtcaatatgattttccttgtctaagcatcacgtgtatgtttttgcatgtaaggggaaattcaatcagatgtaaaaaatctgtagatgaaagaagaaaatctatttaactagaaaaattattacaaaaagggactgaaaatatcctccttaaaatacagcagcaaaatagccatcccatcccatagatataaattcaaattttggaattcttagaattcacttaactaatatgtaggtagtacctaaaattggttgtttggattttgatattttgcatgtcagtgtattctagcacttattttatgtatggctgaatgcaggatcccaatgatgataggggtgaaagtagactctatattggtaaccttgatcttagaattacagagtgaggcttgctaactaaccaccaagactttgtttttgttttgtgctgaatgcacatagtgacatattctctccttttcttctcaatatattccagagctgctttgcttaaaatgttttctccctatggaaagataatttctgaggacttctt

SEQ ID NO: 24747 - DNA, 819 bp, Glycine max
  Intron number 2 from transcript Glyma09g29460.1 (locus Gly ma09g29460) derived from phytozome v7.0 (chr-ID Gm09; pos 36343186 to 36344004)
tctgcatcactgagggcattccccagcacgatgcaagtcgttttggaatcctgaattcgtaattcgaaatgtgtggaatgcgcattgctgttttaggtttctcgttttttgtggttttaattgcgttttggtatgaagtctgtatgaatatttgggtaatgcttagattatatgatggctaatggatgcctttgatattgtttaattgtttttgagaggggaaatgtatttggctcctcttaatggagggaagggtatagtaattccaacacattttaatttgaattacatgtgtggctactattgacagttgaattttaaatcaatgattgcctggtttggataaacttctctataaacacttgtagaagaagtaaataaaaatgaaaaatgaaatgaacttctcccataagttaaaattagcttatgcataagctaatttgtagaagttctttcgttttagcttattcaaaagcttattttgtctcatgcataagctaagctaatttcagcttataggagaagctttttctaaaaaaagactctgataagtgcttatgaagaagtttatccaaacagggttgagattacttacttcaccctttaaagtgagttacttactttagagaagccagatccaacaatgtgctaatgttaaatgtcttgtgtagtggaaccttttgtttgagcttgggaatgtagcaatataagtctggtgtgtagtttactttggggtctgtgctgctgatttgaacggccgaagttgatattttttctatttcaggttcgggttaaagcagcccttaacaggcagtccaa

SEQ ID NO: 24748 - DNA, 647 bp, Glycine max
  Intron number 1 from transcript Glyma11g04390.7 (locus Gly ma11g04390) derived from phytozome v7.0 (chr-ID Gm11; pos 2982054 to 2982700)
gcagctgggattcgttttcgaatttcaaatacgttgttttcttcttcgtcctattatcatgtatgtttgtaccaaaaaaatatcatgtattacgtatgttcgttctatgtatgttgccaccacccatcatttagaattcagaaatctctttagcgttagttaaatatcgcactcgtatcaattctttccaactccccaagagcatagattatgctccttccatatttgatggatgcatcatgcatcaataccccctccctctttgttttaaagcaaaattgttggttttttatttttattttctggttgagatcaaagtcatgtagaacaagggaagagatgaggttggattttgcacccaaaaggtttatgatatgtctaattctttgtccttattttcacatttctgtcttcttctttaactagtaaccatgtggtttaaaattggatccttgctatcctcattctttcaaatattgtctatgttttaagtcaaaagggctgggggcatgtcaaatatataaaccattcagatagctttggaatagttagttcggacatggtctgtgatagaaagtttagtatactcgcaaattctaattattaaccaaacttttctctcatttccttcatgttgtgccagcagc

SEQ ID NO: 24749 - DNA, 756 bp, Glycine max
  Intron number 3 from transcript Glyma09g09440.1 (locus Gly ma09g09440) derived from phytozome v7.0 (chr-ID Gm09; pos 9293389 to 9294144 reverse strand)
cagaagtcactgctataagaaaggttagatgattattaatttgaagccaaataatttccttaaatggcattaaaatgcatattttcttgtctgtattaacatttatgcttttctgacgcagcagttgaatgtttatgtgcaaattgcaattctttattcttgtactgttatgaggtgtaatgtgctatgcaaagatttccatggcttttataatattttcatttgagaggttaatggttaagaatttgtcagcatagaactgaaatgacttcaaattaaattaccattttcaacatagcggagatactccataattgattttcagctgtaatctctgatatttgtttaacataatttgtctctgtttattattttgtttcagtgaatactagctggtaattaacttggctagcaatcttaatttttgttgttcattttattatatattctgttgtagggtagcaattctatacataattcaggttattggtatcatttgaaattttaatatctagtctttgtgaagagttcactaccagaatttattaatttcttgccttacttttctgagctatggttccagtcaaactttataacatcttaaattacatgacaatagaactagctaattataaagtactctgtattttctttttcaactttatgagtagcaaacataatgtaggcaattaacaggatttttattataaatgcaatgatttaatttttaggcttgtgaaaagctaaacaagatag

SEQ ID NO: 24750 - DNA, 768 bp, Glycine max
  Intron number 1 from transcript Glyma09g09440.1 (locus Gly ma09g09440) derived from phytozome v7.0 (chr-ID Gm09; pos 9294280 to 9295047 reverse strand)
ttcagtagcttctgcatttgctggccatcagggtaatgatactaattaaactatttagttatttagctttcatgttggctgctgtattcttagtttgttaaggtctataaacttttttataaacacttttataagaagaaaattaaaaaaataaaatgaataaaatttcttgtttttttgaaggaaaatgaaataaatttccgttatatgttaaaattaaaatgctttcaggaactagtaaatgattactatatatattttttgttgttgccttttgatctctggttttagtaacgtatttgtcaatatttttcttgttataacatgattttttttctgaatatttttgcattaattcttatgagttaatataatgaaagacccatggttgatgcataaaaaatctttattgttttttgtctcgacaagcgaactggttacatagcaaatatttattttttcataagtattttttcccttaaggctgggattaataattcaacttttatagaagctttctaccattcccatctattttttcttttcttgaaactgatatgtaaaattgattttaactgatggaagaagtttggtttatttgattttttatagaaatacttatgaaaaatagtttatccacacaaggttaagtaccttgaggttcccacttgagacttctcaatttataatttgtgttgtctcttaatgagattttgttgttgcattggctaactagctatacagaatagagaccacaaatttttaaga

SEQ ID NO: 24751 - DNA, 1017 bp, Glycine max
  Intron number 1 from transcript Glyma09g34110.1 (locus Gly ma09g34110) derived from phytozome v7.0 (chr-ID Gm09; pos 40538481 to 40539497)
ttcacgcaccttcctcaacgcgaagaacgagcaaggttcacttcacttctctctctctctctcttcgctatcttcgcacctcgcttctctcgtatctttatcgtgaacctcttcaattttttttccttacgaaatttgctcactgaggcttggctcgatttttttatttttaattgtgtttgtttaaaagtcgaatggaaatgaatcaagaaagcgttagtttagatgcttactcaaggagaccgtgagtttatatatatatatatatatatatatatatatatatatatatatatatatatattatttatcgtttttgtgtttttaggtagagattggagtttgtttcggttgatgctggttgttggaaataaataccgttaaattggtggcataattaatatattctctctctctttttttcttcttctaatatactactgttcggttaggtgacgagcaagcgaacgattcgattattttactatttatttatttttcttttttttttatatgcggctggggttttgagccttgtcctatgtgatgtttgtagagatttaagaaaggatagagtgaaaaattgttgatagttcgtgatagtattggcaattttgtcatgaggaaaatttatatgatttgattgacagaatatggagtttgaggtgaagattccgactgaggtttgacatttagaaagttctgatttatagagttgaacattgggaaaatgttatcatcagccagttataaataccaagggtatcagtttacctgactatttattttccgaagataaaattactctgctccttaagaatctatctagtttgatcatgttgtccattactttgcaatgaaaattgggattaagatgctctggcaagccccgaattaaatcattttatctcttctctgttttattgatcctaatcctggaaattgattttcctgtatatcatatactttctttattttgcagagcttctagctggaatcaggaaagaagtagaagct

SEQ ID NO: 24752 - DNA, 667 bp, Glycine max
  Intron number 2 from transcript Glyma12g06320.1 (locus Gly ma12g06320) derived from phytozome v7.0 (chr-ID Gm12; pos 4290322 to 4290988 reverse strand)
gcaaactcaatatacttgttagtaacaacattttctcattaagtactactcccttcgtctgtcccttcataattattttgtgttccattataattgtctttttttaaaaaaataaattatccccaaatatttgtggttttagttttttaatataatattaattacttttttaacttatatttcttatgatattaagatatgaaataaaaaacaaaaaataaattaatgataaaagttttaattttataaagttattatttttttttcatctatttattaatttttgttgatttatgtaaaataatttagaataacaattataataaaacaaaaaggagtataaggaataagagatattttaagattacattctttaacacactattttggaggcatcttttattatttttgttaaaatttattgaatatcacaatattaaatagatctcacatcttatttaataattttcttttttatttttataatttttaatatattttaaccaataagaatatgtaccaaaagagtgtgttattagactctcaagaaataattcaaaatccattttttaattaggaagatttttggccttaatgtttttaattttctatcgtattaggcttccattaacatatggatttaggtaaacaacgtgggaacaaacat

SEQ ID NO: 24753 - DNA, 374 bp, Glycine max
  Intron number 1 from transcript Glyma10g41790.1 (locus Gly ma10g41790) derived from phytozome v7.0 (chr-ID Gm10; pos 48796777 to 48797150)
atccaggttagttttttctaatgactaaaacttctaataaagacaatgaccaggttattaaaatgtatggagacatgtaacgtttactcaaacttcataattgcaatggctgcatggttagatgctttgattggaaattactagtatatataaaggctgccagagaagacttaattaatttaaaactatttagtttatatggttgcaattggtgtgttttcttcgttttcagttttttttttaaaaagtaaagttttaagactatacaataccataacagaaaactcaacagcacagttctgttaacactaaacagaagtatcttcagtttgtttggcaaaagaaaggacggggattggtctaattagtctcga

SEQ ID NO: 24754 - DNA, 729 bp, Glycine max
  Intron number 1 from transcript Glyma09g37550.1 (locus Gly ma09g37550) derived from phytozome v7.0 (chr-ID Gm09; pos 43083958 to 43084686 reverse strand)
ttcataggtaagtacttgtcattatcaactcttttctctactgttgattaaccgtagataattacaatattcaaatacactcttcaattctataagattgggtgcacatttgttctatttaatctcaaaagtaacagctgataatagtttaaatatatcgttagtgaaaatataagataaattgagtggttaagaaaaaaaagataaaaaggtcatgaaccatctctactaataaaaactaaactaaaaattaatattcattgataaaaaaaaaatataacacttgtgttattgcacgggacacatagacttttatgcatgtattaatattgtttgtgtatataattaattgacatactatcatttggtttaattatatatatgctcaacataaaacgttgatatcaaaagataaaccttgctttgtttgcccacaattgatatattagctctcaatttgtagaacatggcttacataaaacttccaatttacaaaaaacaaaatccttgttttcttttttctcaactttctcatgactttggtttgttgtttgcatatatacaaattcaggttgattatgaattgtatgacacaatgacatatgaataaacaatcgcgcggttctaattaaattctatgactatgacatatttccgtgattaaattatctttggttgaagaagtgagtgtgttgatgattttcacaaatactttgatgcagggcatta

SEQ ID NO: 24755 - DNA, 618 bp, Glycine max
  Intron number 2 from transcript Glyma11g13600.1 (locus Gly ma11g13600) derived from phytozome v7.0 (chr-ID Gm11; pos 9641136 to 9641753 reverse strand)
gtgcagaagagagaatcaagtacaagattgaaaaagtaagctatgattggatttctgcagcatactgcttcatttttgtttgattttaatggtgtttgtttgctagtgttgatatttatgttagagcgagatgttaaatctgttcgcttgtatattcttccctttgaggggaaactaaagatcaacatgctttgttacaagatgttatttttattgtacttcttgattctagatgatatatacttctttctttttattatttttctgttctaaatttttaaagcaatggtaaatttcttggttgtgctagttatgttgtccatttggagagttggcaatagcagttatgggtctggactctggagacatacatgcttgatttttactcatgttctgtgatccctggttgtttgtaactttagttggtcagaaagatctcttctttctttgcagcattgttttaatggggagtgtttaaatgatgagactgtaaaatttgtcatcaacaatcacaaaaatcttgaaatgcttatctgcctgtacattctactaaaattttgcatgattctggttttaaccacaggccagaattaaggaagcattgctcatagaaaggct

SEQ ID NO: 24756 - DNA, 422 bp, Glycine max
  Intron number 1 from transcript Glyma11g13600.1 (locus Gly ma11g13600) derived from phytozome v7.0 (chr-ID Gm11; pos 9642014 to 9642435 reverse strand)
ttctcgtactctacctcgttttcggtctctcccaggttgtctctcatctctctactgtcacttttttttttgttaattatagttatctgctaagtcactacccaaaaccaattatactgttatgtggacaatatattgaagaacctaacatgggttatttcgtttttcctcgttagtggttctgtgttgttgaaagttttaggctttgaattgacacattttattttttttatcaccaaatgttaattgttagtttgttagcaggagagatcgaacctttgacctttccctccctctcttctttcttaaccatccaatcaaccttatatctcctttgaattgacatgtgttatgtgtaggtgctattaatctattatgttctaattcctttgtgttctaggtcagttgttgggagaactcaa

SEQ ID NO: 24757 - DNA, 758 bp, Glycine max
  Intron number 3 from transcript Glyma12g31020.1 (locus Gly ma12g31020) derived from phytozome v7.0 (chr-ID Gm12; pos 34647552 to 34648309)
ggcttaccttatatcatctaaagagccatcttcaggtaaaatcatttgtgatctgtattactacactttggttataggattccattcattttatgccttacatcttcagtacctgcattatttcatcagtacttgcaagccatttgaatttcagtatcattctgcctcccaagttgagaattaaacctagtttgtgctaaccaaagtctctacctataggatacctgtaagtttcatttcgttaaatagaaaattcttcttcatttaagactttcacaccatacgagttagaaggatgttacacataaagaaacgtgcatatcaaatttgtttcctttcttcttgtcctaattgttgttttggaattggcataaatgttttcaaacactattatgtaaaaaaatatgtgtatagaagtcatgcacaaatcatgatctatccctccttcaccatagttgatcatattcgtaaatttactttattgtcatcttgaaatcattagtctcaggtttcagaccttataagttgtaatggtttgcaagttatatgcttttgctaaattatatatcatatattagcaaagttatcctgtctgatgcatcatagagatctgaaagtttgttatttgaagaaaatttgtcatatgtaacatgcacataaccagaagcgcaaaattaattttccatcaaaacttgtctggtgcaattactgatcttttctgttttgccaccagaagtatagattgagcaagaatctgc

SEQ ID NO: 24758 - DNA, 576 bp, Glycine max
  Intron number 1 from transcript Glyma12g01950.1 (locus Gly ma12g01950) derived from phytozome v7.0 (chr-ID Gm12; pos 1188507 to 1189082)
acttcaaaatctaggtcagtcaactttgtcggtgtcacttctgaagatctgatttcggtttttgcccctgctttgtttttttttttttttccgtgtgtgagaattgtaattgctttctgcttgatgaagtttgatctggtaattgtgacttgctattattgggttttctccaattttgtaatctaactttcatatttatgtgcgttcttctgttgaaatttcagtgtttctctatctactttctacttgcaactcacaactggatttcgcttctttttcgtctcgattttgtacaattatgttagttcaggcttattatacatcattgattgcatcagtatctgctgttctcgccctaattttcgtatgagtttggctttgtaatgattctggacgcttaatttggcgtaagagttgctttttgtggcttagatctgtctatctgattggatgtaactattgcattttgtttattttatcatgtaatgtatgttccattaaatgcattattgatctggtgttctcattatgaatttgatagacccaatctatctgaaaattccaacaaaggatcga

SEQ ID NO: 24759 - DNA, 345 bp, Glycine max
  Intron number 1 from transcript Glyma09g03770.1 (locus Gly ma09g03770) derived from phytozome v7.0 (chr-ID Gm09; pos 2746049 to 2746393)
ctggtttcttccccgaagctgtgctccttaaaaaggtcacttttttatacatacccgcgttttgtttttcttttcccttctcagtttaatgtgattttctcggttggggcaaatttttatgggtttggttttgtgtacaagatacccttttgaagattcgttcatcttatagaagagagtgttcctcacaatttagaacatgttatagtatatgacactagttattgcatcctttagttaactgtgttcattctttatgggatgaagtttctctttgatattaaattgttttttttattgtgattttcagagaacagttgaggaagaagggaagcttctcccgga

SEQ ID NO: 24760 - DNA, 921 bp, Glycine max
  Intron number 3 from transcript Glyma09g03770.1 (locus Gly ma09g03770) derived from phytozome v7.0 (chr-ID Gm09; pos 2746601 to 2747521)
ttgatatatgtacgtagattctttatcctttctgttagagaagatattttactattgcacaaatgtaattttgtagaagtaggaactttgttacatttcttgtaattattttcattctctttgtagttctttgatttgtttgtgagctgtgttaattcttgtatgtatatggttgttctggattcagatagcaataatgtgatgaatcattcccttcgaagatttgttctttagatggtagagctcataagctttaaataatcacaatctgtaccaaccttttttctttatcctgcaaccctcttctttccaatgaccccaaagacctttgccaccaaattatcacttccacatatcttccagtcaaactcactggtgccaaatatcctacctatctacctgacacaaacaatgctcaactgaaaccatcaagtttaatgatgttaatgttcttaaccgtgcacacaacttttgggtctggatcaactattgtatctcactcctttgagcttttgtgaggtcaatgtacaagcagataagttacatgagtgtgtgtgtggagggtgagtcttgatgcaacagtaaggttgttgtcttgtgacctgaaggtcacatgatcaaatcttgaagacagtctctccacctgtaggggtaaggctatgctatgcgcatctactgtttacatatcccactaagtgggagctttgtgcagtgagtcacctttatgtgcatcagtgcatgtgcgcatgtgttttccttaaacaatttaagatgtcatatggcttcttattgtagttactagctacctatcttctgccagtacatagtaaaataaaagatcttggtgctaatctttatctatatctcaactgctctatctcacagtactctgctgcttctttacctatgcagtgcgccact

SEQ ID NO: 24761 - DNA, 943 bp, Glycine max
  Intron number 1 from transcript Glyma12g29980.1 (locus Gly ma12g29980) derived from phytozome v7.0 (chr-ID Gm12; pos 33451077 to 33452019)
gagtggggtaagatactttaataattattctaatatatgtatatagagtttaatggataaacgtaaagtagatttgaactgctatttaatcactaactatatatatatatatgattatttgttattaaataactgtgtaaaaatattttattctattagtatataatttttttttctttctctcagtatgtatacttagatggaacaccgaacacataatattgatatgaatcgcacttatttttatttgtcattcaataattttaacgaatttaaataaaaagctttcatagtgtaaaaatttgttgcaatatcataatacatcttataacatacgattactcacgtgaaggtggaatgtgttattctttatacaacaataagaatatagatatcaccttcgcgtaccaccttcgattgatgccgtcttgtatatacttgtgtaagttaataaatctatccttatatataaaaattattaggtgattttaaattactacattatttatgatttcaatccatctttatataatacaatcgtgttattaattcttttatcttggatttaaaaatttaaatacatgtcacaccgagattggttaaaactatgaaaggtgtgatgatttaaaattatctaataaaaatcatatatatatatatatatatatatgatttttaatgatgaaagataagttaaaaattcttacactttgattatattttagtattaaattcaaactttgttcacttttttcccttacatataattccttgatccctcagatggatattgcattccattacttataataatatggttgttgttagaaaatagaaaggcatgcatactatgagttcttctcctctctgatgacattttgcatttctggctaataaactaaatccagttcctatataaagaagagtcagaggaaggtacgtg

SEQ ID NO: 24762 - DNA, 881 bp, Glycine max
  Intron number 3 from transcript Glyma10g04700.1 (locus Gly ma10g04700) derived from phytozome v7.0 (chr-ID Gm10; pos 3617632 to 3618512)
tctaaacaagagatctggtatagctttgaactttactgtgtgtgtgtgtgtgttttttttttcaaaataattttcagatgcttatatagaattggtagaatttgtcatttgattgctaagcattttattgtaaattatactcaactaaattgttgcctaaaatattatttctttggttgagtacagttccctttgcaatttcatctatgctttccttatcatgtgccaaagattatattgtttagtcatatctgtttcttggaaaagtaaatatatatttttgttttacactatacaaatttgcagtatgttgatctctaggtcttgaagattgactcctcattaaattgttttgtgtcacagttaaattaggtttctgtgatttacatgagtgctttttgtgcttgacttttatatgataattgtaaaacagatttttttcccatcaatatatactagcaaggggatacgcctattgtccagaggttagttgagttacctttcttacatgggaaaaaaatgctttcaaggcaatcctttggtgggcctttgcctgctcctctgggatactatgcctgtcattgatactttgacttgtagtctaggaccaggagtaacatatccttatatcatattttcaactaaaaagacactagtattgctatatataggatcaataagattagtgaaatgtccttcacatttggtggttattgaaatatacctgaaatcaaatagagtagtgaaatcaacatttttctcatttaagatgacaaattttattccactttatgttctcttggactcttggttatttacttcctgtaaactgtatcataattgaagtgaaatataaataaatgtattcttattatgcaggc

SEQ ID NO: 24763 - DNA, 808 bp, Glycine max
  Intron number 1 from transcript Glyma10g39440.1 (locus Gly ma10g39440) derived from phytozome v7.0 (chr-ID Gm10; pos 47106518 to 47107325)
gtgctttgctctcaataggtacatatatgtctattttttattttttttttgtccttaggcaacccaattagcttgttaataccacattagttagcattttgcttaactgtttaaccaaaaacaaaacttgtcccagctggttgtatttttcattttgaactctccatttttctcataagaataggattaattagtcttcctttgactgctcttttggccttttcgtgtttcattttactattagttattatttctttgttaatgatgatttaagaagattcatgaaaagaatagaagccacaaaacaggaaggtaaaagaagcaagaacttttttattcgggtttgatttgagtgagacaaaaatacagtacaagttgtctgctacaaatgcctatagttttcttggctgtgtatatcacggacattttgatgattccagcttctcatgctaggaaaaagtaaagggatcctaaaagtcattagttctttttgctcgtggccatgaaaaaggcagacaacaaataaatgaaaatcagttagctttttcattgccaagtccagcactattatctgtttgatataatatacaactatagcacatattttacatatcagagtttttttttttagaaaaagaataatatagtagcattttttctttctctcctcatttgttaaagtgaaaaaagttttaaaaaaaagttttacgtgtcattcatgtgttacttacatgcaagaataacttattcttctatctttggtgcggttgcagtatattgcatacaggagctagccagtaccaggaca

SEQ ID NO: 24764 - DNA, 385 bp, Glycine max
  Intron number 3 from transcript Glyma11g18400.1 (locus Gly ma11g18400) derived from phytozome v7.0 (chr-ID Gm11; pos 15076676 to 15077060)
atagttttcctagtttacaggttaggaatgattcaattttctgcttggaattagcatggaaagggtttctttggaagatatgaagcctgatgatatattcaatttatgatttcctgtctataaacttcctgttttcatgctgaagcttgttgtcaaatcatttttatgtagacagcttgtgaaacattttattgatcgaaataaattacagaccttctgacttgaatttcagtaatttgctttgcaatgggtattgtgattgaatttatgtttatataatttatcttatatattacatttcaatgataatattaattcctgaaatttcgttggcatttgatttctttttgtttctcatctgcaggcagaagttgaaaatttaaca

SEQ ID NO: 24765 - DNA, 892 bp, Glycine max
  Intron number 2 from transcript Glyma10g28980.1 (locus Gly ma10g28980) derived from phytozome v7.0 (chr-ID Gm10; pos 37863017 to 37863908 reverse strand)
ttattattgtatgaattcttctcctttcaatgccaataattgttgtctgaaatgagatcatacgatgacgagtgctaagtgtttgccgaaatggttcaattgacctttctggtagtttgtttttctttaagtaaacatcatttgcccagataaactggacatcaatgcttattttcaaggttttaaattaatgccacggttgtggttttgttgcaatcattgacattgtagaaaattgtgggcttataattcttcagttaaattctttccctcatgtttcaagatattaatggtcatccaaaatctttgagggcttagaattattcagtcaaactctttccctcatgttcccagatattaatggtcatctaaaatttgtccaaaatctcactcttccttgtcgtaaatatttatgttgaatgaaagattgaaatgatcagcattgttaattatgtagtttcccaaaactatttattttggagggtgagcatttcattcaatgttctgatgtcagagattttatatcctattatatcttttaggttacatatgtggtatcctcctcaatatgttattgcccatgtgtggcaatttttgtgtgtagaaaatgattttggaaccaattatctcttttcagggtctaaaaatatgctgaaaatttattatttgaaatgcccataactgtcaattttatagacctatttttttatcagatctgataaatgagtccttgatcaagttagtaacgtattttttcaaataagatatctaacatctttgttgcaatggcaattgaagattattcattacgcgtgcttctgtctcattaatgtacatcttgtttctttctattttcaatgttgtttctcttcaaatgccattgcataggcac

SEQ ID NO: 24766 - DNA, 606 bp, Glycine max
  Intron number 1 from transcript Glyma12g29420.1 (locus Gly ma12g29420) derived from phytozome v7.0 (chr-ID Gm12; pos 32863712 to 32864317 reverse strand)
gtggcccctcccactccctcgccgccaagatcctcgtgagtcattgcggcttctctacttctagggtttttgcttctcttctccctctccttaaccccaaaatttaatctttgacgcaccgaagccaataactctaagactctttgctatcgtgcgctttctcatgaaccttgactctattaatagtcgtattcaaacttattaatctcttttactgcttgactgatgctgatgttttacttaatattggattttttaaatgttgctggtaggtatagaactttgatcttaccaatcaacctaagattattagctaacatttgcagttaattaacatatataaataatcatccacaagtctttattagtagaaaccttttttgaaagagaacagaacatgaacttgttactaaaattagaagtgaactttatagcttgtgaaaagttcactcgctgtagacttttgtagtgctttttttaatatctatttgtcggtatgaaagaaagatgtgtaatgtttgaaccgcattgcttggtattatgtcttccttgcacctttagtagcttttcgtgcacatgcttaggatgctctcgatgttttttagg

SEQ ID NO: 24767 - DNA, 870 bp, Glycine max
  Intron number 1 from transcript Glyma08g46360.1 (locus Gly ma08g46360) derived from phytozome v7.0 (chr-ID Gm08; pos 45495716 to 45496585)
ctgccactgttgaaaccattgctaatctcttgcaggtcttgattgttgatttgtttgttcaattgggtgattttgatttgatttgattacttcatcttgtttaattggtggattgattggattttgagcatctgggtgtttctggttcatgtgggtttgtgcatgttttagattggggaatgggatttcttttttctctttctaaaatctaaagtgaaaaatgacgatattttggcaattggggttgttttgtttggactaaaacagttttaaagtttacaaattgaagatttgaggcattcaaggttgttctgtgtatgatctatagtagttttttggttttgctgttttgtggcaatttaaggattccagattgggaggcaccgagttccatgcatggagtgttggagtttggaatacaagattttggaaaaagtttgctttgttttcttattcgtgcttcttttttgtattagtgctaatttgtttccttgattttaactccctgattcagaataatcgtcatattaagaactagtactctcctttctagtcccagtcttatgaaaatacttatatatgttctttgatggtttgctcattgtaataccattatggcgtcccaggtttgagagaaggcagtcccttaactcatccaaaccaaaagatgaaaatcagttggaaaatataattgattttttattttctaaagtatcaaatgaatttggctgttttttatagactgtttgattaaacagaaaaacagacagatctaccttaggagccgaatttatctaatataaagagcatgtgctattgtattcctcaaatgaattttgaaatgtttggtgactttgtgtaggaggttgg

SEQ ID NO: 24768 - DNA, 735 bp, Glycine max
  Intron number 1 from transcript Glyma11g15540.1 (locus Gly ma11g15540) derived from phytozome v7.0 (chr-ID Gm11; pos 11207676 to 11208410 reverse strand)
ctgaaggagttcccaagattttgagcttgctcaaggtatgttgccaaactcacttaccatacttaaccaactgagctagaaccctcttataccccacacaatttagttgaataaagttgagttaggtgaggtaagtaatataattaagttcaagtttgaataaactgtttccatgaggaaaaataaaataagaagttaaaatgaattaagttctctgttatggatgattaaaattagcttgagtagataagtttaattaaataattgaaaactttgtgcatttgcataataggattgttattttttacaagtttattagataaattagcctgattaattagcataagtagataaattagcctgattaattagaatttatcacttgcagaagcttaattcaataggcttgggtagataagtttaatgaaataaattgaaaagacattcatagattaggtgcttttatgatgagataaaatcaagtaaattttgttgccatataagctcttcagaatgcatccacttgttttgtacacagtttgggttgtggctaattatgttagagactgaaaattatactctattgaatcttatcttaactataaccacgttagggttagggcttgattcttattgctttgtcctttctctttgtttttgtttttgttttctttactgagattggttacttatgttcatgtattttaacttcttttgtaggtttcatcagctatc

SEQ ID NO: 24769 - DNA, 188 bp, Glycine max
  Intron number 2 from transcript Glyma10g40500.1 (locus Gly ma10g40500) derived from phytozome v7.0 (chr-ID Gm10; pos 47894165 to 47894352 reverse strand)
agttagagaccaacaagaaggccataaacattcaggtacacatttgttttttcttttctagatataattagccttaggactttgcttctgctaatatctggttcaacttgttgacattgcttttgccatttaattatttacgtaagttttgacttctctttctgtctccgtggcagtgcaaggtgtgc

SEQ ID NO: 24770 - DNA, 345 bp, Glycine max
  Intron number 1 from transcript Glyma11g21560.1 (locus Gly ma11g21560) derived from phytozome v7.0 (chr-ID Gm11; pos 18613404 to 18613748)
tctgcgtttcgcatctctcaaatccctccaacacggtactcactactttctgcttcctcaaccatttacctttctcggcaaatgttattttggtatcggtgtcgggatcgtgtcccacacttagtggtgttcatgtttcatagcttatatcttcttttatcgacaaatgttagtaattaatatgttatgctagtggtagaatttgaatccgtgacttgattatcaccgcgacccctatgtcccttatgactctctactctgtttttcttcttatatgtttcgtcatttgggaaacgaaggcgttttgttttggtgtgtaggtacaagttgtgtttgcgggaaccg

SEQ ID NO: 24771 - DNA, 650 bp, Glycine max
  Intron number 2 from transcript Glyma11g18330.1 (locus Gly ma11g18330) derived from phytozome v7.0 (chr-ID Gm11; pos 14995495 to 14996144 reverse strand)
aagtaggagggaaagacttaatcagttcaaagaaggtgaatttgaacatatatctttgcctttgatgatcagttcaaattacttagatggggaacaaaaatattatgaatttgattttaatcagatgctgaataaattgggccaaatataaaccaaattttagtttttttgataattaatattacaattgctaagttaatctttgaggagagtaggttgctgccattggactcaagtaggcctggttattacaaagtagctgcaaggtcttcttcacgtggcatgaaatgaagcagtatatggtttaagtgttctttaaaaaaataaaaggactatggacctcttaaactaccatggaagaaatattataacacataatagctggttaaattctgagtatgttgttatctatatcgttgaacttgtttaaagctgtcggggattcttttgtactgttgtttttgagtaaattgaatcatgcattgacatgggtcattttagcataatgtttttgtgattctgtgaatgttttttctagaataggttcaactgtgtaataaatttttgtagtcagtgtttgaaatctcgagtcgtgaagttcattttctctggcagacaatcgagagataaaatctgctcagtccattctg

SEQ ID NO: 24772 - DNA, 349 bp, Glycine max
  Intron number 3 from transcript Glyma10g03470.1 (locus Gly ma10g03470) derived from phytozome v7.0 (chr-ID Gm10; pos 2532149 to 2532497)
ttatcgtagagtataaagattcctgggtggaaaaggtcagctttaaagaaccaaaaaaaacataaaaatcaaaactttttcattttgttgccattttttttgttttgtagtgtttttggtttatgcttgacaaatgggacttattttggactggaaaagtttaatgttttttttttttgcttatctctttacaaatgttgaacttttattatattaatcaatgatgatgttgatgttggagcctctttttttttttgtaacagagaatagaaaatgggtttatgattattgattaatttttaattctgaaatttgcaagctggtatctgctcttccagggttgttttgt

SEQ ID NO: 24773 - DNA, 1055 bp, Glycine max
  Intron number 2 from transcript Glyma09g30650.1 (locus Gly ma09g30650) derived from phytozome v7.0 (chr-ID Gm09; pos 37427426 to 37428480)
acgcctctgatctcgacaaggaggagagacccgaagtctgtgcctttccttaagcctttatttgcacttccatctattactctactcatttgcaacatttcttttttctctaaatattttactctcaacttcacttctcacgttagagaatgccttcaaacaacattttattttcaatgtcatagttatataataccttcttcttcttttttttgtcaacatataagacctctttactttataaaaattaataactaattaatatcttttcggtccgtctaaagcttaagttttaattattttactcttccctcagtcctaagtgaatgttcttagatagaatcgataactcaactctaatacatgctttcttgcatcacagaatgctagttagcattattccttttttaataaagtttttaatatattgatggtgcaattttttttactaaattatttaaatataaatgaccatatatggtaaaattattaatctttgtaattagttgatggtgcttatgtttagctaaattgacagtgtattgaaattaaaatcaaaattaaaaatatataacattaaatgtttttatatttttaatataataaatatctttttaattttttttatcccgtacctaataaaataatccttatatattacattcattgtttaagctgacattgttaggacatgtagtgaatgattataagactccaaatgaattactttttctataagaaaaatgttttctttctatctctcgtttggattctttgttttaggggtcatcgccttttcttttactatgcgcctaatagtaatttggatgttagttagaggacggtaaccctcaattctgatagggacaaattttcaataagttattatactatggccaactttcctttctaatataagaagcaagatcatgagaggctagaaaatttctccttgtacctttatcgataaccctttgtttttttcttttcagagtgagtgcttttttgactcacctatttttttgtcgcataggttttgtccctactaccaccat

SEQ ID NO: 24774 - DNA, 545 bp, Glycine max
  Intron number 3 from transcript Glyma10g24580.1 (locus Gly ma10g24580) derived from phytozome v7.0 (chr-ID Gm10; pos 32088633 to 32089177)
gaagtgcttcttagtttttagtgaatcacttggaggtaatatcaccttttcctgggaatctggcatcaagagttatacatgatttaactgcatggaaatatttaattatatcaataaattgttcgtagcttgataattgactcagtaactaatgtaaaggctgtcattgtgcattgcaaaactttatttatttatttattttttgctggttgttacaagccaaacttaattttgacacctaatgcttgtagaatcatttcggaagtgaaaagacatgacatttactcatatatcattgtctacatgttttaatttgactacttattttttctgtttctgagaaagcatttgattcttcttcatcagccctgtgaccaattatgaagagatcaatggtcctagtaatgctataagaaatccacttcaatactctggggggcaaggtggtcggagaactacacataatgagaggaatgctaattggcacttgcatgatgtaaatgggcatcatttgaggataaataatgatgttggaagatttatca

SEQ ID NO: 24775 - DNA, 618 bp, Glycine max
  Intron number 2 from transcript Glyma09g32660.1 (locus Gly ma09g32660) derived from phytozome v7.0 (chr-ID Gm09; pos 39163088 to 39163705)
ggaagacttgaatcaggattcaggggtgaggtgaggtcttttttttttttttttttgttctgttttgagtctattttgaatatttgttattattctaatctgctgtagattttgaagttttatttaagagtgtttgctggatttttttttaaattactattgtttatttgactataacataccctagatggtgtatgatgattcaagggagtcttcagcttccacatggagttttatattaaatgaaatctgtcccatccttgataatatagataggaatgagttctttgtttttatgtcccttaccttaagtgaaagaagaaaacctagatacaattctttaggtgttgttttgttgttctctccaatcagaattggaatttcaccttgataatcctggcataatcctttaatgtaaacttttattacatgaattgctaaggtggaacttcaattctgattgaagaacaacacatacaatacttaagaaactgtatctatgttttatcctaagtgaaaaccatgattttattaatatttttcattccgtaaacctgtgtgatgccactgataatggcttgctttgtttgactgcaaacttaatgcagatatttgagg

SEQ ID NO: 24776 - DNA, 863 bp, Glycine max
  Intron number 1 from transcript Glyma10g25700.1 (locus Gly ma10g25700) derived from phytozome v7.0 (chr-ID Gm10; pos 33731925 to 33732787)
aaaattcaactctgactgataattataatcaacaggtttgctaattgattacagtatatcactttgaagaataatcaactttgatactgttgcagatgttaatttttaccacattgttttgttatctattttccctttgaaacaactttattagttattataattataattataaaacatgctttggtgttacagaacataatatgtttatctattgggcatattatgatatttcatgttgagctatttaataattaactatgaagaataatcaactttgatactgttgcagttgttaatttttaccacattgttttgttatctattttccctttgaaacaactttattagttattataattataattataaaacatgctttggtgttacagaacataatatgtttatctattgggcatattatgatatttcatgttgagctatttaataattaactacgaataacaataggttttcaataataggagcagtcattgttattgctatgactattgaagttagtggcttttgggttacttgtattgtactcctttgatatgagatctaacatttgaacatattggtctgtgtgattgtgggtgtataaaaggaacttaattagtggtaggttacagaaatagtggaaatgtcttgcaatgcgggtgtactttttcttagtcctgggttagtttgttaattgtgttagtactttgatctttgttatcttggcattacttaaaaccagattctgaatttaaattggtgcttcatgttaactttagtggtaaaatagttgtatgtagtcacaattttttgtttctatgtttttatagagaagtgtcgtcaaccaattaaaatcagac

SEQ ID NO: 24777 - DNA, 971 bp, Glycine max
  Intron number 2 from transcript Glyma10g25700.1 (locus Gly ma10g25700) derived from phytozome v7.0 (chr-ID Gm10; pos 33732789 to 33733759)
tggaaaatttacacgaagatatcaaagcccgactggtttgtatcaaccctatctaatccctatctaatagcataattattttggctttcttgtattccattatacactcaggcatagtctagctttgcaagttcatttgcatacttgcttccatttatatcactaaatcatatattgaaaatatttatatagatttaattattattacaattttgtaaagttattatgttaaaaattcaaaaatattatatatatcaatcgagctggcacaatcttttgagctgaatattggtggttttaagcttgactaaataaaagaataagcctcataaaacttgatgcaaagattatcaggcatcaaattaagcaatgcccacagagcttgttgaattgggcttcttattgagctcattgtgattcctatcccgtttctttagtattatataaagtttatggttggattaattggatgacactttgtatcatttttgtctggaatatttataatatattttagtacacacaataactgttttcactcttttaaagcccatcaatttcaattgatatccttggtttcttgaaatggtgtgctactgagaggatcatttggctcaccacactttttaagaaaggtgctaaaacaacaaaatttgttcgtgatcatcaagatccttttatacaatctttccacaatgggagttgtcttccatagtctttttcttttgtgttgttccattatccggaaaatgttgatatcgggttcccatatcaatgattttttctctgtgttcttccagacatctaagattgtcatggtcctgtttttgaactagagtttttagtgcattaagccgtgtgtggtagaagttaaacttctaccacatttattgttgattgtctttggttgaaaatagactggtttcatatgaacaggttgagcttgaggctatcaagagtgaatatacaaa

SEQ ID NO: 24778 - DNA, 938 bp, Glycine max
  Intron number 4 from transcript Glyma10g27860.1 (locus Gly ma10g27860) derived from phytozome v7.0 (chr-ID Gm10; pos 36666123 to 36667060 reverse strand)
tgttcattgctttgcagaagcagaagcagtgtcaggtagctaggtttatatatatgttgatcgatcagctctcaattatgcctttttaatttcattaaattatgcatcttgggcaaattatgatatcgatgttattctcacatgcaacggaataaaacaaaattaaatgaataatatcttgagttatttttcatagtataattagagatatatattgcttttctaattatatagtctataaaatctgtgtctctcctttatatttactaacctctcttcactatagcttgctaaagaaatggggcagagagtccctaattaatgaaattgcttgttttctctttattaattcacccatcttctttcatatatatcctacagtacaattcagtttttcagtgttactatttttatctttaacagcttaaacctttaaaccgcttccagaatatgaaacattcaccactttaactgagacatgattaacatgtgcaaccacaggtcacagagctggtttggtcctcacatatgaaagtgactgggtagatatacatacacttaaatgaaccaagtcttatcttttatgcattttctatatgactgtagttaatactgctacgtgctttgggatatagtatatatatattagattttgtttaccaagttcaaacggcggatatataattatattcaaatcggataatatcttttgatcaaagtatagaggtgttcagttaattaatatttaataatggtctggatttgttgtttctgtttttagttttctaatgaatttttgtttgattcaaagtaattttgatttattctttttaattactgcttgatttatgcttttgaaatattatacatgctacatgtacaaaattaaagtttaattacaataaggctcctagaacatgctagctagcaaccggttg

SEQ ID NO: 24779 - DNA, 967 bp, Glycine max
  Intron number 1 from transcript Glyma10g34420.1 (locus Gly ma10g34420) derived from phytozome v7.0 (chr-ID Gm10; pos 42561725 to 42562691)
ttgacgaactcactcggagaaacatcctccaacaggtacaactatatatatatagtttcttcaatgcttgcatgcacttacacagtttccaaaactgaatctgttttccaagttttatttggataaattttttcttgaacaattataaggaaaaataaatacaaaataaaataaatctaattttatttttcgtgatctaaaattaacttatatgacactgtttctataaactagtttagtatcgtacgcacgtatgcacgggtaagtcttgaaaattggtagtataattattttcgtataattgtaacactagatagtagtacgatgtacttaaccggaaactaagtaaataagaacaaaaataaatatgattaaaaagatttatgatcaacacgtctaaattgaattgaaggtttaccataataaaacaaatattatacaagattcacttcattaacaaagtcataatattaaagatattattcgtaacaagagcacatccacaaaataaagttaaattaattttagtttacaagaaaatcacaattcattttatttttatatatattttttcttcaaatatttgtgaagaaattactctaatcatactctactaacaatgactaattcaagtgattaggacttcgactccttaagcatgtgattaagactttgaatccgacgggtgcatatggagaaatcattaatcattgttgggaggtgattagttcccctatgactggcattgaaattgttgtggcagtcattccaatcgaaatttaagtataagtaacaaaatgtatccttttgcaaacctaggatgtttatctgctggtttcaatttgtgttttggttcttgttttttgatttgtgtgttggtgctaggctatgatgtgactgactcactgggtttgcgaaaattgattgggcagggtctgagcagaaagctggtccatatattatctgg

SEQ ID NO: 24780 - DNA, 627 bp, Glycine max
  Intron number 1 from transcript Glyma11g29890.1 (locus Gly ma11g29890) derived from phytozome v7.0 (chr-ID Gm11; pos 30772798 to 30773424)
attgctttgttaatgtacgttctttcttctctaacactcttcatctgtttcactctctgactcatggatgaagtgcacgtatattcacacacgtatgacttacatacaaaatatataggaaaaaaaaacaacttagattctcacttgagattttttttgtaattataagatcttgtttcctttttccatttgtgtgtcgttaatactatgatattagatgcattagtttttgttatacatgtatagggagaaattcagatatagtcttaaaccacatgattcgcaataatcttcacaatatatgtaatcaaatattattagagtccaatgagtaagcaccgatgataatttaaaataatttttatattatcatttactcatatttttagtatgaattttatgataattattataaaaattaataacattatcatacattgtaattcataatattaaataatattttaaaattgttttacattaatcttttttgtaaattaaaaaatttaaatacttatggtataaaaattggacttggtcaaggaatagaatgtagctagctagtatgagtttccatgcattacacattatgtgttcaacaattgattgttaatgaaacctgtaggg

SEQ ID NO: 24781 - DNA, 781 bp, Glycine max
  Intron number 1 from transcript Glyma09g02730.1 (locus Gly ma09g02730) derived from phytozome v7.0 (chr-ID Gm09; pos 1876377 to 1877157 reverse strand)
aaaaccagcttcattggtaagaacaactaagaaaactcttagcttattttctcttctcagttaatagttttttaattcactctgtaatttcatgcctaggagcaaattttcggtatgcgattgcggatatctttctttatcagtttccccccttattttttgcctaaattaggaattaggaaaaataatcatacatgtcagatgtcttgcttcaaaggaaagagagtacatattccagggatacagagaaaatttcccatgtctagacaattaactactttgtaaccaaacttacagttttccttttgaattgcattgcatttgattgtttgcaactatgattaatctttcaaactatgtttttcaatatttgcttgacattctttcaaactttattgtaaatatgaacactaaagcacgggaaagggatctctgagaaagtgggtaagttgccaactttaggcctttttctttccttggcttcaatttgtgtttctttttccctcctactctgcctgctcatgtcttcctctttgttcatgtttgactatgctactgctttttaatgactcaataggcttttgggtctttttagttttatattctcataagatctttatcacctaaataggaaattgaagtgaagccaggaatgagtaattgatgaaaaaattaagaattggaaataaaaggagattatcattaagagacactatcaattaactggttctttaaattgtgtgcagggagtgtattgagtggtggcggtagtgaacccctt

SEQ ID NO: 24782 - DNA, 644 bp, Glycine max
  Intron number 1 from transcript Glyma10g01770.1 (locus Gly ma10g01770) derived from phytozome v7.0 (chr-ID Gm10; pos 1291830 to 1292473 reverse strand)
tggggaacttggcttacgatatacctagaatcaaggtatgagacttgagatctttctgcttttaattttggtaactcgtagggttaggtcggtttcatgcttctttctatttgtgattttttttattgttttgagtctgattcgtagattttgagaagattcatcttgtacttaactgatctggatctagcacacattgattgcttgaagatcctgtgtgttatgatttgtctaatttttcaaaaacctatagaaggtttaagtttaaacttcacgaagcagtaatctgaaaatggaagcgctttgttatgacacatgtttcatttagcggagtgtaatttataacagctattggaatacccatggtttaatatgatctgatttatgttttacgtatatttctgcaaggagagtatgttggaggggttctgtttgtttaccatttacatgagtcatgagatcaattgcattttataactagtcatatttttgtaaagctctgttactggttttttatttttattaaaatgacatgttcagaaattgattgataaatctaggaatttgattttctactaaatgcatataaacactaatttataatttggatttgataatttagccagggaaactcttgaaacatc

SEQ ID NO: 24783 - DNA, 827 bp, Glycine max
  Intron number 1 from transcript Glyma11g14640.1 (locus Gly ma11g14640) derived from phytozome v7.0 (chr-ID Gm11; pos 10449467 to 10450293)
catccttttcgtttggtcatcgtgaacaagaggaggtaagcacaacttctttttattaccatggctagtctttgtttttgtgggcgagaagttgggttgagaactcaatatatggaattatgaacatctgcattctatatgatgaagatggatgcaatggtttcaaatgcttgagaaatgaacattctactgtttgattcctctcttatcatgatcctcttgatgaaggggaaaaatggaaatataagagagattacaagaaataagatttgagttctgtattgtgcaatatactactatagttgctgagaccttcatcgagtactttcttaggtatcgctctgttatttcgtttcttcttcctttccctctgtgtgcatgtgcctatgtgatttgcactacactccatccccttctttttgaagtattttataattgataaaatataattgaaaatatgtgtatatctgtgtgatgaactttatgctgcttcaattgactgcttagattgtagctccattaaacaagagttcttttaggataggcttttataccccattgctttctagcatctggttgcaagtcttaaacagcttggtttttgaaaaatacttgatattttctagatcttacttgttcagagggtgtctttgcattataattaggatgtgaatgcaaatcacgtgccttataccagcaaggtacctgttcgtctgtgtctggttttatatggtttcttttatttcattgttatcatctttctgacgtggatcagaatttgattctttgcagatcagctttcaggagtttaaaaacaagcttttgga

SEQ ID NO: 24784 - DNA, 401 bp, Glycine max
  Intron number 1 from transcript Glyma10g06160.1 (locus Gly ma10g06160) derived from phytozome v7.0 (chr-ID Gm10; pos 4923017 to 4923417)
cataccgcacaaccacgatcacctttcggtaactgttcctaacatccatttctcctttttttgctttccaaataatttttcatttctttattgctagaatctgtcaatgcaaaaaatcaatatcaactaaagttacaaaattaccacatatgttcaaaactgtttatttaccattttgttttttcccttgcaaaattgtgaaatgtccatgtgttacttaggttatgagcttccaatgttttttgcatatctatttgtgttgattgttgaacaaaaggtgttatttaaccttttaattgtactaagcttcatgttactcttctaattcatcctgttttcttgatgtttgcatatgtgaactgatttttttgctctcaaaattaaatgatttttagagtaat

SEQ ID NO: 24785 - DNA, 642 bp, Glycine max
  Intron number 1 from transcript Glyma10g36160.1 (locus Gly ma10g36160) derived from phytozome v7.0 (chr-ID Gm10; pos 44346318 to 44346959 reverse strand)
atattgaagctaattttggtgagttttctgtgctttgtgtataaactgttttggataagggagggtgtggttttggtctttgtgccttatgaatgttgaaaatttcaatttgggtgatggatagtggtttgttggaaccttttcagtgggaaactagttcagcctttcgatctaggatcaaaggtattgtccatggaggcaatcttgttcaagttggaatttggttcagctgaaaccttttgtcatgttagaaagtaaaaaatttcatgagaagagacagagagagattactgtagataggagggggaaaagtggagaaaggttttgaaatgattcggggggatatcaaacagtagatgctgatgtgtggtatgcaagtttgggttaaggatgcacgtgcttaaagcatatgcttgccattgtaaagtttcaagatttttgtaatttgtatcactaaatttgtgatttttttgtggggaaaaaatagtgcagaagaagaatgtaagtgtggtgttatgttgttgttctgatgtcgatgttttttgcatgtgatggtgtgtggatgttaattttatcaatcttttttttgttgacatgaatgtcttttggtttcagccccaacagtcaaaggttctggagaat

SEQ ID NO: 24786 - DNA, 1003 bp, Glycine max
  Intron number 1 from transcript Glyma11g25680.1 (locus Gly ma11g25680) derived from phytozome v7.0 (chr-ID Gm11; pos 24419790 to 24420792 reverse strand)
aggggaggctcactttggaacaagttctaaggtctttgattttttaatttttttttccttttctttattagatttaggatttcttttgtttcttcttgtgattaatcttgttgtgagaagtttatttgacttgttagtgactatgcagtgagtagactgatacaagtgtggtgattgttgcgtttgattagtttagtttcttttggtttgattgatgagtgattgttgtggttgcagttgtgtgattattgtgtttgattagttcagtttttcttgatttgtttgatgagtaattgtggttttaagttacggttttggtcgattagttgaatttctcatgatgtgggttgttgcaacctcagcactacaatttttcaagtgatggctgcaatttgaaaacttgatcagtattatccaatgttgttaaatggcggcacaatggcagaatgatgtggcagattttttgcaaacaaccataggcaatttttgaagtgtggaccactatggcagtcttaggccgcaattgtgtgtttatatggtggaattttggccttctaccatgttccaccattcgccattgataattttggtgttattgcaatttcactgatacgtaggacacactacataatggttaaaatttggagataatgcaatgtctaagtaggttggactaaattaggttggtttattcaatgtctaaaatctatcattttactcctgcttatgtgtgtttgtgttgtagccatctcactgttatacgtaggatgcaatgcattatggttaaaatttggagaaaatgcaatgttattatgtctctgccagtcattgactaatcaatgtttggagggagacactgtctatctatgtgtttttctaggctgcctatgtgctttcctgttggttaagcagatagagaaatagttgaatgaatgatcccatactgcatttcaattttccatgatgctataaataatgattttaaaattttcccaatgtagat

SEQ ID NO: 24787 - DNA, 979 bp, Glycine max
  Intron number 1 from transcript Glyma11g29310.1 (locus Gly ma11g29310) derived from phytozome v7.0 (chr-ID Gm11; pos 29911635 to 29912613 reverse strand)
attccttgcctctcaggttcggatcccaacctgcttccttcgtgtgtttgcttcggttacgatgtttccgttatatgagtttataaaaaaaaaaaaaaagggccttcttttaattcgaatcatgtgaatgaatgtcaatgtgaagagtgaagagtgaagagtcagttgcaccttcttctttttatttgacaaaacttacatgcaatatcaagggtgatttctgtgctattttctgacaagaattggagtttcatctcgttaatgtgcgcaataaaggttttgcattaaaggtcaacttagatcactgaggttaaactataattctgataggagaacaattccaaaagcgtctaaggagtgtatgtaggttttgttctttttgtttttgcatttgggaaatgggttttttttgcttttgatgttggaagctctgaagttttctacttgggtggtgatccagtctgaatatgagtgttgatatgttaattcggttgtgtctcaggtcactttagttagaagctctacaattttattttattttttttgttactttgggaaatgggtgcttccggcgattttagaagctctgttctaatctgattgtggatgcagagaaaatattatatggtcaatctccacgttacatgtaaccaacttttcaatttactaaaaaagatttcataagactcgattatgtgttatatggaaattgatccgagtttatttttcaatttacgaaaaaaataataatacaatttgactaagtgtcacatggaagttgatactgttggtcttggaccatacaataatattcgtgaatgtgaagattcagttgcactgtttggttgtgtttgaagatctcttactttggtgatggattttgcttcttttttttttttcgttgaaattcttaagtttgtgttgtttatttattggtttgtttttggcagttattctaaggcagggtttgaagtgaaag

SEQ ID NO: 24788 - DNA, 962 bp, Glycine max
  Intron number 1 from transcript Glyma10g22820.1 (locus Gly ma10g22820) derived from phytozome v7.0 (chr-ID Gm10; pos 28839501 to 28840462 reverse strand)
gatctactgcatcgtaagtcattctgcttgttgtatgttttgatgatggttaacaatgatgttaattaattatgagtcttgaattgaggaatgatgttgaaatgttgttcttgttgttattgctcagttggattctactcagttggatggttttctgttgattgaatctgtcagaaatgggtctcttgaagattctctcatgttttctttattttatttttttgaatttcattatatgtatcatgtacgtttattaattttctttatctttttatttacatattctttttttcttaaaatgtcaattttatagacattttgtaggagattctataattaagaactcttttgaattagagtacatattggcaattcactatgctaagttggatttttaagcctgtctagatacccttcacggagtcacctgttaatggagtttgttccttatcataagttcagaattcagttttggggtacatgatgatcttctttcatctgggactctcgatccttcgcggcctcccttgtgagcatctagaaaccatgggggtggtcatcaaaccaagaccattcaccatcaaaatagtcatgtaataaaaaacattcctatcaagagggaaacaattggatcatgaagggttgccaacaaaattgtgcagtaagcatcaaccacttaatgatttcaagaattatcagttaagtggtgtattagaatctgacaattgcattttaggaccatcaaaacgagccatggctgatcatgcaaagagttactatcagttagaggttactttctatccaagtcctcaaaatagtttctattcaaccactgtctactcagaagccaaagaaagtttcaccaacactaaggtcaatgagtgtgctagtgttgacaagtcttatgaaagtgaagaaatggaaaattactatcatattaatgagaataggaagaccagcat

SEQ ID NO: 24789 - DNA, 417 bp, Glycine max
  Intron number 1 from transcript Glyma11g02210.1 (locus Gly ma11g02210) derived from phytozome v7.0 (chr-ID Gm11; pos 1383752 to 1384168 reverse strand)
tcccagttcccccgatcaggtactccttctttttgtcttggcgatggatgatccttgaaggatgttggggattaatgtttactactacttctactaggttaattaataatattagttttttttcttctttctttaccgtatctttgttgacttgtcgtttattatattaatgacaaatgctgtttcagcatctgtgatttatactttatatttgtaaaatttccttccttgtctgttttttaaaggacacactgaatctaaattttgatgtacctgattctttgacccattttatgctgatgctgcttaattatgaactgacattttccccattacttttgtgtaatctgaagttcatttaaactgatatttctctgctctttcatcagcctgctagcgccagcagtttgaggaggc

SEQ ID NO: 24790 - DNA, 872 bp, Glycine max
  Intron number 1 from transcript Glyma11g01820.1 (locus Gly ma11g01820) derived from phytozome v7.0 (chr-ID Gm11; pos 1096175 to 1097046)
ggtaaataaaatcatctctttcttcttccaattgctttgccccttaactctgccatcgcataaagttcggctcttttgcgtttctgctgatgagcgtttcttcttttcatttcttctctgtggaagtgaatgtttgattgattctctggttcaagtgtcatttcgcttcgcttttcacggtttgccctatttttgtttttttatgtcctgctgtgctgtgtgtagctgtagtccaattactttaagttactgtttatttcctgttttctctcgtgtggtttactacgcacatttcatacctgtctgcattgtatattgttttcaagtatgtgaagccacattctttttgaagagttcggagtaattatcataatatatctaggaatgatttttacaataatgaaagtcattgatacgacattccatgactgattgacaatactgttgttgtattctattttatttttttttgaattgggagttttgttgaacattaactttttttgcaacatccaataaattgctcctctactatactgttttgaaaattccatgctgtgatgcatgatctgtgtcaatacttaagttagtctgaaatctgcgagactgagttacagaatccaaggtttgattgcatttaatttatttgagcgttaccgcgtgtttatgattcaccgtgtgtgctactataagtgtgcattgatggcaaagcttatgcgttatcaacatgattgaccagaagccttttcagaatgcagagttgtatttgttaaatagatttgcttctataactgtgtttctgtgtttaattgaatacagaactgatatatttatacttttttcttttatcaggacagagagaggaacatatt

SEQ ID NO: 24791 - DNA, 964 bp, Glycine max
  Intron number 1 from transcript Glyma09g01340.1 (locus Gly ma09g01340) derived from phytozome v7.0 (chr-ID Gm09; pos 828569 to 829532)
aacgctacaacgttcaccggagattggccttgaatgtgagtcacctcctctttgtctctacttttgtttcctcaaaaaccagacttttcctttcctaactttaattttttatttattttttattttataattactatagagtttttatgtacaatttgttattaaatagtggtgtgtaacatttttcagtgtttattctaataattattcagatttgatttcggtgtcttgcaattgttttggggaatgaatttcatgaccacataaactcaattatttgctttcggaaataattgaagttagactttctctctcaatccaagaggaagaagacacttttgtaatgaatagttctatattttgctttttttttttatcagactattttgctaataattatacagtaaaataatttaatatttttatttaattataaattactgttagtataatttttaaaactattattattattattattattattatattttttaaagtaaatattataaaatttaataaacttatgaaatgtaataatttataattagatgataatataaaataattttataccataaaattatttatattgtgggtttatgtttttttttcttcatatttataattattaaatagtataaatattgataaggaattataagaatttaggttgtgtttttataatgaatgaaagaaataatatataaaagattgtgtattttatttttctcttttaaatcaaatacattcttaatatttttatttgtgtttagctaaaaaaaaatgttattattaaaagaaaaatgtaatattattagatggtgggaaacgaggcaatgtttcctatctcttgttttattgaagaaaaaaacagcgtcaccgtactaagcatgacatgatttgtgaacgtggcatggggcccacaggtaacactgctgttttgtggcgacccggttaatcc

SEQ ID NO: 24792 - DNA, 552 bp, Glycine max
  Intron number 1 from transcript Glyma09g27070.1 (locus Gly ma09g27070) derived from phytozome v7.0 (chr-ID Gm09; pos 33766550 to 33767101)
aagtcaatattagttcacaagctacatttggtaattcttcacttttttcagttttttttgttatttatttccctttatgttctctcttctgtcggttgtctttacctttttcttgttggacaaaacatggatacgaatttaacatggaatcactattttcttactcctaatttctttatctttatgcaaattgttatttaaatttagttactcttaattattcaattctcagagtatataattttactattagttacccaattattacataagtccatgttatgtactattgttacttgagtgatttaatactcccatcaaaatcccaacaattcttctatcagaattagaggtacctggtaatctgtgcaaatatgtaatattgttatgtcaacctagattgttgaggtgaaacatctattttgacagtgtaacaacattaaaagcaaacaataactgtatctaagttttgtccttttttattgttttggttacattgattattgtgtgttttaacttttaactactggggttgcaggggagttgaaaaaa

SEQ ID NO: 24793 - DNA, 756 bp, Glycine max
  Intron number 2 from transcript Glyma09g23090.1 (locus Gly ma09g23090) derived from phytozome v7.0 (chr-ID Gm09; pos 28418859 to 28419614)
cacttcataggtatttgtctttactctttgtctacttgctttaatgtacttttagcaatatttcatcattcagatgctgcctcttctaatgtgccagagggatattctttaaatttccattaatactaatagtaaggtgggagtattcccaattttatttgctgaatccaatgaacattgaaatgatagatgggcctggtatttgtacctgaacctgtgtcatgcacatagaattctatctttgcttttaattattttcctaccatatataagacaggaatgatttgacttcagtaaaactgcttgtgaaattatgattttagcaggttttcttcaccacaattagctgcatatacatgtatttttattgccatatggacattatttcaagttactcttagtatagaagatgggcggaatatttgtttgtattctaaaataaagtaatatgtatcttaaatatgatttagatctgttgattgcagtttttattagaaaaatttatttaatatacattctgtaaattatagaaaatcatcctttaaataccaccgagttgatgcacaatacaaaagtattaataccatgaacttccttttccgcctcagaagcctagtgattttagtatgttattcaactttccacccagcattttctaaaccagaaacttttgcttcgtatgcagttatagttttgtattcttaaatgcatattgaccttatgcaactcaactctcccctttcaggtattgtttag

SEQ ID NO: 24794 - DNA, 305 bp, Glycine max
  Intron number 2 from transcript Glyma11g01860.1 (locus Gly ma11g01860) derived from phytozome v7.0 (chr-ID Gm11; pos 1138868 to 1139172 reverse strand)
attggttcttggaggtacttacacttttctcaatcatgaacttgttgtgtcctatatatgattttttccccactttcacttatcctttctgttttcattcttatatttgtttgttttagttttttacttttgaatgttggtgtttttacttcaatgcatgcaaacttatagttatatgagaatatatagtttgctcataaaattactcaaattgttttgtttactcttcccatcatatttgactttactcagtcaattctattttaataattagtatctgaggatattattgaacatgacacagc

SEQ ID NO: 24795 - DNA, 652 bp, Glycine max
  Intron number 2 from transcript Glyma09g06800.1 (locus Gly ma09g06800) derived from phytozome v7.0 (chr-ID Gm09; pos 5572311 to 5572962)
gaacaaaaaattgtgtgtttagaagctcaagttaagtgagtattgatgattcagttaacatttgagtaaatagttagatttatttttgaaagatttattagtctttgaaggatgaaaattacatatatggtatctatatatgcatttagaaagtgtttccatgttgaaatctcatgcaataaacaaattgcaattgttagaagaagatcaaatgactcaaatttcgtatacatgttttaagtccaatttatccaaataaaatatggatgatttgatcttcatccattgattctgatttgctgactgcacgaatgagagaaaattttgacttcaaatggagaagttgtaaagcaaactagcattttagatcctgcgaatgagaaaacaaacatgtttaattgtcttaatcaaattattcatggagattctgagattcatgacatcattgacatgggggttaatttgactgaagaaatgcacatttagggactttaggtttaattttcatcgttcagggactagtatgaactttgaagcactaatttaattttttactcggaaaaatatgtcaatcactgaactgaagttttgttctattgatggtcatggggctgaccttatgtcagggaatctgtacacgagaaagcaacat

SEQ ID NO: 24796 - DNA, 702 bp, Glycine max
  Intron number 1 from transcript Glyma11g08980.1 (locus Gly ma11g08980) derived from phytozome v7.0 (chr-ID Gm11; pos 6354373 to 6355074 reverse strand)
atctcagtttgtcctgaaacttcttcggagaagtgagattgtatacaggcctttaaaatgttttcctcctcctcctcttattcctgaataatgatacaagatgagcattgcctttcttgcctgtttattttctttgtccttgattttgaaagtctgattttagcactttttttgggtacatatttaatcttagaaactgagtaccctcagtagttactcctaacgatgtagacaccctggagtcatgaaccattgtttcagctttgagccagttgaattgctagtcaacgaggttaaaggataattctgttgaaatgtagtgcactggaagagaaaaaggacgagagagaaatgaaataatcaatatgagcaagttatattgatatggtatgtaataacaatatacaaaatactgacctaatggtctcatttatgctagtaattaggtactatgatagtactgctagtaaaagctcaaaccatcagggcaataagaagactaaccctatttaagagaacaaagcatgactcataataaataggaaacaactcttaagattgcttcctcaattagataactaattgatcccatgatatattctaaaggcattctaagatatcacacacacacacacacacaaatattaaacttcgtaccccattgcccagaggctcttcgccatgcgaaggtatgggggaggg

SEQ ID NO: 24797 - DNA, 1016 bp, Glycine max
  Intron number 1 from transcript Glyma12g31940.1 (locus Gly ma12g31940) derived from phytozome v7.0 (chr-ID Gm12; pos 35480290 to 35481305 reverse strand)
gactgcacaaggatttggtctcccttccaagtgggtgttagcttttttacatttcactttcttcaaaatgattaattttagtgtagtgtttaagaaaccttattataagtttgtgagctttgaatatccatattggatttaatatattccattgttgcttgctttttgtgggtttgatttcaaatggttaattggacttgcacactttttgtgaccacttgtgagaccatggttgggtacatactagttcttgactgtggctaatgctattttgttatgggtcctgggccaggaatatagtgtacacttgatttgatttggagttatatacttttatgcaaatgaacttctgatttcaaattaggaactttcttaacattgtttagctaaagaatggataaagcaaaaaaaaaaaaaatcccttttgttgcttttagcattcgttgttaaagccaaaaataaactgatgaaatgcatacaatgtgatataattacagggtgaagagactagccacggtcagtatcaatgagagatttggagttttggatattattttcccccctagagaattagaaaattatgagggaacttttatttattatactttttgtaattttgttcattagaggaaggaacttgttaatgggaaactgttaatatcaaatacagattaagaatctgaatacttgttaaaaatagtttttgacacaaccattctgatgtttagatttttggtcttccattaacctactcttatatttctcattattttcatgttcttgaatgctgggaagtattgttcaatatttaatatgcatcttgggaaaaagttatgaactcgtttgaagagctattacgtcatgttcagaccagttataaacattatcatttgactttatgcatttccattttgcattttgttatgagttttactggaagatgttacattttgaaacttctgtgtttgtcactaattgtagagccattatccatatctgatattgtggctgcttct

SEQ ID NO: 24798 - DNA, 854 bp, Glycine max
  Intron number 1 from transcript Glyma09g40020.1 (locus Gly ma09g40020) derived from phytozome v7.0 (chr-ID Gm09; pos 44982958 to 44983811 reverse strand)
agattgaatcaagaattgatttagaacaggtaagttcggctgtgccttttccttccttcaccccgtttttcctgtgtgctgtttttttttcttttctatgaacatggcttgattttgggagctatgctcaatttttattgaacttttatcaatattgtaatctctattttatttggtcttgattcgtttgtttattgttctgatccggtacttagtgtatgaggaatgaggattgctgcaactttttgctgttttttgtaacttttgattctgatgcaaatgctgcattctatttccaaaagtaaatctgtgacttagctataaactttcaatcagatgtagagaatttgggtatttgtatcaatgaatgtgtatactgccccctaatattgattgtcatctgtcttggttagatactaagatgtacagaaatgttctaattgtactgttgtggaaacttttccattgttaataacaataatgaagccttatcccactagatgagtacaactaaatagatcacacgatggtatttggctcggttaaagaccaaatcttcacagatagtaacattatataaacatgatgagtattacgttggctgccgagagcctaatacaagcctcctcctttacccggcttgagactagctatgaaactatcactttttcattgttaatatttcttataatttcaagttcaagaatttgaacgtttctggaccctccaaataatggttgagcacaagagaatatactttctctaatttgtaatttggtttatgtcattctgcactgttaaggttggttgctttagattttaatttttcattgtttactgatagccagaacatc

SEQ ID NO: 24799 - DNA, 442 bp, Glycine max
  Intron number 1 from transcript Glyma10g32060.1 (locus Gly ma10g32060) derived from phytozome v7.0 (chr-ID Gm10; pos 40516176 to 40516617 reverse strand)
gcccaagtaataaatatacttcttttctttattatatttctcttttttgtttccctgtaatttctgtttttttttttttcatatgatttcaattatttgaatggtattttggttttctttcattttgctcgagttgaggtttggattaggatttttttttcctttcagtttttgatgaatgaacgaatcaagctaagtgccataggattgaggttgattttgttaaggtgtttgtattatgactgtggagaaatcataggaaagagatttatgaggttcttacttcttaccttaaccattcaacaaattaggtagacatgatagaagtaactaactttttaattggctctatagaagttgcaaagatacaagctttcattcttctatcaaatgcatctaatctctctctgactctgtgtgacacacatatgatgtgtaacag

SEQ ID NO: 24800 - DNA, 546 bp, Glycine max
  Intron number 1 from transcript Glyma09g30050.2 (locus Gly ma09g30050) derived from phytozome v7.0 (chr-ID Gm09; pos 36957838 to 36958383)
cattttccattcgtagacgccaagaaccctaacaggtactgcccttctcgctctgctcaaacattctcttaccctcttagttttttcttcgatagttgaaatgggttttcatcaaaatcctttttttcctctctctttttctcatttccccactttcattttgaccttagattttaatgatctgtttggtttttttacataaagatatgattttttcccacttttttcatggtaaaatggatcttagatcaaaactcagaagctgaagcctttggggcatgaggttttgcatgtctacatttatgggatttgtgtaatttacccccttttctggtttgactttatctgagctgaaacaaaggtataggtcagaaaattgcattctgtttgttttagttttttttgttctatttttggtattaaactttgtatgatttgaattgtgttggtttgttaggagaatgcaatggacctggataatttatgaggatatttaacatagtgtacattgtgctcctgtaattattttcatcagttggtgttgtg

SEQ ID NO: 24801 - DNA, 848 bp, Glycine max
  Intron number 1 from transcript Glyma12g00480.1 (locus Gly ma12g00480) derived from phytozome v7.0 (chr-ID Gm12; pos 203989 to 204836 reverse strand)
cttgcgaaaggattttaaaaagtggacaggacaaggtattgacttttacatttttataaaggtgaatttggcctatcatttcatttcacaaatgacaatatatacatatcacattccctctctaagtggtactgcatgctgactgtcggcagagtagatcgaactattgttctaataaactactacaatataaagtttcagtttaagaagaagaattaataatatttgattgtatctcatgtgaaaattggtcaaggttattgtggtcttgaatcatgtaatattttcttgcttataagtcactttttacaaaaaatattttttcaaatttgtagctagcagtcctttcactttaaaggcatctcgcttgtggtctttatcctcaaataattcctatggatctcaaaattcttatgaactgtacttattactaagtgaaataacatcagctggtttgtgataaaaaaaaaaaaactaagtgattttttttattaagtaaatataaggctttgatgttttttttaaagtttataaacgagtatcaactagaggtgttttttattaggttatattaaaaaaaagtcattgatctatcataaaatacattgattcagtttgaataagtttttttttaataaaaaatataacatatataatgttaatgctataataattgcatagtataattaactggagaatacatatggtaaggtattttcattttattaatgtttaatttgcacacttttttatattttatgaatgtgggacactatattaataaaatttatttatttgaggggggtaataaaccagaaagtgcagattcaaggtcagtgcaaattggc

SEQ ID NO: 24802 - DNA, 982 bp, Glycine max
  Intron number 3 from transcript Glyma09g06050.1 (locus Gly ma09g06050) derived from phytozome v7.0 (chr-ID Gm09; pos 4820805 to 4821786 reverse strand)
tcgacacccttcccgtcacatactggaaaacaaaagtactctctctctctgtcctatacttttttatgcattttctaatgtaacacttgccacactattatttagtgatagtaacatcactttataaagaaaaatcttctgcccactagacacaaatactaccaaaaccatctgccagcaaccaaatacgatcctccaacattttatatttgcaatttgcaacattaattaaagcatccgcatattttatcaatcatctgtttttcttgcaaagccagcactatatcgtagcacaagatggccatcactatgttgattagagactgttctaacttatatagcggtctcaaattcaaacattaggaatgcaattgcgattaaacttattaggaagacttttacctctttaattggtagtcttgcccaattgggtgatcaaacccaaaattaataacacgtggttgatagttgatagaaagagaaatttcattcaaagtgatcagtggtgttttttttttttttataaatattagggtgtttttagtttacattttcattttctgttttcatttttaaaatattagaattctaaaaatatgtttagtttaattttttgttttcagttttcaagaaataaaaacactgaaaatgtgtttttaaaaaatgagattttattatttttaatttttggttcgtttgagaaaatattttcacgaaaaatatttttaaaaatccaaccaaatgcatttttattaccattttctattttcaataaaaatgaaaacagacaacaactaaaccaaacactcatttagtaatccgtaaatctggtgtgtattttgcttcaataacttggtaacccaaaaacacccaaaagtaatactagatgaacttacaactattttatatgtaaataaacttatgctttcttcagctgaaggaaattttgcactttaatttctacaggggaatacttagaaaa

SEQ ID NO: 24803 - DNA, 578 bp, Glycine max
  Intron number 1 from transcript Glyma13g00580.1 (locus Gly ma13g00580) derived from phytozome v7.0 (chr-ID Gm13; pos 312688 to 313265)
aggagattgataccgcaaggtatttgcattcatttctttcaactcttattactactacttagagatgttcctttgacttgtttcttccttcaataagatatatttccttttgagccgtagattggacttgttgctaggtgaggtgaacatgtgaatagatttttgaagactctaatttaatttctcccttagtaaatttagtttagacccgcttaagaagtaggaacggaaaaggtaatggtttgactgttcaactattgctcatatgaagttattcttcgaaacctgaattatatgaagttattcttgtgtaggctaacttgtgattgtgaacaatttctttacagctggtgcctttttttctctcttcgtttttaaggataataatgcaatgatcaccaccccactctgttttgaacactaattttcattttacaaaaaaaaaaataatgatattatttggctgttatttttttttctcctctagtatgtgatgaaccaagaaatggatattggcaagtgtggttactcaccttttatactattttaaacttcttccagtgaattggtttcttctt

SEQ ID NO: 24804 - DNA, 938 bp, Glycine max
  Intron number 1 from transcript Glyma09g25510.1 (locus Gly ma09g25510) derived from phytozome v7.0 (chr-ID Gm09; pos 31771820 to 31772757)
aaagctctcttcaagctcaaaggtacattttgcataataagcaattctgtgttttatttttattttattcttttgagctcccctttctgggggccatgggttgagcttgtagacattggccattgcatggcaacagtaatgtgaatcttagcattttagttgggctttgatttcaaaattcccatgtgcattcctcacttgctttgctaagtgtacaaccctaattaagtaaagaatttggtacaccataccattctggggtccatgtagacctccctgttgcctgttgggctccatttttcttcatgctacgttttccaaatccaacaaattaggtggctcctctgtcacaccttagccaaactacattatttgtcattagaaataaaaataacatttctatagtcttacagcaaatgtattatgcagttatgtttttttaagaaattgaccttcacattgttattattactactcttgttagtaaaacttgcaagttatatacaattatgcattttttaagaaattgaccttccttttttagtaatctaatttcgaggtgaaagcttgcaagttatatacaattatgcatcctgaaatacttcgttactttctagtttctacaatgtgtattgtgttacaaggatagatgatatcttataagtgtaaaacttttttgttttagttatgaacccagtgaacaaaagagaattacacttttttttttcttaaaaagtgagttcaagaaaaacatggcttgatgagctgtcattcagcatgaaaataagcatgcccaaaagcaagcaaaaagtactataaagcaacttttacataatcaaagttgggtcaccattgatccaaatgtatgattaattgttagttgcatatttgtgtgcaccatgttaacttttgaatgaatgtgtgatatgcaggagtag

SEQ ID NO: 24805 - DNA, 874 bp, Glycine max
  Intron number 3 from transcript Glyma12g31170.1 (locus Gly ma12g31170) derived from phytozome v7.0 (chr-ID Gm12; pos 34760503 to 34761376)
aacgtttagctcctgaccttgtttttgttgttcaggtatgcacttgcattttatgctgtgattgattttgttcacctttgctgtgatagcttgtaaagtctgggcggtggtgtttttgtgcagataagcaacgtgattcaattcaaactgtgctatatgtgttcttacttatcctaggttttgcttctttgataaacgtgtgactgctatggtttagtggttttttgtttgatttgaacctgcaatataaagtaaagaaatgtgttcattgttcagtgccttaaaagttcaccaagagtgaaactcagcatgtggttgacaaatgttggtgttgcaattgcattccaaaataggagtagcaacctactttcttggcttgggaattttcagtttgtatttcagctgttatgctagtacagctcttggattccatggcatggtcttgactcttgagtcttgataggagattgagaagattctatgcttcttcaatactccttttccccaatgtctagagcttgtatttcttttgcttaattttttttgcatgttactgtttgttttaatgtctttccaatatttttaggcaaataattttaagatgcttagctgagccagacgtttttaactcttaatttatccaatgaaaatatataaaactatgtgcttgttcctaagaaatagtagattatctatgttgtatcagtcattcagtctcaatttgtactgtatgcggtgtggtaacttattgcatttctatactactgtggtgtttattgcttcatttaagcattggcttcaatttgtaactttgactattattttccccttctggacagatacaacatccaaggtctcatttgaataggtttga

SEQ ID NO: 24806 - DNA, 601 bp, Glycine max
  Intron number 1 from transcript Glyma10g07340.1 (locus Gly ma10g07340) derived from phytozome v7.0 (chr-ID Gm10; pos 6039804 to 6040404)
ttaaggtttggctcaagagagaggatttgcaacctgtaagttcgttctcaccaccatttttacatctgggtcggtatctattttttgatcttgatgtgcaatgggtgtgataagtgcttcattgttaattattattagtgttattgaaaatagagttttatgggtatgtgctgttgtcgtacacacatgccactctcaactaatgagtgattatcgatgatatgacttttaaggtggctattattataataaaaggaatgtcagaaaacttaacaatacttgaacaatttgtgatggcagttttgaagaaaaaatatttttgatgtgttgttaatgaaatatttcagtgatgtaaatgactatgtttttgcttgaagtggaaggaactgtgctcaatcaatcatttttattttttgtttaagttttaactataaatggctttatgcatttccttggattttgttacaatggagtcttgtgtttaagagatgttatgtggtttactgaaggatgagtgaacaacatacgtgtgtgttaacgaatgaatatttgaaattggggtttaggttttctcatttaagcttcgtggagcttataatat
